United States Patent Application Publication US 2008/0114160 A1 - sequence listing, part 21

SEQ ID NO: 6960 - DNA, 32175 bp, Oryza sativa
gaagaattggaagtcgaagctcttcaccgagtttgtcaacccgcccggcaatcatacgtcgttcgatgaataccctcaaataaccgaagcggtgtgggaggaattctgctctctaaagaccacccaagagtttagggaattaagcgaggcacatcgcgtactgcaacagcggaatgagcacccgcatcggctgggcaccgcagggtacatcggcaaggaggcaatatgggcccaagaagatgcagccgctgcagcagcgaatgtccctgccccgttttcagacatccctgaacaaagagctcgtaactgggcgcgggcaaggggtaaggtcaacccggacggctctgtcacatttgagaacaaaagtgatgccatcgtctatcaggaactggtgagttcactacttaacctaactaatttccgttcgtataaagtacaagttcgtataaacgactatcttcttttctagttgggcttggttgctgaacaagcttcacaaagcgaggttgagtccgcgccgaagaggcgcgaagatgacatcctcacaaaggcgctcggaaccaaagaacatcctggccgaactcggggaattggtagcgatgtgccctggaagcatggactccctcagtacagctcccaatacaggaaacgaaaagtctccaaggaagagagggacgctcgtttgaaggccgaacttaaggttgaggtcattcaagaactagaagctagcatgaatgcaagggtggaagaaagggttaacaaggtgctcgccgacatgaatataccccgagtcacaacacctgctgtgcaaccaactcctcgtgtacaacacgacgcgagtccgtcacagcataggagtagttgtgcatccacagaggtgccggcccctggtctcccgatcgcaccactagctgcagtggaccacatcgaggtaattgttgttatccgatccatatctaataaaagacatttacacattccaatattaaattcaaactttcaccttatgcagggcgtagcacagtgtgtcctactagcgagagtccacccaactttcgctcctgaagtcgctgagggcatggctttcaagccctcggttacagacaaggtccacggtgcagacctgctagctgggtatgccaaggtgtccatcgatacagtaaaggacacctggtcaggctatccgctgcccgtgcccccaaatgatgaaatcatgactttgggcgatgcgcgcaagacgttcatacaatggcccaaagaagacatagttgtgaagatgactcctcgtccaagtcgaccgacggagcttacacctcccaagtctaagctatcaattgaggctccccgtggaccggcattgtcagtacctcattctcccggtggagctgatatggacttggcagatatagctcaaagcttggctccaataaagaccacaagaaaggccgatagctccccaccacttgtcaagggccagaagcgtgaacgcggcaaggggaaggtcggggagttggcgccggagccaaaaaggggcaaggctgcgacgtcgatgccggtgagcaaatcggggaaggtcgtgagggcgccagcccaatttgagctaggcatgccattggtggaggacaatgtgttagctgtgatgggtattgcttgccgagagctacataagcaataaatggagctaagcaatgccaagcggaaatgagggagtcatccatagttggacatcacgaccaccagccgttcctatcgtcgcctgcctatataactataggctttgatgacctcttcaaccttttcaggatccgaaagttggacactggtcttctaaaatgctactccttgtaagtgcataccttctatacttgtgatatgactggactatatctcctaattaaattagttctaatacgtaaatattttaaggttgtgttggatcgagagtcgtcgccatggtaatcaggttgggttccttgatccatccatggtgaatgaggttaatttacgacagagcttcactgaggtggttgactatgtcaaccggtgtttatgggcccatcaagacaaggagtacatcatgtgcgcacacaaccaagagtaagaggacaatacccttcgtgtatattgtttttgaagttaaggttcttagtactaacgctacataaccactgcgcaggcgacattggattctcctagtcatcgtacctaagtggagtagggttacctaccttaactccaataagtccaaagattatgatttcagtgaaatcaccaaggccttaaatatggcttggggcccatatgtggaaaagggtggtaggcacaaggagggcaagaacgaactttatcatgacaccaagtttgcatgcgcacaacagatcggagaccaatgtggtttccacgtgtgccacaacatgtcaacacttctaagagaggtgaaagatttcgaccctgaggttgttgctaatggcgaataagctcatttcaatatctacattgctattcaaaacgtgctaattaacctcttatttattaaacagaaaggtagagctggcttcaagatctcacccatcaaccctcccgctatcagaggcgaagtgtgcgcctttattcttgcagaaataatgaacaagaaaggacgttttcatgccaaatagactcatgaacttggctagataatttattgtgatgtaaaaaagatgtttttataatttctggcgatgtaaaaaattatgtttttatagagtgcaatgtaatttactttcatatgtgcaatatttatggtactttactaaattgtcatcacatttgatcaactacgatttacgttgtactattaatctattttctctttttttttcccttattgacaggttgtggaggtcgagtacattatggctttaatccatttggtaagtatatatgcggttctatgagcaatgaccgaaattgtggctttcaagggtggtgaatttgctgtgcaaaattgtggcatttgaactgcatatatgtgttgttggggatctgtgatgtttgagatggatctgtgatgttatattgggggggtgatgtatctgtgactagaatatatctgtaatgtatctgtgtttcagagggcatggctcgcaaatcctgaggctagccaatatttagcatttattttttttctggaattaactcatcagtgacgggtcggaacaaaaatccgtcgaaggtaacctaacctgtgacggactagcaaataaaggcccgtcagaggtgacctacctgtgacgggcctttacttttggggccgtcacaggtagatcacctgtgacagcttctaactacggagacctcaacctctgacggcctttatttaaagggccgtcagagatgagtcacctgtgacgggtcctaactcgctctaggctagcggagaccaacacctctgacggccttctagtaacttgcccgtcagaggtgggtgtcacctgtgacggccggccacccgtcaaaggtgactggactcaccagtgaccactgatcactgaccatgcgcgaagccgtcaaagatgagggtttgggcccgtcacaggtgaccttggccagtgtagtgagattgccatcgctctgattgcatccacgagggggaaaaaagatgcagctgaaggcgcgcgttgataagggcgtataactagctggtagtctatatgggcataggactaccctagcttttagcccaagaccttaaccctatacccacgaagtctaataaagttctgtgatatatagtgattttcatctttgtaagatttatattgttaaactgattcacttaagattgcatcaagtgaagccttaaaacagtaactgtattactccctccatcctaatatatatcaacctagaactagataaacacattctattaaaaaatctagatgtgttccacacttgcatccagttctatattgctatattttgagagttgggataagggagtatatcataatatgctactctctccgttctaaaatataacaaacttctaacatttgaaatttatcctaaaatataacaatttttccacctatattccttctcaatcaattataatatttcaccgttcaaattttttaagtattttttcctcttaaccaattacaatcttctctcgtttaattttacttgtgttcttaatacttgtgtgtaagtctaaaactcatattttgggacagaggtagtatttacaagaactaagttgtattagtaaggaccacggcggaaggtaaatgatttcctattgtagaaatgaatatctcatcgtctatattttagcttgtatgcatttctcatttagacatttttttttcataatattatattattataattgatacctactcagtagggggtcacatataatctttttcgtcttttgtaatgagaaataggactacccaatgaaaaattcctggctacgccactggtgttgaatgcggcttatgagctttgagatggaggcggtagtgtgtgagctctcggatggaggcttgggtgacagtgtgagggctctcaaaagcattgtaaaaatagataatgaacataaaagctctcttttacatcaccatcaaaatctcgctctgcacatatatttatataggtcttataaagagataaatcgtatctgtactccgatttatagattaaaaaaaacctatcttatataaaaatttgtttcacaacaatgggtttggttcggtctgtggtttgtttaagagtcaggcgtatctgatgggtggtctagggaccatccaaaactacatagctataatttagaaaagaaaaaaatattcttgaaaagagaataaatatttttttgcaccagtaataattagcaagtcgtttattaatatatcacatggtatatatttttttatcaattatatattttcgttgtatacattttatatttatgacacttaaaaattttaaaattatgtaaggtggaccaccatataaaaatgcttcacagtgagctgggttggacttggagcagtttttggatgacgatctagggcgtgtttggccagtgagccggctattttttttcaacggtcaggctgttgccttcgttttatatgaaaaagaagatgttctattttaagaaaaaaatagaaccaaaacttacaatactacaatgcatagttaattagagaaactgggcgaaaaccacaactataaaactcaaaactcttagggtctgtttggggagcttaagattctaagaagtagctgttaagaagctagctggtgagaatctggagaagctggaaaatccagcttctggcctctagttcattttccagattctacaactacaaattctcaaaatcttggtaaaaaactggactgtttaggagagtttctggcaactgaagattctagaagaagctgcagctgttagaagctccccaaagggccttaacaacctatcaagaccctgaaaataaaggacagtcggagcccaaaacaactgtcgataaaaggccagtgaaccggccttgaatgacgatctccccaactctcgatctcgccgccatcgtggagcttcccctcgccacgcaacgctctccccaactctcgccacgcaactccaatctgcccgccaccagtccaccgcgccgcctgctgtggccgcgatggcgtccactccgctctcgcttgcgggcgcctcgtcccgtctctggctttgacgggcgccaggccatccatggcccccgcacgggaggtgttcgacgaaatgcgcgagcgccaccgccgccatgagctgtttggcatatgctgggaaaaaaggctattcgttttactgattgagttcgcctacactctcgtagcatacgggagaaatcgattcgtttgtctgtttgagttcgcctaaactctcatagcatgggaaatcgtggcatcgccaggttgagctcgcaggcctgctgtatgccagcgggatgcttctctctgtcaacaattttgacgttatgggacctgtaaaactgcaggcacaaattggacgtgttccggaggaatggcgtgcacctgatgatcccctcttgggttatggaatctggttggagacgcggatgagtggaacaataatttctaccaagctctaagcaagtgagttcacatttcccatcaagtttgtgagttcgtatttgtgcatattataagattgtggaaccagatagcgctttcagctttttcatgaacattttttaccttaagttgtagtgcacaaaacaaagctgcaataatttgcgcaaaatacaaagtatttgcctgatgtggaagacatgggaccagagatcatgatggttgtaggcttctactcactaggagactccaaatttaaatgggctgacccagttaacacttaacagttaaaaacatgatagtcttcgctgctgtttttctaaggctactgctattttttaacctatttttcagtaaaattgtgttgctgatgtttgtttaacatatggtctaacaaatttgctttgttggatcctcctagaactccaccatttatggttctaacttttgacacatcaaatcaacttgagtttggtgatcctaatatttatctggagtttaacatgtaagctcgtttgaatttgctgtttctagtatcgaatagacaagaccaaaacttaccccaaatttacttctagaaatgccatctatgcataggtatattactagcaaatttttcacacgccatcctttctgtacataagagtttgggtgaataaaggatgcatctccttactttggaacaaagttgaattaagagttttatgtaatggctaatctactgttaaattatgttttattctgcataaaatcatttcacgatatgatgtgtatcataatggtttaagaacaaattacttacaaaataacaagaaatcctttctatatggtaaaaaataacttctttacttccctgaagcattacaagtgtccatcttagtcttttcatcttgaccattgagcatgtaatattggctcatttcgctttctagtgctcatctgagaatggttttggcattctgctaaagttaggttgtcatcatgggcaaggtaaccgtgtgaactgtatagggcattcgatagcaggtaggggtgacatctgtagacagcagccaacaggtaaggcagtgggttactggggtgcagttttcgctatgggatgtgtcagtgttggttttcagatgacatgcacggtgcataactattgttgaaacccacctaatagggtgaattaaaccaattttagaagttcaggaggcttgcaatatatagttctattagtttcatggaatcaacattacttcaaagtgaatattagaaaatcaaagcccacattgctttcagaacatgtactagtggtgctaatgtttttaacgacatactcagaacatcaccgaaaatccaaaatagccagaaagtattcttttgatgctttctgaaatatacttctcaaagaacgaaaaagataaaatataaaagtagtaataaaaggtaaagtacatgaacctgattttcctgtaatcattagccacccatttcatcttggaccagatagtattgattcttgaggtggagccgaatatgtagatgggttgccttgagcagatattactgaatttgcattgaaaaaactgtaatctaggcagttctccacgctcattgcaccttccaataccttgacaaccattgacatagaaggcctccggctgctgtcattctgcaagcaccacattgcaagcttcatcatttgaatcacttcctcctggtgtgacaccatgtcattactgtgcttatcaatcatatcaagcaactgatcgttttgagccttttctcgtaataggttgatgagctgaacactctcctcgggctgtgagagatcaatatttttccttccacttattatttccatgagaacaactccaaagctgtatatatcaactttttcagtgatctgcgatgttaaccattcaggtgccagatatccaggtgtgcctctcatcactgtcactaccttgctttgatccctgtctattagcttggaaagtccaaagtcagccaatttagcattgaaattctcgtctaaaagaatattctgtggtttgatatccagatgagcaatttttcgcctgcattcctcatgaagataacataaacccttggcaatatccataatgatcttacaccttgtgcaccaatcaagaggagcattgttgtggcggtaatatatccacctatcaagtgaccctcttggcatatattcatataccagaagcctatttgatttctctgcgcaaaatccaattagcctgacaagattgatgtgctcaatgctgccaatagtctcgacctctgccaagaactccttctttccctgtctagcaccttccagacgtttcaccgctacactctcttcacctatttttccttcgaagaccgatccaaatccaccttcgccaagctttttactgaaatcttcggtgcattctcttaacttttcaaaagagaaccgcgttggcattccaggcaatatatcaaattctaattcttcatctagttcttgatacttcctcctccttcgtacatatatagcaacaataacaactaaaacaagagtagtaattgctgcaagtgtagcacctaaaattgtcttcaattttttttgtgtagggtcagaagagggagtaatctgtacctttagataagctgaagagttgtaattaaccttttcaggttgtattgactgcaaggagaatacctctgtcactgaccggcattctccattggaatcattctgaccatacctgaacgctactgctttgcatgagcaattcttcaagcaggcttgcttgcagtcatctctattttttgcattcatgatgatttggctcatatcaaagtaagaaacatcagtaagagtcaagagctgatgatttttgatttcttgacaagatactggtgtcactggtgcacaaccaagattagtcttccgctcgtcaactagctggaagtaacgtgaactagaattactctgaaagggacagatgcattgcccacttgtgcatatcccgtactccccgcacactgttgggaaagcacaatcatcaacatgtaggaattccttcattacatcagacaccatgatccagcttggttctccacgagaccactcaaacagcctcaagtgcccatcagactctaaccttatgtactgggtggacttagcttcttggaattggatactttcatctggatttcctggatgtgtggactgcaaaaagatgctgaggctgccatttgtaaaggtaatccttgttggatctctctggctcatgtttctgctcagctcatgcttaaagtatagttgtggtggtgtggattcaacataaccatgtacaccatcacggagaacagttatatatatcttaccctcagtccaatttgtgggggaggcatttgctctgagcatcttgccctgcagcagtgactgccctgggaccaatgcgtcggtgggatgatcaaatgactgccacactgtcatgttcctctgaccaaacagcacaaggttgccttgctcagtgatctccatgcgtcgcacggattggtctgaagtgccgctcgaccagatgagtctgccattggctttttcacggaggaccaggtcgccatctccagtcagctcaagggtagcattctctcctacagggcttgcctggttggcacaccagacaacccgtgccattttatttaccgggaaagaatctgtgtcagggaaaatgaagactgcgaagatgaattcttggcagggtggggtgcagaagaaccctgcggcaaatgagagatcggaggtttgtggtgatcggaggactatggcacgtaccaacccatcttcatatgggacgctgtcaaggactttgtttttgacccacagtgtcgagaggttggcactgggatagacggagcgctgcccggacaccggtggtgcggcaactgcgagcaccacgaccaccagcaccgtgaagtcggcgaagagatttccaggagacatgtttcttggattggaaagggaggagtgaagccagcaagaagctgtggtcagttcagaggttgacaagatctcctgacctgatgacactaagtcgatgagctgatgtggtcaccggaaagatatatggcctcaccgtcgccggcatggggtcgccggactggcggactctgaagtgtttgatcggctacttgtgttctcgctctctcagtacttcataactatatattaccacccggtgctttagttttttggtttcttgggaagatggaattttggcttgaccagttctaaatggccaataatggttttggtttctgcaaaaagatatgtagcctagtggttactaagtgacctcaaatttcagtttggatgtttgcaatttaaatgtttgcatatatccggttggatgtaaaggccgagtaaaaaatatccgtctctaaaagaaataataaaaaaaagaccaataaggccggtaaaaatacctttctctaaaaaataaaaataatattaagaaaatgaccaatcgagtttccctatgttgtcacgtgatttttaataataaaaagaaaaagcacatattgataaaaataagcattaaaaagcccaaaactatatgctacccggtcaaaattagttagcttcagtacggcatgacaaaaaataactagtggttaagccgggtaaaaaatacccttccctaaaaaaattaaaaataatattaaaaaatggccaataatcatctgtgctcaccatgtgatcgagagtatggtgagtagagttaactatatgctcgccatgtgatctagtttcgttacgttgtcacatggtttttaataataaaaagaaaagcacatgttgataaaattagcattaacaagcccaaaactatgtgctacccggtcaagattagttagcatcagtacgtataactagtacggttagccagtgtattatactattggcacaaatgtgtggaggatgggagcgttggctaaaatagagaggacagctggactaacccatgaccttggtccttgggcttagaattgcaaaagtatgtatgggtgagtagaggtaatctatactgcaatatgtagcaacgtacttgcacgaacatgtatgctgattcctgaccgtctggtcgcgaaatctggcggatggaccagattcgtctcacacgatcgtccggaaaaatcacccgcgcgaaccattgatcctatcccaccacgtaccgatcgaccccactcatccaatcgtacttcctgccttgcccgatgacgtacctcgtgcgctgtcaattgcgccccttcctcaaacctccttcggccttcctcctcgtctccttccgaacaccgtcatcacatatgagccccgagtgataaggacgtcgtcactttatacacacttaattaactccacaagttctaatgataatttgaagtctagttcgacctccaagttctaatgataatttgaagtctagctagttcgacctccaaaattagtaccgacttcaaacatgttgaacatttatgctaactccgatttgatcttgaacatgttggaaagcttatctcgttactttttaaacacacccagtctcatatcaaaattcatcctaagtcaacagaaatcatcaaaacaatacattgttgtttgctgaaaccgaacttgaaccttgagtcttataatagattatacccatctaggaaatgcctctctccacctccacaaccagcaactatctctagctttattatcataaaaagctttatacatcctgtaaaacaattgagttttgtttatttgaattttgccaagtgtcattcactttgtctctagtcatcctcgtttaattagtcggtgactatagattcagagtcactaatagttggtgtgtttatttgccgggtcgattagatctaccaccttaattgtaactatttcttgatgcttaattacctattcgcaatatttagattgtatcttatcttattcatgcagtgttctctcgtttgcattgtaggatcatcaaccacgcgtcagggttagtatgacatcgtttatggtgtagcaattgcacgacgttctggacttgttctggttggtagacacgtcgcacttgatcaaagcgagagttatcacctcaccagaagattgtaccacaagatatagcatcattagttggtatcagagcgtcggttgcgtggtgaagattttagttttgtatatttattttttctatctatcatctacaaaattactgtaaatgggtcttctttgataggtttgtttttttttccatcgtaggacatcaatttaaaatatgggtagttttagcacacttgagcaattgagtcaaattttagtacgcttaagcagtggaggcacatttgccattccagtggacgtatggtacgagtacacactaatctgacaaggtcaaagagcttagtagttgttttatatgcaatttgtttgttttgattggttgatttttctttaaaccaaattgcaatataggagataaagaaaacgtagagattgatccagtagagttttaatcgatctgtctaggtaaaagagctttgtatattttttttaggtctgcatgtgtgtttgcttggctttttcttaaccaaattgcaatagaagatagtaataggaaatacgatggatcaacggcacgatttatcatgctatgctataggccctattgatggggggcgcagacactactggagaagtactcatctcttccggttcgcaaccccctttactcccaggtagcgaatcggaagggagaatccgggactaaagatgacagtctttagtcccggtttaaatacccgggagtaaagcttcatctttagttccggttggtaacgacttagccacgtggctggcacaaccatctttagtcccggttaccaaccgggactaaagattttgttttattttttttaatttggttgtgctgcctactgtagaaatgtatagtatagaaatgtatatattacacatatgtacactatatgtatctatacatatctatacatatatatatagtgtacacatatatatgcaatgtcaatatatacatatgtagaaattcatatgtatatacaaatattatacacttaagaggccatatacatatattaacaaaatatgagtttgcaagtaagtaaatatacacatatattaccaaaataagtacacaaaagtaaatgcatgtgtgcatatataaatatatacatgtattacaattccttcggactttgtaatctttgtttctgttactacgacttcctggcattggaagaagaaggaccggcttgatgaataggctttctgaacgtgcagagatgtagcctagaggggggggtgaataggctttcctgaaattttctcaacaatcgcagcggttaaattgacagggcccggaacctcctggtgatgaacaccggaacttctgggcaggatgagtagcccggaacttccggagttcttgagccaggaacttccgggcagcagagataaattaaaactgagatgaaaaacaggtcctagcaagggaagtttaggcacacagaggaacaagatgaagatcacaagatatcagcagattcaaacaaagaacatgcacaagagagacaaagacgattttttcccgaagttcggatcacacgaatcctactctccgttgaggtgctccaaagagccgggtctcgattaaccccttgcctcacttatgcaaagatctcagaagaggtccacgaccttcaactcaacacttctaggtcattttctagaattgagtgaccaccaagatcaaactcaaaattccttctagaaaaggccacaagtgcacgttgctctacctaggataacctctgaaaactcagcacaagaatctttactcacttacctcgtttccttgcggaggtgaggaaaaccttcacaaactttcccgggacatccacaagatctttggaagctcacgggcaacacataactgtctaggagaagatctcaaagagtaataagcctaagtgacagcccacaaggtatccaaagtgctcaatcaagcctaatcttcaagccatctctaaaatactcctacactctcatctaatctctcaatctcacaagataggctctagatttcagtggaggaagcaaaggaagcttgggaatggctagaaaatcctagaacataaaagaactgaagtggaatggccaaagggtgacctggggacgaaatccatatatataatggctaggtgacgtcatctagccgttactcacaagtttgaactggaaacctgccaggaggttccgggcaaaagtgccaacttccgggcagcacttaggaacttttttgcaattaaacagcgcccggaagtttcggccagaacctccgggtagccctctctgtcccggggagaaaatcatttttcaaaaatgattccaaaaatcttttgactcatggatatgactaagagcactttgtataccctagatccacacttgaaacccctcttaatagtacggtttttcctaaactcaatttcgaaagtgaaaaacctagtctaatcacctttggtgatttttgcacataggaacattcctattggggggggggtctccttgcattcttagccatcacaacttgcttttggactaaactcctgtgaataaacttgataaacacgttagtcccctttaaccaccttgtcattaatcaccaaaacccactagggggtttaagtgcatcttcactttccatcgtaatagaattctcctgtgggatcgagaatctgcccgttgatgaatctcatcatctgttcttgaacagcccttatgaaatcatcgtgggtgaggctatatatcatgtaaatcatctgtcatttggaaaaaaaataggattatacatatgaaaccagtaaacaataattgacggatgaataattttacgtacttccaggtcctggccaatcctgatttggtgtgctaagcagtgcatgtaatagcagacgtagtagccgcacaagttagtcccctattcctgctttgcacactgaaagagaaacaacgagagatttaatatgcatatctaatttataacaaagaagtaattcaatataatattggagcatgtactaaccggaaaattgaacctctgtgtgagtttttcattccaaatcccgcggaccaatgtacagaaccgaatccatgccctatttacagttgttaggaaggattaatttattatccgagatccgtatagtacttgtagaatgattcataatgacagtgcaatatatgacaatacctatctatcacttcgaaaatatgtgcgaaagttttctccggtttatccattgattcgtagacatagattttggatttctcaaggttgaaaagaataaggacccagtggaatctgcaatttgcattagatgatacatgtgtgtgtgtctatatatatatatatatatatatatagagagagagagaggaaggaacaaaattgaagttatgattgtaggaactcacgatgtgttgtagggaagtagtatgaacatcttataatgctgctgcaccgggaaatggaggatattgtcctcggtttgtttctcatagttttgtagcatcagcgtgttcactttgcgggggtccatgaatcctgtattgaatttgttgtgccgacggcacaactgaatctctattctacaacgggtacaaggaatttgtataagctacgttcaaaggaggaacaaaattgaactataaacaatacttacaaagtccacgtgctgagaatagagacgtcgagggcgtcgcggtggtataagtcgaagacttctttgtaacggatccaaagaacatcatctccttgataataatctgagtttcgcaccctcgctccgaacatctctctgcccatccctgatttgtccaagtaccattgatgaaaccggtacatctgtgtaggtagctttctcttatcttatcaggcgtgactagcggttcaccatgtttaaacatgtacttttaccggagctgtttcgataggtgcgtcctctagcaactctgctccatctttagtccagtttctttcaagaacttgcgtatctcaagttgttccggatctacgaacggttcaacctcttgttgtggctacagccccagctgagggacttccattccgcacttcactgctgcaggcttggctttaagagccttcctcaatgttcgatcataatcagaaactacgaccggtttgctcagttcagccatcttaataaagtgatcctgaaccactggggatatagggatcttcttttccggactccatggcttcaactgctccctaacttccactctaacggcttcatcgagctcctccggagtcaagtcatacgcccttttcttgagagcggggagccttggctcgtcagatttggctttcttctttggtcttgatggcatgggctcatatgggcaggaccttgacggtgtagacttggcagttggtgtaggctgaggagtcgttgcccgcggacccgacggtgcagacttggcagcaggtacacacggaggaggtggtggaggcagaggagcgggaggagccggtgtagccgaaggagacggaggaggcggaggagacggtgcttgcggcggggaaggaggaacggactaataaaccactttagtcccggttctttttggaaccgggactattgtggaaatcgcccgaccctctaaagatcacttctccagtagtgtgatacctgactggtcgcgtgcatgcgaggccacatgatcagctacatatgtatatactatctacatgtataatgagtatgtatatattgtatatacatacatatatataaatatatatataaatatagttttttatatgtatacattttaatgtataaaaatatacatttttaatgtataaatatatatatacacatatatgaaatttgtatacatatatatacaaacttggtatatgtatgtacataaaatataccaactttttatacgtatatatacaaagtttatatacgcacgtatagaaataccaaaaatacacgtatatacatgtacataaactttgtatacacgtataaaaagtttatatatgtacgtctttaaataaccggaaaaagaaggaaagaaataacagaaaaaaaccaaaaaagatggggacgcctacgcgtcgggcgcccgatggtgtgggggaaaatcgagcgtgcaaaaccactttaaactattttttctcttaaattatttatccaaatcatgatccgattgcaccattaaattcattgcaattaaatctttaaaacaagaccatacatggatatattccaatgaaaaatgtttttagcttattattgaattattttttaatgttgcacgatgttccgccaagtatatcggatttgtttcactaagtagatcgaaaatgtttcaattgtttaaatcgggtgttgtttcaccttatataaaatcaatgtttcagtttgttgcaaaagaatgtttcagttcactgcaacattagatctatacatagtgaaacattgtgagtatactaggtaaaacatttttggtggaacaaacaatgaaacgaaatcccttaatagagagtttctaaaatatgtgggtaatttgttgcaatggagttgtgtgtgtggacacgtggtgggcccagggggcacctgcacgcacgcacacgcgccccttggcatgcacgcgcgcgggggttgggggagcgtccgatttttgctccccccgccggtcgaccgagcagaatcatttttgaaaaaagacggaaagaaaaaaatgaaggtaccaaaaaatgaccttgtgccattcgccgccctccccctctccgcacgcgctatgtgtccatccgtgcggggtaaggggcacgcagatgtccgagaaatagcattttcactgttggatctcaagaattcaaatggattttgcaaaatttccacacaaaatagaaagacactactatacgtgtctttcgacacatttatcagcctaaatctgtcaaattctgagaccatataagtaacaatagattactaagattaatacgataccaagcacaaaaattgttataaaagttagttgattgaacaaaacgatgactaaccttgatcaattcagtcattgatcacctaagacatatcagatgacaacacaggaacagacaatatttattaacgaagttcagccgaagcctacatgtctgggactttgattatggacgctccaacccaatcaatatagcacgcttttattctacaaaatatttagtaatactattaggagtgcagcgcgctccttagtattccgagcgccaaacatgtattagtccaggcgcacttcaccccacgtcccgtcatcccgctcccatcgttatcagagtaaacgatttacttcgataataaaaacaacttccctactcccgatcccatcccatgtcccgtcatcctgcgtccactattatcggagtaaatggtttacttcgataaagacaacttccctgattcctgtatatattttatttttcccatacccaaccaaccactctcgtccccacttcaatttttttccctttttttcggatctgaattgatccaccatcccagcccacagatcggtgacgcaccatggagtaggacggcgacaccgtggcggttgagggctattgatggtagttagcgatcaggtttgaccgtcaatattaccaaaatagaggagaactagttatgcttgcattgcatatccatgttagaataataatattccattagtatttggttcactaacattttgcagagaataatcattaagtggaggagaatcgacatcaaatcagatgataaatcaatcggacgatgtcgagaatcagacttatgtatgaatgggccaagaactcagaattgacacgatgaattgggccaaaattcacaagtctgcgtatgagagcaacggaggaggccacctgccaattttgggctaggccggcccgacccatggttcggccgaaccccccgcagcgccattcaatccaggtttctcctggacggcatagatgactccccaataacggttggtgggtattaccgatctttccaaccgtcataaccgtcattctcaagctataaaaggagctctcatcctcattttactcacacacctcaagcaagagttctctcatattttctcaagttagtttagtgttctcaagctagtggaataggaatagagtagaaatcggaatccggaagccttcggaagtgttcgggtatggctctagtagctcttctcttctcttttgtaagctttgtacttttattagaatactcttctatatacatttatggtattgaaatactttccgagtatatggatgccaactttacattatgttcatgtcatactgattataccgctagcttatctgggagatgcattggtacgggtatagtgtttgcttatgcaattactctatatcatgacgatgatattagagtagtatctgatagtttaggcgtagtgtctacattacgggatatcattatttggggttatatgctgcggatgacaggtgggatgctgatggtgacagctcattacgggtattcctccgcgcgtgtatatagttctaagttaattttctggggagggtactcctccgtatttagccccgattgtatggtcatgacgggctgtcgtaaggaactcgacagttaagggtggcttctcgaagtatcaggaggacatcggatatagggaattagctagtatgtcagataactaggatgtatgtatactatgtatactagaagtataggaatagattctctttctattttgtttccacttagcttacatcctagccacgcctgacatacgtacatctatacaaccggtatagatgtatagatagatagattagcagaagtggaaaacgtgagaactcataattaaaaagtactattagtataggtatagatagatagattagcaccataccatttctgtcacgttttccatccatctccctcattttccgtcttcttccttctctcttcctcaagaaatggcaccacccgcacctgttgtgacggcagcggcagacatccccaccggtgtggccgcccttgcctccgccggacgacgacaacctcatccaggagatcctcctccacctcccctcacagctgtcgaccattcggccctcgcgcctccctcgtctgcaagcagttgcgccgcctcgtctcccggattccttcgccgcttctgagcccaccaccgggattctttcctcctcggcgttttcaagaacgagctctgctaccccatcttcagatccgtcctcgatcgcgagatcttatctcgctcaaccatttcgccctgcggctcaacggcgaccacgtcgcaagcctcctcggttgccaccacagcatcttctcatcttcaactacaacacccgtgagttcctcgtgtggaatctcgttcggcaatcgccatagccgttccgtcgaagctcaccagggaggggtggagggagaaattcgtcatgaacggcgtgatgctttgtgttgctgctgtcatcggcgacggcagccatgtgcacggcagcggcttctagtcctgccgcttcaaggtggtctcttgatcccgcacccgccgccgccatcttcgcacctactgttacagcggcaggtgcggttggcgccaccgttcttggggaagagagaaggaagaagacagattgatagaaaacgtaacaggagtggcactgtcccaattttataaaagtccagtgacattcatctaaatagctgcatataccatggcacggacctaattgtttttttaaaaaaaaacggagcaatggcctaagttcacagatggcccacacaggcccatgttcatacatggcccacgctggcccatgtggcgctgcgtggaacagttggcccaatttccatccccatccgtgtcaatatcgatacacccttcgcggcggcggcggcggcggaacgacggcgaccggcggtcgagccgatcgaaagcatcaccacgatgatggccgcatcgagaacggcgttcgcctccggcgacctacttctactcactgtctcctcctcggcgtcaatcctcaccctggcaaaaacccaaggtatcatcaaatccatctcgttcagttctgggcgccgtcgtcggccgcgagatccacagtccatacctacacccggcaagcttcctctgatatctagtgattttttcggcatatagaaaaacatcatccaaaaaatccaacatatgtattgttcaggtttagtgataatattgatatgcagttcagatagctagtagtagtttgttttccaggataggcaattcaaacatgaaacatatttgcagtttaaagaaaatgttattagtaaattattcttccagtgcattgtgaaacatacttctcacaagaagaaatatgatagattaccaaagtagttacaaaatatgatgtgcatagatcggtggattttcttgtgctcagtagccgcctatttcatcttggaccagatagaatcgatgcagaaagtggagctgaatatgtggatgagttgtcttgagtagatatcactgaatttgcattgacaaagctgtaatccaggcaattttccacgctcactgcgccttccaataccttgacaaccatcgacatcgaaggccttctgctgctctcattttgcaagcaccacattgcgagcttcaacattttaatcacttcctcctggtggtgtgagaccatatcagtacttttcttatcaattatatcattcaattcattgtctttagccttctctcgcaataaattgatgagctgaacgctttcctctggctgtgaaatatcgatatttttccttccacatattatttccaagagaacaactccaaagctgtagacgtcaactttttcagtgatctgtgatgttagccattcaggtgccagatatccaggtgtgcctctcatcacggtcactactttactttgatccctgtctattagtttggaaagtccaaaatcagccagtttggcattgaatttctcgtctaagagaatattttgtggtttgatatccaaatgagcaatttttcgcctgcattcctcatgaagataacataaacccttggtaatatccagaatgattctgcaccttgtgcaccaatcaagaggagcattgttatggcggtaatagatccacatatcgagtgaccctcttggcatatattcgtataccagaagcctatttgacttctcggcacaaaatccaatcactttgacaagattgatgtgctcaatgctgccaatagtctcaacctctgccaagaattccttctttccctgtctggcaccttccagacgtttcactgcaactctcttttcacctatttttccttcaaagactgatccaaatccaccttcgccgagctttttactgaaatcttcagtgcgttctcttaacttttcaaatgaaaaccgcattggcattccaggcaatatatcgaaatctaattcttcatctagtttttgatacttcctcctccttcgtacataaatgccaacaataataactaaaacaaggctactaattgctgcaagtgtagcccctaaacttaccttgatacgtttttgtgtaggggcagaagcggagggaggaagttgcactttgaggtaaacagaagagttgtaatggagcttttcaggttgtattgattgcaaggagaagacctctgtcacagacttacattctccatcggaatcattatggtaatacctgaagagtacagccctgcaggagcaattctttaagcaggcttgcttgcagtcatctctactttttgcattggttataatgctgccatcaaagtaataaacatcagtaagagttaagaattgatggtttttcatttcttgacaagatattggagtcactggtgcacaaccaagattagccttccgctcgtcaactggctggaagtagcttgaactagaattagtctgaagaggacagatgcattgcccacctgtgcatatcgcgtactccccgcatactgtggggaaagcacagttatccacgtcgattacatcatccatgtggattacatcagataccatggtccactcaaatccagaccactcatacaacctcaaatggccatcatactctaaccttatgtactgggtggacttagcttctggcagtgcaattcttttatctggctttcctgcctgtgtcgactgcagaaagatgctgaggcttccattcgtaaaggtaaccctcgttgggtcttttctgctcttgtttgtgtccaccaaatatttatagtatagctgtggtggtttggatccaacataggcatataaaccatctgggagaacagtcatatacaacttactctcagtccaatttgtggtagatgtatttgctctgagcttcatgccctgcagcaatgactgcccagggaccaatacatcggttggatgatcaaatgactgccacactgtcgcattcctctgatcaaacagcaccagattgccatgctcagtgatctgcatgcctgccacggattggcctgaagtgttgctcgaccagacgagtctcccgtcgatttcacggaggacaagatcgccatctccagttaactcaagggtagcattctctcccaaaggacttgcccggttggccgaccagataacccgtgccatattgttttcctctaagggtaagccataaccgctattgaagttggcgatgaagacagcgaagaggaatgcttggcagggtggagcgcagaagaaccctgcggcaaaggaggggccatataaagtttgtgttgaccggaggatgattgcgcgcacggctgacccgtcggtgtaggtgatactgtgcgggagcaccgcggcgttgttgacctaccgcgtcgagaggttggccgtgggatagtcagggagctgcccggagacggacggtgctgcagttgcaagtaccactgcaaccactgccatcgtcgtcacgtctaagcaaaagagatttgctggacgcatggtgcttgaattgcagaggggactgcaagaagaatctcttcttaatttggttacatacaagaagccaggcagcaaggagctgtggacattggagaggctggcaaagatgtcctgacctgaatcctgatgatactgaatctatgaactgatgtgctctccggaaagatggcctcgtcgtcgcaggcagagggtggccggattccgaagtggtcaactactaagtcttctctctctctgtctgaatacaagccaaaagactaccagtcttcctggtgctttaatttggtttaggttctcttgggaagatggattggcttgaccacttcaaaaaggctaatacttggcattgccgacattgccatgtgatcgattttgcgtgtcaatgtcaatatcgaacaagtttcctttgtgctgtctcgtcgatttttcatcctaaaaagaaaaaaaagagaagtcgtgccgattatattcaagcattcttagtcgaaaaaagattatattcaagcattgtcagagtagatattggcatggtaggcatggtagtaagaagcttcataattaagcattgccacggcattccctgattcccttgtgccattttcgttctgggagagcatgacaaatagtagctagctaatgaggtaagatcagttagaaaacacctgaataatattggttaatgtaaaatttacatgttcggagagggacggataatttgcttatacttcaatatgtactcccttcatgcgtaagctctcctatatacatgagtgcttattattattattattattattattattattattattattattattattattattattattattattattattattattattattattattattattattattattattattattattattattattattattattattattattattattattattattattattcagattagtaaaatgtccatacgagtaaagtgaatttaattacctaaagagactagtctccgacgttcgaaatttttgctagcgtctattgagttcctctagctgtcataatttcctttgtggaggatcctgtttgcgagtaaatgcttgtatatctgaagacaatattttctcctctatcatccagccagtgaataacaagtgcattctgcaagtaagggcccttttaaatattaggaaggtaaaaaacagagaaatagaaaaaacatgggtcctcttaaatagcaggaatagaaaaaacagggaatagaaaaaacagaggagtagaaaaaacatgggattctaatagaaatgcaagtgtagggaaaacatagaaaaaatacagaaatgatcgtttgattgaaccacagcaaaaacgtaagaatcggatgaaagagatagactcgaaggaattttttcaagatattggacttcttactaatttttctctaaaatctctataggattatccattccatatgaattttaaaagatgggatatgattcaatcctttgtttcaaatgttttcataggatttttttttcatagaattgaaattctccaaaatttctatatttttcgtataaatcgaaaggaccctaaaggttagaatggtgaggtcactgaaccaatttgtgaaagtgattggcagagtaagagttaagacaagtgcaggttggtgatcacgagggcttcttcctgttaacggggacaaactacaagcattgccagaaaaagaatgaaccattgtactcgaattttttagcggattcagattcggacactgacagtattgggtgttcatttaattttcatttatgtatgcttcgagttggacagccaagcgggaaatatccatcacattttcctccgtgatgatgtatagaagtattgctactctcatctccttactgcaagtatatgtaaggatgtgtgaataaatttcagtaaataaactgctttaacaagctatttcaactgccagttcgttagacaatgatttaaatacgagagtacaacatcatatacaaaacatgatatccaactacattactttatgggtgaaaataaagccacattacaacttctcaaagataacatcgaatgtataacttgcatatatacaaaactgcaccatgtcacatgtgtatatcagtatatgccatgcaataatctatatacattccatacaaaactgcactatgtcacatgtgtatatgcaatgcaataatttgactatttccttcgcacccaacaaacactggtggagaaagcgtctgtagtcccggttcgtaacccccctttagttccggttgatcgatctttagtctcggttggtgttcgagctgacatttttttttttttgcatggccctgttgctgcatggtttatatatatatatatatatatatatatatatgaccaaaatatatatttacattaaagaaaatgtgtacacatgcatatagaaaaatagacatgtattaattacaatccattatgtcctagctagctacgattttgacgtagtagtagtcgctatctcagaagctaaggacctatgaattgtatttccgtcgtagtagaattcacccttgggatcaaggatttgttcgttgatgaatcccatgagttgttcttgaaccgccgcgataaattccttgtgtgtgatcaggttatccctcatgcgaataaactatatgaatgtatgaaattaattagtaattaaacaacaaatcgatacgtaatgaaattttgaatttatttgtacgtacatcgagctctcttgtggtgatgatttggtctgcaaggcagtggcaatactcgcacacatagtagcctcacaagttagttccctgcttttgctttgcgcactataaataaatgacaaacggcgagagatgtaattaatatacacttgtatatatttgaatcagagattcaatataaatgtagagcatgtgtactcacaggaaaattgaacttcggcctttctctccatttgccgcgaaccaaatgatggaaccgataccaagccctacatggagtttaaagatatgattcgtagtagcaattaattaacataagaatttatgacagtacctatctataagttcaaaaaccttatcaaacgtagactcttttttatccattgattcatatacgttgacggtgcaggcctccaggtcaaagagtaaaagcacccagtagaatctgcaatgtgtgtgggatgcattacatatgaaacagttagcatgttcgtacgggaatgaaatttggtataggaagacagtaaaattaaactaactctgtgttgtacggcaacagtatgaacgtcttataatgctgctccttcaagagatggacgagatcgtcctctgtttcttgcggatactggtcgagcattgcgacgtttacttttcgagagtcgatgaatccagtatcgaaaaccccccgccgtcgggccctttgaatctccattctacaacgataaaaggaagtatatattatatatagtctacttatatacaaggacctatttaattaaaggaaacgtaataagaaatctaactgaaagatacttacaaaatccagcaactcataatagaagcgtcgagggcgtccagctggtatagttcgtagatacccttgaaattgatccagagaatgtcatctccttgcaagaagttcgtgtccttgatcctcgctctgatcatctctctaccggtggcgctcatctccatgtacagttgatggaacttgtatatttgtgtggttagggactgcagctgctcaggcttgacaagcggtttaccgagttcgtacatgtatttcacttccgccttttcgattggtgcgccttgtagcaattgatccgtagttagcccggtgtcattaataaagtcttgtattccaaaatcttcaccggtcaccaacggctcgatctcctgatttggttgctctttaagctgagggactggtttggattttccagaagatgctttcttgagtgttcgctcatagtccgatagctctatggcctccttggcaggtgcagacatacccctaaagaagttcctgacactcaggtctataggaatcttcttttctggacttcgaggcttcaattgtctcctgacttctgatgccacaaaagcgtcaagctcatcttgcgtgcaatcgtaccccaggtccttgttcttggcggcatcaacttccgccttctttgttgcccttgtgggggcaggcggtggagcttggggggcccttgacttggaaggtgccggacaaggagattgcggaggagtcggtgtaggagcctaaggaggagtcggtgtaggagcctgaggaggagtcggtgcaggagcctgaggtggagacggtgctggagcatgaggaggagacggtgcaggagcctgaggaggagatggcggagccggaggagatggtgcacgagacgccgcttgtcgcccagggaggatgatgtaccgcttgcgccatagaataatggcgtggcttgtgtctcgtagatgcgtctcaccgtctcctccagggtaatccagctcgaggtcctcgtacgcgccttcgaccaactcaacttcgaccttggagtatcctgctggaatcggcctgcagtggtaagtacctgaagggtccgttgggatggccatgcccgacgccaccttcacatggtgagaggttatttattagtaatcaacatatataagcagcaactagcggaatggccaaatctaaaatctataaactacgagcttacatttattgataagttcttgaagggaatatgcagctcacatggtgtccgctgagtgatgtcatcaatggggcaggtggtttcgtcctgggtttgcatggtgtccatactctatgatcctacctgccccgttgaggcgcagctgctacgatttcctgaagggctcaccattgtaggaggaatggtcggctggggatcatgggaccgatatgcggccatgcattcatcaaccttccttgccacctcctcttgcatgctgagctcgtagctcgataccctgaactcaagatctgcaatcttcgcctcggtatctctcttgctcctcatccgactcctatacgtgtggatgtcctccttgaacccaatcttccaaggaatcacccctttccctcgtgttcgtcctgaatgctctggagtctgcatggcgagtgacagctcgtccttctctctgtcgggttggaacgtgccctgagaagaggcttccactgcgtccgttagtcgacgcgcagcctcgcgtatctgatcgccgaagaccagggagccatcagctgggttgagcgttccaccgtgagcatagtaccagaacttcgatcgttccggccaattagcggtgaccggttcgatacccctctccagcaagctagcctccatctcctcccacttcggcatcgcgacgctatagccgcctgaccccaagtggtgatggtacttcttcttggcggcattttctttgtttctttccatcatcgcctgcccttgttgacctgtcttatatgcaacgaactcgtcccagtgatcccttagctttgggaatgtgtcgaagttcggtgtctgccccttcaggatgtatttctggtacagatctcccttgaagctctgaaattgttctgccattttcttcagagtccaccttttcactttgtcctctgtacctgtgggaagggtgaatgtctcgagcattgtggtccacagcatctctttccacgaatctgggacaaagctctcatgatctccgcatgcccttgttctgtgccagtacaccgtactgacaagcacgttatcctgcacaacccaaccgctgtgacgtacgtagttcttagcggcttccgccggggcactaggtcggccgtcttcgtccacttccgttatgatgtgccgaccctcaagcttcttcgcggcacctcgttgcccgcgtgccctcttctgtccagcggagggttgactgccactagcctcctcctcctggttctcctccacatccctctccacgtgcccctcctggttcccctccgcatccctctccacgttcccttcctcgttcaaatactggtatggatcctcgttcccctcttcttcgttccagtattggctgcttccctccgcgattgtatcgtacaatatctgttcctcatcgcgatcagccatctgttcatacaggaaacagttgctaagtcatgagacatttttgctttaacaatcttatatgctaacaatcatatatgctaagtcatatatgctacgtctaactatcgtatatgcgaagtcatatatgctaagtctaactatcgtatatgctaagtctaattacaaatctaataatcgtatattaaaactataataatcttatattaaaactataataatcttatattaaaactcaaatagtcatatatgctaagtctaggtgacgtatattaggaccctagctagtcaataattatatactaagtctaattacaaatataataatcttatattaaaactcaaataatattatactaaaactcaaatagtgattatatatgctaagtctaattgtcgtatattagaaccctacacaatcttatatgctaagtctaattacaaatctaataatcttatattaaaactataataatcttatattaaaactcaaataatattgtattaaaactctaactataatgctaagtctaagtgtcgtatattaaatctaatagtcctaattgcattaaaaatttaacaatcatatatatatatatttacgtcacttgcctgcgcgaattcctttgagggctagctactactccggcttgagggacgacgacgacaacgtcttttctgcaacatacaaaaagatgtattaggataaacgcgaagtagcatatattgcatttcacgttcacacttcgttcacgatcgttcatgttcacgttctcgttaaggtcacgtttcattcacctacgttcgttcgttcacgtgcgtccatgttaatgtacgttaagtaaggttcgttcacgcatgttcgttcgtttatgtacgttcaaatacaacgttaagttcatgttcgttcacgttcatgttcgttaacgttcgttcacgttcgttcgttcacgttcattcacattcacgttcgttaacgttcgttcgttcgttcacgttcaattctcgttcacgtatgtttcgttcgttcacgttcgttcgctcattcacgttctcgttcacgttcgttcgctcgttcacgttcacgttcacgttcacattcgttcgttcacatggcggcagctagcggagaggcggtgtggcggcagaggagcggcggcggggcggcgcgcggcgcgcgtggcatcggcgtggcgcgcggcccggtggcggccacgcgcgcggcacggcggcggcgttgcgcgcggtgcgacggcggcgttgcgtggcggcggcgtggcggcgcggcggtgccgcggcggcgtcgtggcgtcccggcgtgtcgtgccgccgcggcgtcgtggcgcggcggagtcatgttcggccgcgacgacgtcggcgtcagcgtcggcaacgaggcagccggcggcaaccgagagagagagatcaagatcggagagagagagctagagagggaggcggcggcggctctcactccatagatgcggtgtcggcggagtaggcgtagacgtcgacgacgacgcgcgcgagacgacgatgagatacgacggcggcgtcggcgcggggatgccctaggcagtggcggcgaaggagaagccgagagagatcgctcggggcaaaaacttctaagtgttggtggagaagacgagggcgcgcatcgggaaaatatatatacccctagatctttagtcccggttgatgagaacaacc

SEQ ID NO: 6961 - DNA, 108634 bp, Oryza sativa
  unsure (1)..(108634): unsure at all n locations
agacggcggagtcggcgcgggcatcccgtaggcagtgacgacgaaggaaaacccgagagaggtcgctcggagcaactacttataagtgttggtggagaagccgagagagcgcgtcggggacatatatatacccctagatctttagtcccggttatgagcaccaccgggagaaaagatatctgatatctttactcccggttgttctcatctatctttactcctggttgttctcatcaaccgggactaaagatattttcccactatttctaaattctttttaaacccggttagggttaagaaccgggactactgataagcgcactgaatattaatttccattacatatgtgtttttaaaatagaaaataatgcactaaaattatttaaagtcgaaaaattaatgacaattacttcgaaaaattattgttggctgtagtaaattaagtggataaaacgtagtaagcaaatatatgatttaaaattaataaaaattctaataatcttatataattagcatatgaatgatattaaattaattgttaaaaactctaattaacatatgtaaatatatacgacatgcatgatttaaaattaataaaaattctaataatcttatataattagcatatgaataatattaaattaattgttacaaactctaattaacatatgtaaatacatacgacatgcatgatttaaaattaataaaaattctaataatcatatataattagcatatgaataatattaaattaattgttacaaactctaattaacatatgtaaatacatacgacatgcatgatttaaaattaataaaaattctaataatcatatataattagcatatgaatgatattaaattgattgttaaaaactctaattaacatatgtaaatacatacgacatgcatgatttaaaattaataaaaattctaataatcatatataattagcatatgaatgatattaaattaattgttaaaaactctaattaacatatgtaaatgccacatgcatgatttaaaacttttaaaagttgttaaaacctctaataatcgtgcgtaattcacatatgccaaacaacaattgatcggcggtgacggttgaccgcacgtactttctcctcactattgttccctccttgtgatcgctacgtgagtaaggggtgtcttcatttgataggaggatgctagggtcaatcgtcaccgtgaaaggaggttgcccatccaactgatcgtaatcctcgtcagtcttgttctcaaccccgacgatttttcttttgcctgggagaaccacgtgacgcttaggctcgtcaggccctctgcccttctttcctttgctagacatgtccttcacgtaaaagacttgcgttatatcattggcaaggacaaaaggttcatccgagtatccaaccttgttaaggtcaaccgttgtcatcccactgtcatcaatcattacgcctccaccagtcaacctaacccattggcaccggaacagagggaccttgagaggaccgtagtcaagttcccatatgtcctcgatggcaccgtaatatgtgccagttgttccatcgtgtcccatggcatcgatacgaacaacgctgttttggttcgtgctcttcatgtcttgggctctcgtgtagaatgtgtacccattgatctcatatccctggaatgtcgcgatcgacccagacggtcccctcgctaggaaggcaagttgttggttgatcgtctcgttacccatgagatgttgtcgtagccacacggggaaagtatcaatgtgatgccgtgtaatccatgcatcgaacttaccgatgtttctggcacgaactagagccaagtgctcatcgatgtaaggagataccaatgaagattgttgcagaaccgtgaaatgggctttacggaataaattattgtctaccatcattattgctttccttccgagagttccctttccccgtagtctcccttcatggcatgattcaggtaccccgattgggcgaaggtattcaataaattctacgcaaaattcgatgacctcctctattccataccccttggcgatgcttgcctctggacgagcacggttacgaacatacttcttcagaacgcccatgtacctctcgaaaggaaacatgttacgtaggtacacaggcccgagaatactgatctctttgacaaggtgacaaagcagatgcgtcattatattgaaaaatgaaggtggaaatatcaactcaaaactgacaagacattgcaccacatcattctgaagggcttctaatctatccgaatcgatgaccttgcgttcatgaatgcacatagctttgttattgttgcccagacattgtttggaaggataccccttattacaactggtagcagttatgtcatcaacacgtgacagtcatgagactttaggtttgtgaatttcttctccttcgtgcttattattcgcttgatattcgtggattatccagacagtacatttatgctctccaagcattcaaacatactttccttctctgccttgctaagagtgtagctggctggactcaagtaatggcttcctttctcctttggttccaggtgaaggttgccgcgttgttccatatgcttcagatcattacgtgcttccagtgtatctttcgactttccgtacacacctaggaagccaagaaggtttacgcaaaggttcttagtgaggtgcatcacatcgattgcgtggcggatgtccaagaattctcaatagggcaactcccaaaatataaagttctttttccacattgccgcttgaccatcttcactctctataggctggcttccagacccctttccgaacactactttaagatctttaaccatagcaaacactgttttcccgctgcgatgtttaggcttcgtacggtggtccgccttacgttcaaagtgcttgcctttcttccgtaccgggtggtttgctacaaggaatcgacgatgacccatgtatacaaccttcctacagtgcttaagatacgtactttctgtttcatccatacagtgagcgcaagccttgtaccccttgttggactgtccggataggttgctaagtgcaggccaatcgttgatggttacgaacagcagcgctcgtagattaaactcctcctatttgtcctcgtcccacacggggacaccttccttcttccacaacagtttaagatcttcgaccagtggtcttaggtacacatcgatgtcattaccaggttgcttggggccttgaataataatcggcatcattatgtacttcctcttcatgcatagccaggggggaggttgtagatacacatcgtaatgggccaagtgctatggccgctgctcatctctccaaaaggattcatgccatccgtactcaaaccaaaccgtatgtttcgtgcgtcctttccaaattctttaaattttctatcgatgtttcgccactgcgaaccatcggcggggtgtctcagcatcccgtcctgttgacgctcttcagcgtgccatcgcatcattctagcattccccttgttcctgaacaaacgccttagccgtggtcttataaggaaataccacatcaccttagcaggaattctcttctttgttagctgcccgtcaacttctcctggatcgtctcgtctaatcttgtatcgtagtgctttgcaaatagggcatgcttctaggttctcgtactcctcaccgcgatataggatacaatcattcggacatgcgtgaatcttctgaacttccagtcctagagggcagactatcttcttagcctcgtacgttgtctcgggcaatttgtttccctccgaaacaatgttcttgatgagtttcaataaatcgccaaatgccttgtcactaacaccattttttgccttccattacaagaactccagagttgtatccaactttttgtgcccctgctcgcaacctgggtacaacgacgttctgtggtcctctaacatcttgtccaatttatggcccccttttcactttcgcagtcctccttggcgtcctgcaacatctgaccaagatcatccgcaacgtcgttaccatcagcatccctttcctcctcgcccgtttgatttccttcaaatccaacgtactgagcaaagtccggaatattgtcatcttccacttcatcttcttccatttcaacaccttgctctccgtgggatgtccaacaattatagcttggcatgaaccccgactcaaacaagtggaaatgaattgtcctggatgcagaatactccttctgattcttacacttgttgcatggacaacaaataaaacccttatgcctgttagctttggtcactctcaaaaaataatgcacgccgtcaataaactctttggaccgccggtcagcgtacatccattgccgatccatctacatgacatgaaaaaaaatcgtacacaaataattattcttacaataatgacaatcatataataattataaaataattacgaactctttcaacagttatacaataatgacatatctttattcatttaaaaatcataaaatattacaccaaataattcttatttactatttctaatgttttaaactaatattaatgtgttttacttcttttaattttcattttagtttgttttctattatttaagattaactttcactatattttccttctcaactattttataaaaccttctttagcaaatcaactaaatttctatatattctttctttcccacacaaattttctctcttatcaacttacaactaaattttggagacaaaaaagtgtgtaaaacatagctccaaatgtaatatgacaaaaaaaaatattggaggatgaacttgcaaaccttttaggcacctccgatttgtatgtaatcatcaaaattaattcactagaaattttggcatgaccttctatcttttttgaagaaattttgaagcttgctcgggcagctggaggaggaagaagacatatatatatataggggtgggactttagtcccggttggtgttaccaaccgggactaaagatcccgggggggcctgacaggccctgacagcatttgaaccgggtaacgggcatatttgatctttagtcccggtagccccggtttttattgcatctaggactattgtggaattcggccgaccgacgaaagatatttctccaccagtgaaagtgtgagttgtacgtatcatcatggcaatatacgatacattcgatacgcggatatgtgcaaaagtttcattcgaaatagatatatccatttgttccatatgcgcgtcattagaaaaaactcatttggaaacaagtggaaatttgtggagttacgcacatgagaaaaaaaaaacatacacacacagagcaatgggaaaaatgggaattaaatcatggggcccacactggccagtgtcacgcgagaaaatggatattttgccatcctcaaaacatggtttcgttggaatgccatctaaaaaacgcaatttgttaaaatgccaatatggaccgcgcgaccacagccactttgctattttctccattttctctcttttctccattttcaatttcattttcgctggagtagagcttgatgagacgattttgcccctgcttgccggctaaaaggggatcgagatctcgcgagctaccggccatggctcgacgcgccgcagccgccgacggagagtcccgtcgccgccttgccgctcctcatcctcctcgtctttctcctctcaacttcactcggtatggtcgccacaccggtgcgagaaactcgatgttggtttcttcgcattccaggcttgttctgacgcgctcgcgtaccgttgtgtttgcaggggcgtgcagttcggcgagcaagaggggcggcgacgggcgacagcggcggtgcggtagcggatgaggcgtactactccagctgggaatcggcagtggcggtggtggtggcggggcgacgaaggctagtccggccagggtcgtcgccgccgacatgccggagccggtgcggtggctgccacccaagcttgttcttcccggctgcgtcgccattgctgcacggacaaggtttagctgctacctagctggagcaagagccatcgacaatactgcagccaagaaggacattgctgagaagatcaatcacgcaggcttcggcttcgatgggttggtgtatgtaacgttgagttcttggagattgaacaagggcagagagatgttaatgctgccattttgtttttcctcctcctctctttctatttattttttttctgttgtttgttcttcccttgcattttttttttgggtgatttccctgctaatttgttccatctttgccatgaactttgtatttactcgtaacgcacatcatcgtcttgctctgttcaattcttgctatttaaacatcttttagtagatgaacaatgaaaaacttctcctacttctatcttcagctctgatgcgtgttagtgttcttgtggctagtgcacccgtgcatgcacatttcagtactatagtatttcacacaacaatggaccggcgatgcaggtgacggtggtggcggcacttaccgacgggcagagaagccagcaactagctgaaatggctcaaccagctcgatgcacaacggttttcaacatccaaccgaaggggcaatatcatctcatcaaggcacattttagcgaaaatgaaatcgaaaatggagaaaatggcaaagtagatgtggtcacgtggtccatattggcattttaacgaatcgtgtttttggatggcattttagcgaaaccgcgtttcgagaatgaccaaatgtccattttctcgtgtagcgctgttaacgaccaaatttggtaatctaagtatcggagatgaagaaggaatcgaaacggagttcgagatagagatcgtcccggaaacagagtaaagtcagctgaaatccgaatcggctacgatcaggatcggcagagtccgagttggatagggttagccaattgagttgaatctgacaatgtagcacgatatacgttgtcgggttaggttaacgagcttcatgaggattgtcgtgcatggatagagtcctaagaaggcaattgtatctattaattaggatattttatgtaatttccttagagatatgtttgggcaaaagtctgccacaaagacttatggtattttagagtttgttagagataagaatcgtgtccgatatagacatattttgtaatctcgggtataaatagaccccgagccccatgtaatcaaactaacacacgcatcgccacccttttaacttttgttttgtttcgacgagttcttactttcgggttgagctgcatcggttttgatcttcaacaagaggtaaaacttgttatggtggcttgcgttattaggattagtgcttccatctttatgatactctaatcttatttatgtaatttgtcgagttatcatatatcttacataatctccggcaatatcgctatctaaccgtcaatcggctaacgtctggtacgagaagtcagccgattaggttaaatactgatgttgacttagattatataggatatctactactctatgaaatatccaacggcttgattgtctagaaattgtccttctttttatacttatagctgcatcagttaggtttgatcttataagtcgtgattagaatctcaatctgctttttggttgccaattagggtagtatcggggtttcagccgattttacctgatttagctttatatttcattatgttaggatatcattacaataaaatatgttagcttctgtgtaatgtattttacttgctttaatatcgagtagtatcggagtattagccgatacgtgctagatctatctgatcggttatgctatgaacagatatatagtcttgttgttaatatatattttgatctaagtgatttatactgtctcggcatggcgaccgatctatcccaatcacttgatttaagtatatatcgacataaggactatatattattaatatctacagccgatcgagtagatttagttcttccgtacttattaacatttgccgatcgattcacatatgacatcggctcagagataagtgatatgtcatcggcaattagtcgatcggctatcgtttatgaatttaaccgcggtttctttatctttgtttcttgttgattgcaggatcaaatcaactggcacactcatacacctaaaggcaagcttttagacctgcattggagttaagcagatctcccaggccttgtgtttttacatcaacacgcgctgggatgagactcctctgactttgtgtagtacaactgcaaactgcacaaaggttgtgtttaaatctacgggtgaaaagttttggtgcatcacatcggatatacgggcacacatttgaagtattagacgtagactaataacaaaacaaattatagactccgtctgtaaactgcgagacgaatttattaagcctaattaatccgtcattagcaaatatttactgtagcacgatattgttaaatcatgaagcaattgggcttaaaagatttgtctcgtaatttacacgtaatctatgtaagtagttttttttatatttaatactccacgtatgtatagatctaaacattcgatgggcaaagtcaccggatatccgtggcggtgcgtggaacagttgggcccttcccaatttccattcaccctttcgccgcggcggcagcggccggcagccgagccgcgatcgaaagcaccaccacgatgatggccgcagcgagaacggcgttcgtctccggcgacctacttccactcaacgtctcctcctcggcgtcaatccccaccctggcaaaaacccaaggtatcaccaaatccatctcgttcggttctgggcgccgtcgccggccgcgagatccacagtccatacctaccaccaggcaagcctcctctgctatctagagatattttccgccatattgaaaaacatcacccgaaaaatccaacatatgtactattgctcagatttagtgataatattgatatgcagttcagatagctagtacatatttgcagtttaaagataatattattagtacattattgttccagtgcattgtgaaacatacttctcacaagaagaactatgatagattaccaaagtagttacaaaatatgatgtgcatagattgcgatggattttcttgtgctcagtatcccacctatttcatcttggaccagatagaatcgatgcagagggtggagctgaatatgtggatgggttgtcttgagcagatatcactgaatttgcgttggcaaagctgtaatctaggcaattttccacgctcactgcgccttccaataccttgacaaccatcgacatcgaaggccttctgctgctctcattttgcaagcaccacattgcgagcttcaacattttaatcacttcctcctggtggtgtgagaccatatcagtacttttcttatcaattatatcgatcaatacattgtctttagccttctctcgcaataaattgatgagctgaacgctttcctctggctgcgaaatatcaatatttttccttccgcatattatttccaggagaacaactccaaagctgtagacgtcaactttttcagtgatctgtgatgttagccattcaggtgccaaatatccaggcgtgcctctcatcacagtcactactttactttgatccctgtctattagcttggaaagtccaaaatcagccagtttggcattgaatttctcgtctaagagaatgttttgtggtttgatatccaaatgagcaatttttcgcctgcattcctcatgaagataacataaacccttggcaatatccataatgatcctacaccttgtgcaccaatcaagaggatcattgttgtagcggtaatatatccacctatcaagtgaccctcttggcatatattcatatacaagaagccgatttgacttctctgcacaaaatcctatcagcctgacaagattgatgtgctcaatgctgccaatagtctcaacctctgccaagaattctttctttccttgtttagcactttctagtcgtttaactgcaactctctcctcacctatttctccttcaaagactgatccaaatccaccttcaccgagctttttactgaaatctttggtgcattctctcaacttttcatatgaaaacctcactggcattccaggcaatggctcaaaatcaatttcttcatctatctcttgatacttcctcctttgcacataaagggtgataactgtgacagccagtacaaggataagaattgctgaaattgttgcacctaaaattgcctttgttttgtttgctgtggaagcagaagcagaaggactaagctgcaccttgaggtaagcagaggagttgtaatgaagggcttcaggttgtatcgtttgcaacgagaagacctccgataccgagaagcatgtgccatcagaatcattctggccatacctgaacataacggccctgcaggagcaattcttcaagcaggattgcttacagtcatctctgtttgttgcattcaggatggtgtggctgacatcgaagtatgaaacatcagtaagggccaagagctgatggcttcgcatttcttgacaagagattggtgtcagtggtgagcaaccaagatttgcctttcgctcgtcgaccggcttgaagtagcttaaactagaattactctgaaggggacaggtacattgcccacctgtgcatatcccgtattttccgcacgccattgggaaagcacaatcatcagggaataccttgattacatcagacacgactgtccactttgctcctgtattagaccattcatacagcctcaagtgcccatcaaactctaacctcatatactgggtggagctggcttgtggcagtgagatattgcttggctgagtggactgcacaaatatgctaaggctgccattggtgaaggtaaccttggttggatcttttccactcttgtttgtgttcactgaatgagaatagtagagctgtggtggtgtggattcaacataagcaaacaatccatctggttgaacagccatatacacctgattctcagtcgaatttgttgtagtgctgtttgctctgagcttcatgccttccatcagtgactgcccaggaaggagtgtgtcagtcggatgatcaaaagactgccacaccgtcacattcctctgatcaaacagcacaagattgccggtgtcagtgatctccatgccagccacagaccggctcgagctgccgcttgaccagacgaggctaccatcagcatcactgaggaccaggttgccattgtaagtgagctcgagggtggcattctcccggacggggcgagcccggttggccgaccagaccacctgcgggatcccggtggtcgtcatcgtgatcccggcgccgctgttggtgtagacgatgtagacggcgaagaggaacgcgtcgcaggggggagagcagaagaagcccgcggcgtaggaggggccgtagaaggtcttcggtgaacggaggacgatggcacgcacggccgacccgtcggagtagccgacgctgtgttggagcgccgcggcattgttcacccaccgcgtcgagaggttggcagtgggatagtcgtaccgctccgcagagaccggcggtgctatggttgcgagtgcgatgatgacgatgacgatgatgaagaagaagaagttggccggaagcatggtgcttggatgtgaactgagaatgcgatgaagaaccaattaagcaagaaacttggggcatttctgccagagatgagagaagatgttgtcagttctcacctgatgtcagcatggcaatggtggagctgatgcggtgaccggcaaaatggtctcaccatcgccaaggtcaccggactctggagtctgcagtggtcagctacttgtcttcttgatctctcagtaagttcacacttcacaccaagctgggctagattattatggttttggtttatctgtgaagacagattgacttgaccatttctctttggggggggaggggggggggtcaataattagccgtgccgacaaatggtagtcgtttccatgtaccaaattgctgatatcatcaacattaacaattcaattcaggcgttgtccctttcagtaaaaacaattgaggcattgtccttgcatataaagaaggcaattcaagagcaggtattggtacggtagtaaggctggtaaggaaacacgggaactgacgaactgtattgtttaatttccaattcacgcgttccagatcttaaattggttgtaaggatcagttcatatgtagatttttccagttggtatgatcacagtatcacaccaatatgattgtgggatcttggtcaaagtttccattcgatcctgactgcttgtacagactctagtggtttatatattaaaaataactacatgtacatgtccatttattacaaaatttcactctttcatctgtccatgtaaggggttttttttcataggtaaagaataaaatttctactgcatgtttttataattaaaaggggtttcagaagtataactttacaataaatggaaggtgttgatgataccataacttggagatggacgagcaatgggaaatatagtgcgagatcagcctatatagcacaattcaacggaaggataagctcagctgcagcaaaactaatctggaagcaatgggctccctccaaatgcaaacactttgcctggctgttactacaaaataggatttggacaacggatcggctgcagatcagacaatggccaaacaactatttctgttaactatgatacaggaacctagaaacaactcaacatctcttcaaggattgtccttttgtgcggcaggtttgggagagggtcctagggaggctgaactgcaatgaaattgacctgacacatgatgaaaatgaatcgctgttgaactggtggattaggagaacatctcaaggtgggaaggaaaaagctaaggcaaaaaaatcaatccacatgttggtagcatgggaaatatggtgtgatcggaacataagagtatttcaaaatcaagaaaaaaccctgcagcagctactagacaagattcatgatgaagtcaagctatggagaatatgtggagcaacaaacattgcgagattatcggcctaagaccttttgattgattagtgtttttcttgtttctttttatttcttcttttatttttcttttcttttatttttctttttccttttctccttcaccgtttggtgatcatgtaaatagtttctcccctacttaatataacaccaacaatgctggctcggttttcaaaaaaaaataactttacaatacagaagtattcatacattttagattttctttttttttggaatacgcaaggagcacatttttttccattatttacaatgtgaaatgaaaaacaagcacgggactggtactggaggctagggatctaatggggatatctcgcgctagatttggctaccacgacctcgcagaggtaaaactgaagggacccctacatttgccgacttccaaagcacggcttcttccgccatcgctttcgccaattcgatccaagacttgctctgttgattgaagatccggttgtttcgctccttccaaatcgaccaggccaccagcgttgcaatagtgtcaaattcccggcgatgctgctctctcaacttcatccggctttcacagagccagaggtgggtagacagtccggattgcctatcgctcttaatgtccaacaccaaagctgcctcgactcaggtcagcctaccagaatgtggtcgatgctctcctcctgttgatcgcaaagaacacaacggtctgggtgaggcaacccccggctccgtagatgatcagcggtccaacatctgttcattgctaccaaccacaggaagaagcggcatcgaggtggagcaaacgatttccagatcggggtcaagaggaaggagatccgaccaaagaacagagccttataagaagatattgagctgtactgacacgagctttcccatttccagctgaaagaatcaggagtggtagggttacaggtcaccgattggactagcgaccaaagcttcagattctccaggatggcttgaatcccaagtgccccagcgatgtccccgatccatcaacgatccgttagtgcctcggccaccgtccggcgctggtgcacgtgaggcgaaacacgatcgtagatgttaggggcaatggatcggatgcagccctcttgcagccaactatcctcccagaagaggatcgtttgtccatctcccagctgacagactgtggatgcagccacgaagctcttctccttttgcgaccccgggatgtctaggccttgccatggtttacttagtgaagtccgttgtagccaagtccatctggagcgaagtgcaatacccatcaactccagatttggcaagtctaaaccgccatagttcttaggagcacagaccctcgaccaagcgacccggcagcaacctccattggcttgcgccttgcctgccagagaatcccgcgtcggatcttgtcgattcctttgatcacccacttgggtgcatcgatagtaatcagcaggtagattgggattgcactgagtacaaactgaaccattgttacatgacctatcaacgacatttggttggatttccaagctggaagccgccgggctatgctgtcaacgaatggctgcaagtcttctttcttcaacctgaagatggaaaggggtagacctaagtacttgcaggggaaggatgcaacatggcagggcaattccggctgtatcccagcaagcaactcctctgagcactgaatcggcagggttgaacattttccaaaatttgtccggagcccagaggcctcaccgaagacgtagattttctttcaaaagaatcatctgaaagaattatgcaggatcttacatttgtaaatgaatcctgcaatttgtgatatcctgcctggaagaattatgtgccctattcaggagtcaggacacaaaatatgtaggtattttagcctaacaaatatgtaggtaatgtctcgatgaaagcacttaacattttctttgtctgtatgtgtttggatggttgctttttcttaaccaaattgcaacagtaacataaaatatgaaggttaacccactaaaggacataatttgttgcaccaacaatgattatttctcatactttgatgaccggcgtggtttacaaaaccatttgaaggttgaaatgttagttcctggcgaattaacgagattaaaaaatgcgactgtataatttgtaaaccaaaatctgaatcctagcggacagttcaagcaaactaaaaatggatttcaaacggcttatggagaaaaccgatcagtttgagccaaaaaccaacctgtgtaaaaccatagaataaatgtaagaacatttagaaaattgaatggaatttaggaaaatctggaaaaatgagaaagactagcaagatcattgctataatttggacaaacttatgttgtctacaacgttagagcatctcgagtgtatgaataaatcaaaccgtcgcgccacaaaacgaaccgaacacattggggagagtcgaactgtatatgtcagaagactcgaaccaagccgaataaaaaaaatgcaccattgcatggtgagcacatacatactgatgcgtggaaagaaaaataatactgcctctatttctaaatattggttaccgttgactttttagcacatgtttaaccgttcgtcttattcaataacttttgtgaaatatgtaaaaaaaaaacttttgtgaaatatgtaaaactatatgtatacatataggtatatttaacaatgaatcaaatgatagaaaaaaattaataattacttaaatttttttaataagacgaacggtcaaacatattaaaaaaatcaaacgcgtcaaatatttcaaaacggaggaagtaatttagttggctttctctttgctcagaatgagtggtgggagccgcaaaccggtgtttacactgtgaagttcgaacactcagacacgctactgattttgcacagcaaaattgatggcacactggagatgcccgtatagttgacaaaaatgttacacgcactgacaataacaacattataaagggctttcacagtgcggggacgtagcgagtttcttcgcactgctagctagaaaaatcgccacctgtcaaccgggagtgcaccccactagagtccctcgttcccacgttgagatacgctattcttcccctcctaagtccacgcgcggcggagaaagagcttctcgtgtgcactgtggagggtgtggctctgtcgcgcgcgttcccctcgcgccgcctgggagaagaatcccaaaattgccctcccgcccccacctatttcttcctcccgcgcaagatttcgttgctcccacgctcacatggttgctcggctccgtgggtgggagtccctcacgcctcgccctctccaattcacggccaactcgccatagccgctcgcgccaccgacagagttgttcccatgcaatcctcaccttcccctccagagaaacccttgctcgagctctccctcgccgtcgttgtctgcaagaggtaagcaaaccctagccctgcatggttaacggtggcgcgccgccgagggatgggaggataagaagcgtggcaggataggagagcggatcgacgtggcggatggggaggagaagcggcgccgtggatgtggaggagaaacgatgcgcacgagtggggaggaaaagtggagcggcgcggcggaaggcagagcgagcggcgctgaggataggaacgcggattggagtcgatgcgtcacgagaaggaaggggcagatggggcagattatctgtggcccattcggctggggcaccggctaggtatgtatttgtgggctgtgttacctcactaataacataatccagttaagccatttaaaagaggtcgcaagcactgtggggatgcatggcctatggatgattccgggccaatttcgtggataaatgggctagaggcacgttaggagtaccttgtcctatgagtgtcttaaggccacgagtaatgtagaggaaccaagtagtatatatagattgtcgaaacaagatttcggtaatacttaaagggggtggctatcaagctagaaaagtggatgggtttgaaaacaagaaattttatacaggttcaggccttcttattcaagaagtaataccctactcctgtccggggatgattccgccgagtatatattgatcgtatgatctggggaaaaagaagtgtcccgagaggaacccggacccctccttatataggggaaggggtccgtattataaaatacagtccatatcccaaacggaatatatgattacagataaaatacaatcgtaaccgactaagatcccgggtatttccttgacatacaagtttaaaaactaacccgaatcctcgtaaagatattctatctatatttggtgtcgtgtacccaactaaactataactgccatgtagatatgggatatctataatctccacagtagcccccgagacctttgcagtcgacgaaatagctttttcagaacaaaaagcaaaaatccgagtgcttcaattcctcttgctctggcctgccgagtactaaaatcaaagactgtgaagggcgaaaataaaacatggtgcatcgagtagatgcacctaattaggtataacccccgactatgtggttagttgaaaaactaaacgtgtagttaagaaccgagtggttttacaaccaaacatcatatagcaaagcacgcatggtattcagtaaaatacccagccgactgcttctcaacttgaatatatcaagaataaaaatatgaaaagggcccgagtgataaacactcaaaatgtccacaaaaagacatatttgacaagaatccgagtaagaaactcttaaaatgatctaccaaatatgataaaaatcatggtaattaagaagtttaatagcctaggctataaccctcaccataatcaaaataagcatataatatgccaagagaatgactcttaataaactagtcatctcgaatcaacccaaatagcttttgcagcctaataaagcttacaaaaatagtataacacctttctgtcgggcacctttttatttgcatcgtggtaattccaaagaattatcaaactgcgttaaaaaggattttaacagcatcgggtcacatcattgtgagcacaaattgccaaagcaaaaagcgcctaagtccatagggatcacaacgggccacgctggtaataatattgggctgaagtactgtacaggcataggcccattagcactcccgatactctaacaaaacaccgaagtccaagcgacgcttcgtcttccccgccgaaactctcgtcatttccccactccttgttacagtacaaagctgcgccgacgaagctagggttcatcaatccgccccaatccattctcaaaaatccacgaaacttctccacgcgtccaccgcaccgattccccattcccctccagcaacttttcagaccgaatctgactgttcgactcgcacccatggcggaagagagagaaagtttcgagagtcagtaggcgccctccgacgtgacggaggagaatctgaaggaaatggtggcgcacggcgttcttccggcaaaggagatcatcgggtggtggccagcgtttggcgaagcgttcccaacccccgatacacacgaggtcgtggtattttctcacttcttttatggtggattttctcttccaacttcaagattcttccgaggaattctaagcttctatggaattagcctgcatcacctgaatccaaactccatagtgcacattgccaatttcattcacgcctgcgaagcttttctgggcattaggcctcatttcgccttattccgccgaatcttcttcctcaagccccaaccgaacaagagcaaaccatgcgtggttgggggcgccagcttccaactcagaggaacactaagccaaaagtatttctccatgccctttaagacctcaaacaaaggctggcacgcaaactggttttacgttcaaaatcctaaacccgcactccccgagtactcctgtcttcctcggatttaccaggacacatggaattcattgcctatgggagatgaagctgctcaggcagtggaattgatggaacgaatgctaaagctgaaggaacagggtttgcagggagaacaaatcactcggcacttcatcaaaagtcggttagctccaatcaaagagaggtcccacacggcttttgagtttgacggcaagcatgatccaaatcgtgaagatctagactctcttgactttaaggtcatgaaggaaagaatatacaagatcttctcaaatgccattgttatcggctattcacatctgttgccagttgtgccatacaatgcattcaaccctcctccaccggtatgtactcaaacacttcagccttcctcaaaatatgatctcgtctttttgttaaatcaattgacagtggacgatattatgtctaggattttgctctgatgaagtcggatcccccaatcgctcagcgccgatcacctcgccgtcagactggtcaggggagcgggggaccaaagatccggtccgaagcccagcccaacacttctaatccagccggccagtcagattcctgtaagaggaagttagtgctaagtgacgacgaaggcgacgatgctgaaaagactagagatagagaaacaaccagaaaactcccgaagcaagccattccaaagaagaaaacatccagtcatcctatgccgaagatcaggaagtcttccaggtataaatcatataacattcttccttgtactgatgctcacttatcatgaaaacaacgctgacagtacaactcaaactcgtaggaaaccatctgatatagatccttctgggaaggactctgatccgactaacatggagacgagttcttccaaggaaaccgggccgactgctaaggatcatccgagtgacaatcagccggcaatcgacaatgtagaatccggtgatcaacccccgactggaaaccaatcggccgaagctgaagccggagttaatcaggagcccccgactggaaaccagtcggacacagggccaagccaagagattccagaagttgaagctcaggctgatagccctcgcggacatgatgccagcaacgacccgaggcctggatctcctgctaagacacaagagccgactcgtcctcgcccgggaatcatcacgggtaaacaccttgcctgaaaccgtgttaatccaaccgactttaattgatcatctgatctttatccatggatacattaggaccaatgattggtgatgaagaggaagttctccggatacgtgcggctgaagactcgcgcccttccattttggtcaagtggtgggatgatgacttgcaacctcaaggaattgtaataaaccggcaaaaagaagacgaagaggtatgcctactgaaaaaggcgctcggccaagcgattctcattgtaaacgtaagttccttgacgcctgacctcagccatcttgtttgccatctagctcgagcgctgataaaactgttttgcagaggattcaccttaggagcgaggcgaagaccacaaccctagagaaattagttcctcatcttggaacccttgaagctgtcagagatcaattgcacgaagcaaaagagcttgccaagaaaaccgagcacgatctaagggatcggatcgctgagctccaggagtctaacttcgaactaagtggttcatcaaaaggtacacaaaatccgtccgactaacttgtgctgtcatctttgtagcttcaattaaccggagttaatgtagtgcaagctgccaagatatctcaattggagaagcagattcaggctctagaaagcgacaaagcagagctggcaagacagggggactcggctttgaaggatgttgaaggtagcatcaattgatactccgaaagccattgccttctgtatgctgactcattaatatgaatctgttggtgcagaccgcaagatcaagtcgcaggctcaattcgacgtcctggttggcaaaatcaaaagacttgaaggggccagggatgaagttgctaatgttgctaccccactcgtccaagcgatgttcatcaataacaatggcccgagtacacttgatgcttccgaaatcttcgacaagctgagagttgctccggatacatatttcaagaatatcaaagaagctggaagtatgggagcgagtctggcgttagcaatgaccaagtccctttacccaaaaatcgacattgatgccattgacggctttgcagacgggacaagcgaagaagctgttctcgatcttatcaatgatgcacagaaggttgctgacaagatagcagttgatgtagtggagagatttcaggacaccgatcttcgactgactggtcttgatgactctgatgatgagaaaactgatactgattgatgtaatgtaatgacaatgattctgatgatgatgatgatgatgatggaggcacaatttgtacaatactgatgaatttatgctgtgcccaatgtttcatacttagcttctgatttcttaaaagtttttgtcaagccttattgagcctaaaacccgcaaaagctatttaaaaactttcagtcctcatggactaagccaaaaaattaagcaaggcaatgataaatcgaataagcaaattggactaataaaaatcacactccattattatgacaatagcccccgactgataacttcaagggaaagcttgatgttgtcagtcaagatagggagatacagaagcaaacttaagcataaaaacgacgaagatgttcgatattccaagagttgtcaataggtgtaccgtcttcacgcttgagtcgataggaacctggccgagtgacttcagagattataaatggcccttcccataaaggagataacttgtgctgatcccgtgtagtttgaattttcctcaaaaccaggtcgccgactaagaaagcacgcgatcggacattacgattgtgataacaacgtaacccttgcaagtatcgggctgactgaattaaggctgcttcacgggccttttccagtcggtgtaggtcatccactcggtcttccccgtagcgctcttcgcgaaaattacgaaaacgcaatgattcaaattctacttcactaggcaacattgcttctgctccataaactaggaagaatggcgactggcccgtagcccaactgggggtggtgcgcaaggaccaaagtacagatggcagttgttccacccatttgccggcataaggattcagtcggtcaaaaactcgtgcctttattccttggagtaccatgccgttggctcgctcgacttgcccattgctcataggatgcgctacggaggcataacaaatcttaatgccgaagtcttcacaaaaatctttaaatactccactggtgaattgagtaccattatcagtgatgatctgattaggtaccccaaaccgatgcacaatgttgatgaaaaaatctctagctttatctgccgtgattgtgatgaccggtttagcttcaatccacttggagaatttatcaatagccacaaagagatgtgtgtaaccgccaactgcctttttgaacgggccgaccatgtcaagcccccaaaccgcaaacggccaggacagcgggatagtttgcaactcttgggctggcaaatgagtttatctagcgaaaaattgacaaccttcacatgtccgtacgatcttgtcggcatcggacacagcggtgggccagaaaaaaccttgctagtaagccttgctgacaatggtgcgtgcagcagcatggttgccacagataccagaatgtatgtccttcagcaattgtctcccttcttctaaggatacacagcgttgcaaaattcctgatggacttttcctgtacagctcggtctcatgaataatataaagcctgctgcgcctggaaatccgctcggcttcgtctttatcttgagggagttcagaaatcgtataagaggctctctccagtcggtttcgaccatagctatgttttgagtgtccgcggcttcaactgtttctctcttgggtacggttggctcataaagatattcgacgaacacatcagaaggggccgcttcgcatttggatccaaaattcgctaatctgtcggctgcttcattattgtcccgaagaacgtgagtgagttcgagtccatcgaacttatcctgcaactttcatacctcttgtcgataagcgatcatattgtcgttgaggcaggaccactctttcattacttggttaacaactaactgtgaatctccacgaactatcagatgcctgattcccaaagagattgcgatccgtagtccgtgaaggggcgcctcgtattctgccacgttgtgagatgcaggaaaatgtatccatagcacatagctcagtctttctccagtcggggaaattaaaacaactccggccctagtgcctgaaagtctctttgacccgtcaaagtgcatagtccaatactccatcttttccttgggcgtgtcctcttggcactcggtccactcagcgacaaagtcggctaaagcttgggatttgatcgaagttcgcggtttgaacgatatatccaaggacatcagttctaaggcccattttgcgattcgcccgtttgcttcgcgattatagaggatatcactgagtggaaacgatgtaaccaccgtgaccgagtggccttgaaagtagtgggataatttcctgacggtgattagaacaccgtacaacagcttctgaacttgaggatatctcgtcttggaatcggccaacacctcactaacgaagtagatcggtcactggactttctgaacatggccttcttcttcacgctcgacaaccaggaccgcgctcacaacctgagaagtggccgatacgtatagtaatagcggctcttgtgggtgtggtgaggccaaaactggtggagtagtgagaagtttcttgaaatcttcaaaggctttctgtgcttcgggtccccactagaaattgtctgttttctttaacagtttgaagaagggcatcccccgctcgccgagtcgtgagacaaaccgactgagcaccgccatgcatccagtcagcttttgaacgtgtttctaggaacacggcggcttcatgttgaggatggcgttgactttctccgggttggcctgtatgcctctgtgagacaccataaatccaagcagcttccctgacagtactccgaaggtgcatttttttgggtttagtttcatcctgaaagcacggatgctcgcaaaggtttcttccagattcgtaatcaaatcatccttctgcttggtcttgatgactacatcatccacataggcttcaacattgtgaccaatttaagtcgagaaacatctctggatcatgcgttgataagttgctccagcgttctttagtccgaaaggcatggtgatgtagcagtaggccccgaagggcgtaatgaacgaagtcttcaagcagtcggattccttcaatcggatctgatgatatcccgagtagcaatccaaaaaactgagcagctcgcagccggcggtcgagtcgactacctggtcaatgcgagtttgagccatcgcgatctcgcgggtttgagccatctcgcaactttccttgtcacatgtgacagcttgcttgatgtcgctccgtaggaatatgactcctcgaggaccgggcatcttcatcatcatgtaggtatagtgcgggacggccatgaacttggctaacgccgggcgtccgagtatggcgtgatacgctgtcctgaaatcagcgacttcgaagcagacgttctctgtgcggaagttctcccgagtaccaaaagtgaccggaagagtgatctggccgagtggtgttgccgatagccctaggatgactccgtggaagggtgcattactcgggtttaactcggtgcgagggatctacatgtcatccagggttttggcgaataggatattgagtgcgctgccaccatcgatgagagatctgcgaagcttgacgttgcgaaccactgggtctagtaccagggggtaccgccccgggtggaccactcggtcaggatgatccgagcggtcaaacttgattgttatctccgaccaccgaagatattggggcgtatcgggctggacagcattgatctccctttcagtcagcttttgctttcttttagactcgtaagccagagggccgccaaagatgtggttgagctccttactgtgatcttgaaaacctgtcgggggatcatcatcatcatccttctttttcgacgtactttgttctccgtcaggggtcttccgtgcattcttggcatattgctctgcaaactgcttgtagacgaagcaatccttagctgcgtggttggagttgggatgatgcggacattgggagttcatgatcttgtcaaaagtgttgacgcgcgaacgttgtcgggaggagtgtgtagtagtcgcgacgagttcctcgggcttacgcttgcggtccttgtgattgttacttccaccccctcccgtagtcggcacatctttctttgacttccaagtaggacccgactgcttggatgcgataatggcgtctttggctttggcatactcgttggctttttcaaacatctgtttgactgtcttgggaggcttgcgcccgaacttgccaactaggtcttcgtggcgaattcctttggtgaaagcaacgatgatgacgtcgtcggtaatgtcggagatcttgttgcgctgttcagagaagcgtcggatgtaatctcgaagggattctccagacttctgaatgacgttgtagagatcaaactgtgtgccggggcgttcaaaggtgccctggaagttggtgatgaagtggtcacgaagttccgcccatgatccaatcgtgccacggggtaatccatggagccaggaccaggcagaatccgctagggccacaggtaagtagtttgccatggccttgctgtctcctcctgctgcgcggattgcgagaccgtagacggtaagccaagactccggattagtggtgccgtcatacttctcgattccagtcggcttgaagccggctggccaatccactcgacgtaggtcgttagtaaaggcagctactctatccacgtcgtcgtcgtagcgatctggtgaatggcggtgacctcgtgctgcacggcgctgattgattatatcgcgaatatcgacaggacgctggcgaggtggggagcgaggccgttcaactcggcactccctgtgtcgctcaggaggcgagtgaacagatcgctcgtcgtggccccagctcctgcgattggatcctgtgccggtgatgctgaggcttggctggtaataatcatgagatcggagatggggagctcgactgccagtcggcgtgcagacgcttccagagttaaccgggaccgaagcggcgatcatggtcttggtctggttcaagatgttgacgacgtgatcagcttgattgagtgcgtcttccttgaagagggtgtcgaaaagggtgatcgcagcgacagcgttctgttgaagggtgcgaaagaccgctgttccctcgacgtcttgctgcccgatgagatctcgcgctcgtcgccctgcgtccaaggcttgttgtcgttggtcctcggcctcctttgcagcccgttcgcgttcttgttgctctcgccgcagtcgttcttgctcttgtgcttggcgctcctcttctagtcggcgtcgctcggcttcctgctgtacgcgttgtgcctctgtttctcgggcttggcgttgttcttccgtctcgttgtcggccatgaagacgccaaagtagagagggatgtaattgtcttcaaagctttcgtcgaagtcgtcgaggtcacggttgtcgtagcggtagccgaattcgtcgtactccacgatctctgttggtcgtgagtcgacgccgggggagccgaagtagccttccagttgatctgtcgaaaccgtgccgagtggccggagtatgacgccgacttccctggagctaggcaaggtcggtgttgaagccgacttccgcctaggcctacggggagaagacgcccttgtagtgaagacggcagccaagtcgtcggggagtttcatcaggattggcgagtaggccccatcatcttgatctggtggtgttgaaatagatgggatctcgtccgagtggtttgaagccgactcgatcgagataagcttggagtaaatcttggtcgagttcggaacaccgaacggggctgagacctagtccttccctgactggattgaatccgagtcaaggagagagatcttgccgaagtcgttggtgatgaagtcgaggctgccgaaccgaaacgcctgcccgggagagaagacgaggtcgtcgatgccggagacggaacccatcgcactaatcggcgaagaacttgacgctacccctacctggcgcgccaactgtcaaaacaagatttcggcaatacttaaagggggtggctatcaagctagaaaagtggatgggtttgaagacaaggaattttatacaggttcaggccttcttattcaagaagtaataccctactcctgtccgaggatgattccgccgagtatatattgatcgtatgatctggggaaaaagaagtgtcccgagaggaacccggacccctctttatatagaggaaggggtccgtattacaaaatacagtccatatccctaacggaatttatgattacagataaaatacaatcgtaaccgactaagatcccgagtatttccttgacatacaagtttagaaactaacccgagtcctcataaagatattctatctatatttggtatcgtttacccaactaaactataactgccatgtagatataggatatccataatctccacatagatgggtcccacaataaatgacattagttgtggcagatcctatatgtttatagggatagttacagataagtgggtcccatgggtaaataaaatatttctagtcccacctaccgtcaccgggctcggatccagacaagtggacgaccaaccagagtggcaacaggagcagcgagcgcacggcagacttcaatttcaatatgaacatatatatatatatatatatatatatatatatatatatatatatatatatatatatatatatatatatatatatatatatatattctctaaatccagaagacagatgagattctaggattatccttttgggcaaagacttttatgcatacttcttctgggttatctataccatactgtattcacataaagatgatacacgctagctaaagatccaccgggtgtaacgtcataagcacattggaaacgtaaataattgtaaccatatacatataaaatgacagcaatggaatcccaatcctctgcttttatttgtaaagtctctgttcctcgatgatcgaagcccaaacatctatgaagcacctcatgtttgactagccaattagataaccaaccctgctgcattatcttgatatctctctctatgtgtgtgtgtctatatatatatatatatatatatattagaattctccaatgcatcatcacatttgctaaccctagtgatgaaaccacatgcaagaatttagtagtatgattttaagagtgaagatttgtctagttctccgcacgtacattttttgataatgctaaacgatgcgtcttttgaaaaaacaattataaaaaagtttttttaaaatccatattaatttatttttcaaatttaatataattaatacttaattaatcatgagctaatagttcatttcattttgcgtatcttctcaatattatgtttttctcaaacacgggaatatgtacgcaagctttacaaaattttcccgtgcagtacacaccaactagcaaatatcacgaaaaaatcaataaaaaaaactgcatatgtgctcttaatagtattgcacatatattcaaagtctcatattcaaattcatcatattttagccgtaacaaaaattaaaaaaaaagttacggcttaatttgaagataaaatttcacacatatgcataatactataggaaataggtgtttgatattttatataattttccgtaagattcactagtcggtgtgcatacgttctcccgaaacacccccatatatacgataactagtggaaatgtagaaaattacacagccaagaaaaagaaaagaacagtagaatttcagaattatttcacacacatggacagattaagatactctgcagtaactgcaccgtgcctttatcactgatatatgttaaccttcggatttatgtgtactcgactggatctgatcccacgtgggccacgagaaaatggacatttagccactttcaaaatatggtttcgctagaatgccattctgaaaacgcgtttcactaaaatgccaatatgaaacgcgcactcactgccatgcattttcgaaatcattttctctcctccaccagatgatgagacgaaattacccttcctggtgagcgtggtgagcaggggacaaaacgccatggcctcgccggcatattgagtggcggcggcggcggcagctattgtcttctcccaactcggtcgccccatctcactctccaacctactgctgaccacatcgagagaacaagcatgggctgcctctttggtctcaatcccatcgccggcggagatgaagacgatgatcatattcatcaccaagccacggtcgtccttgtcccttttgcgttccatactcaactcatcttgccgaacaaactttcttttgacgccatcgcgtttgatccattgtagcaacgggaacaccgccgcgccatcgtcgtcctggagcgcgctccggagcaccgccgcttcggcatcgtcgacgtccggccatcctcatccatcccggagcaagccaccgcgccatcaactcctccttgaggtcctcttcaaaacccctcaagaaccgagaagaatggagcatcgaggagggagattgacatcgtcttctccaacttcggccgccggcgtcaatcttcgattccctccgctccggtgacctcctcgtcgattctttgcgcatgcaccatccctgggacctaaccaacctcatggatgcacatgcatggcttcacatcgaattgaatgagttggcgtcgtctcgccggagctcagagccgccgctgagacgttttattcatcgctgccatcaaccaagcctcatggcctttgctcggcctcgccctgtcccacaccgtcgtcgccaactcgttccgccgcatccccgacaggtcgacgccctcgtcagcaacgatgacgaccacctcgccgcgctcgaccatctccgccggcagcacaaaacgaaggagagaaagaaagagaagagatggacctgccattggccccaagggcatttccgtctaatcaccacaaagaagaggcaaaatgatttcggaattaagagaaaatgagaaaatggcaatccagcgagttgcgccgccttgatattggtgtattctagcgaaaccgtgttttgaagatggctaaatgtccattttctcgtgggccaccgggctgtgcgaactcgctacgtggaatacttgggcccttcccttcctttccccaatccgcctcatccgataataccccccacccctctctcgtttcggcggcggcggcgcgcggccggagcccgagctgagaccaccaccacggcaccaccacgaacacgacgatgatggccgcggcagcgagaatggcgttcgcctcatgcggccgcctcctcgccccctcctcgtcgtcatccctccccgccctgccaagaacccggggcagcgtcgccgccagcggcaagcatcccgtctcgttcttggcggcggcgagatccgcctccgtcctctgctactgctccgacgccaccgtcgcgccggccccgcaggcggcggccgcggagggggaaggggaggagggggagaagaaggcggaggttccccccgtggaggaggtggcggcgctgctggacatccgggtggggcgggtggtgaaggcgtggcggcacccggaggcggacacgctgtacgtggaggaggtcgacgtcggcgaggagcagccgcgcaccatctgcagcggcctcgtcaactacctccccatcgaccagctccaggtctaaccatacacacaatccatccaagatttcttatcatttcaattcaacattagagataattcaatgtaagagtaagcactcaccgcggcgtatttatgcttttgcatagcatatggatcacaaaaatgtctcatttcaatccatccaagatttctcatttcaatttagcattacagaaaattatttgagagaaaacactcactgtggcgtaattaagaagctttatttagactcggttaattacatcgagatgatcaatcgaactgagtcaaccccggcctctgcataaaatgcacacaaccaaaaaagaaagaaacaactagaaacatctcccaagcacaaaagtttgacaaaaacatatatccaaaagcttacgcactacatggatcgcaaaatttcttcattacaatccatccaagatttctcgtttcagttcagcattacagaaattctttgagagtaaacactcagctgcggcgtaattatgttttcacatttacatggataaaaagaaacctctcatttcaatccatccaaaatttctcatttcaattcagcattacagaaaattcatgtaagagcaaaattatgttttagcttggcatggatcgcatgattgtgcatttcagaacagcaatatgtgccttccaagtgtcgtatatcggtatatggaccaagatgtatgctggagggtatgcatcagagagcggagcaagataatcggttataatcatttttaatttatcaggaaatgcatggattggattaacctggcccaaaatcccgatgctttactctgcaaagttagcactctattttggtcaagattcaattcgcaccaaatctggctgcgcatgtacagccctagtgttaacagagttcgggaacgaaaactatgctagtcaaataatgtgtaggtccttttggttatttcttttcgtactactgatgacaactgctattgtttgtgacacatgcaggacagcaatgtgattgttcttgcgaacctcaaaccgaggaacatgcgggggataaagtcaaacggcatgcttatggctgcatctgatgcttctcatgaaaatgtcgaattgcttacccctcctgaaggatctgttccaggtgaaagggtatggtttggtactgaagatggaaaggatcgccaatcagaagctgcttcaccaaatcaggtaacactttgggtagtttaaacttagattaacacattgttgttttaacaattgcatttcttatgaaattcaagaaaattgatatagtttaatgtagaatttaagaaaaatattttagttaacagacctcacctgtatatgtattgataaactatgctacagttttatactatacacatcccaaactaaagtatttttcagcatcgcagttaattggattgttgtgttcttttaggttcaaaaaaagaagatttgggaatcagttcagcctcatcttaggacatcagaaaactgcacagcatttcttggcgagcacccgatgcgtacctcagcgggtgtggttttctgcaaaactttgcagggtgcaagagtgtcataagtctctttcaagaagctttttttttttcttctttggtatccatattgtgtaccttactgaaaataatcatatggtatgagtaaaaatcttagagcaagatggtttctgaggctttatggaggtcgttcacaattttgtagctttctgatgtcaaagctggaacattttacttcaattggagattgatttataatttgatcatgagaattcgaaatgtgattaactttgtaaggaagttatgtggtactttgataaggtgatttctgctcttaaggatccatgtgcactgctgccaaattactctaaacaaacagtaaacacaacccattagccactatatagtggatattaaccactatatagtggatattccggtcgcctttcggtctgttttcctcagcaagttctatgatgtatgcaaatgttgtgatttctaaacatttttttgagcatatctcgatgtcatagagatcaaggtttcccttaccgtttttggcgcggttaccgcacccccacggtaaggtggttaccacggtccactaaaaccgagcggtagccgcgagacataccgtggttttaaaaactgaaaaggttaccgtgcatggtaaccgtggtaactgtgcggttttgtaaaccctgatagagattaccataagccgaaacgattttagcgccttaagtgtccatataaactggttgacagttgcttcacatgtattcatcataaattttgaggaacaatgagatcggaaactcatgaactgactagtttctcttacaaatgcagtaaatcttggattacccatcgatctaatgccatatggtaaattgaagatgcacatatatactacatcaacatagctgctactttgatttccgtgatttgaatatgttttccttgtagtattgtagctccttaatgctttctctaatgtcatccatcgccctgtggttcttctccttccttggagcatgtttcctttctgcggacagtaaacaaaacaaagcaaggttatgttttgtggagattctgtaactttttggtctgtaaataaaggaaattaaaactgctatggagaaaataagttgatttcaatcaacttcgactttttaaaacagctacctacgatgtatatggattgatatacatcgacgatatttttttcctcaattacaacgtgattctctttttcaattccacaataatgtgtgggaattcagttgttaaagaataagtcagccagcagcttggtcaagtgcagaatttgttaattcacggaggaaaatcacatcgcacacacccaaaagtgtagcaatcagatattaaactgttgaagcagaggactacaagcacagcacaagactgaaagcaagaattaacattacatttataaataccggagtaattttacctttggggaaccatcgggagcacaaagccgatatactgcttacatcaactatcacatgagagaaaatggctgccagatgtggcatgtacttctataaaacaaaacaacacagaaaattgtcattcaaaaagtgtttcaaaacaaaattcataatgctaactatcctatgctagctcataaggatattggaatacttttcacaacattctttgaggttacataatttatttatataatgctgaaggtgaaatcatttggctactatagtgatgtcagttggacagaggtgacctttgcttgctagatacaaattcaatattacctaaactgaacattttcaacacgataataaaaaaagttatgtaaatatacaaaatctcagatgcaattactgatagaagggacattgaatattgtatcagaatacaatttttcatataccaaaagaagataacaaagttgcatatggaaggcggcttaaggaaagtccgtaagttttatttgagcaatatatgctctatgcacaaataacactgcagtgcaattggtatgcagataaggtaaagtctgcaaagtgttgcattaacttgagttctgcaatattaaaaaaaaaacgctttccaacttaacagcacagataatattttctgatctcattctttaccaataaatctaggataaactaaatcgaaatcgcacactggcctgcctcactccagatttaaccagttcaataaggccaaataaggacataataaaatccaacgtaaaggcatttcaaaattacagcctggccatttgcctaaccatttcacttttaactgaggttaagtgtatgctttctcttactaaccttcaaaaatagtaaatccatatagacagaattcccagctatcagtggagtggctgagcctatatacttcctaataaaatctagcacctgaaaataattgacaaaaggaaaccttcattaggaaattttacattggaaagagaaacattcagaatatgaaaacatgcattgaacatttgtcagaaatgtacaattgaccaaaaaatagaaatagaaagaacgcttgtatgcaacagtaacaacacagacagagacacacacatgcacaaaggtagttctacacacacaacttggtaaagtttccatagaaactgcaatcgaggagaaaaaaaaggtaaacataaatggcaaatggtgcagtaatataatgtattattgtttgcaagcaacaaaatcacaacagatatcataaatatcgttcatcttacatatgttggcaaaatacattaactatcaaaagactgaaagagacctagtttacacatagagcagcacaacaatagaacatgatttcactaaagctatactacttaaaatgttagtagtggtggtgtccatttccacaccaccgctatcactaacatctgggccccacaatctatactgttataccacttttcaacaagtctactattggctccccccaaatttcaaaatcacctacttgttcaataagaaaaatcatggtattacttatactaaataagtgcttattaattgatttaataagctagaaattcaatttgttttccattgcaacgcacaggctaggctagtatatcaagatgattgtacactgtagtcacatgtacactgcacgtatacagtatcctcatttgcaaaactcatgattgtagttgctgtctagcaacacaacaaagttccacctagtcatctactcatcttgaaccgcgatatgtggtggataacgccattgaacactggtaaaggagttcgatacaatacattggccagtaggcgcctctttctatcggacaaaattctgcttaactataagggcaccttcagagattcagatgtactaaaagagaagagcatacttgtttctcagcatcattctcagaaatgtcgctctgcagcaccttttccttcagccctgaattggtttcatgagtaacagatttttgctcacaagtatatcattttgaggaagataagctgtttaccgctagcgctgtgatgaactttgcaccattcattcatgtcatttacacattccttgctctgtcttataaccaagtcaggaccctgcaaagaagtgactagctatgtttagcaatatctctggatttgagataccatcactacccaataaggtaatcagattgcctatgccagttgtgatcaaattgcagtattgatcaactgatatagattagaaacttgatatacaaagttaaatttgccaaacaacatggttatccaggatcataatgggattaatagaattggaaaaataagacatagactaaaccccaacttatcggaatcttatggcatatctccttgcatctttcctataccctaatattcgtaacataacaacatcttgattcagaatatatttgtttctattcttagatttacattgagacatatcgagctaattagtactaaaaacaaaataactcaacattccgatagtcctgatggatttgtagccttatttagcagtttttaacatctttatagaccatgagcttggatagaccagtttcagtatatgctactacgagcaatcattgcatagtgattaagagtcacatattgcacagccatataaaaataaactgttaaggagcatcgtaaataccaatgaaacatattattataagaaactgttcacttcctaaattcaaaagtcaatggtgcactacaagttaggtatttctgagcaaagaaaactattaatatagagcaatcagaattgcagaaacacttagtttcaatagacacctctattcgtttggtaagtttaccgtctgttataatacaagcaatctccagtatgcgatctttggtgatatccaaacctaaacaattaaaaaccagcaggctcccaattagtacactgtatagttttggtttaacgcatctacaaatttaacatagaagagaacaataacaaaaatgagagtgaaatcaagaaaccacagttcagaatggaagactgaaataacatgggaaaagttcctttttaacaaattaggaatatcaagtgaatcagtaatgacctgtatattgtttagcaacagtacaaagcatacaacccaccattatgtgtgcatgacaccagaattcagatcaactttagaaatgtagtagtatgtatctttacaaagagtgaaaaaatttatcagttgtaaatcatggccataatttattgatagagatatagcatgataaatatttcattgcaaactcaaacgcttaataaccaatttgatcaatattgtgtagaaaactggagataacacagttaaggctttatatataaataatggaaatatagctctcatggttgaggaataagttttattaagcatatttaaaaaaatctaatgaactcaaaagaaacatacagcttatgaaaagaagactaaccagtcatttccaagtctatccacactaatggcttatcataatcacttgatgatgaagcaaggttttctccatcgtggtttacaatcattgtgtgattcagcctgattttatctgcaaagtaaaagtaattttaaatctcatcctgaggagacagcaattaaggattggtgctatgcctacaagacaaaacaactaaaataaaatatttattcgtcactgcagaaatcaagttagcatgttaatgcataggtcattgatctattgttagaggatagatttttatggactttcgtgattctatcactgacctaggagattagatcaagtcccctaacaatacattattgctttctgatacagtgtaatttggacttctataacaaaaaatgcattggaagaattgactttagttttcaataagccacccactatacattgaataagactgcatgactatttagaaagcttcacaaaccggtgaatggaataaaagcctctgattttatgctttgacaaacaatatttcaggatttaggactattgatctatgagatcagacattcatgtttcaatttttttttcaatccaatctaaaactggcaacataatatcatatttggttatgatgaatcgatatcatgagaaccagtagattatttcactatgaaacatcatggttgacagcagcgcatcacttcattgacccagcaccgaaatacaccgccaccaccacgggatcaacatttagcagcacatcacttcattgacccagcaccgaaatacaccgccaccacgacaggatcaacattggtacaaacagagagcatcaattcaattcaacaatgcaaaggatggaacagcaatagagcgctcttcttaccaatctccgtgctgctagtaacagcagcagcttcggccttgctggatgttggtggttccgcaccttcctctctatcgtcctcagcatccagattaagaacagagaacatattcgcgagtttgctcatcttttcccccaagaaaagagtgacggagctgtaacctggagcatgcggggggtacagttgaaaccccccagatttgggggggaaaggaactgctattagtattagggtttaagagagagacagaagaagccttagcttccatccagatctagtagaagagaaagataaggttagggcgaattggaaagaaagggtggtcactcaccggaggcggaagcgggatggatggaaatcgggcagcgcaggagagcggagtcgagggcgagaagacgcggcggcggaagcagcaggacgacggcggcgccgctgctcttcgcagtcggcacggcagcaggtgtgacggagtcgagatcgatcgactcgtcgtcacggctcacgaaggcccgcgaacgtgagggcccattaagctcacattgtcctagctcaagcaaaagtttttatattttttttaaaaaaaaatacgaaaatgctcactgccgggctacccctgcgcgcccctccccacgtgcgtacctattcggcccacccacttctctctcctctttttccacaaaagatatttcacctagtgtattttcaatgtttcactatttatagatttataatgttacagtgaattaaaatactcttttgcaaaaaaaaccacatattttagaaactctctattaacggaatttgatttgtttttttcaaaaaaaatgtttcatctagtgtacttacaatgtttcactatgtatagatctaatgttgcagtaaacgaaacattccattgaaaaaaaaacccacatattttggaaaccccctattaagggaatttggtttattttttttgttccaccgaaaaatgtttcacctagtatactcataatgtttcactatgtatagatctaatgttgcagtgaaccgaaacattcttttgctatttgctgaaatattgtttttatataaggtgaaacaacacccgatttaaacgagtgaaacattttcgatctagtgaaacaattccgatatacctggtagaacatcgtgtaacatttaaaaataattcaataataagctttttttttgtcagaatatatccatgtgtggtcttgttttgaagatttaattgcaacgaattaatgatgcaaccggatcatgatttggataagtaatttaaaagaaaaattggtttaaaatagttttgcacgtaaatcgggctgacgtcagcgcccgatttccctcgctccccgtcggacgaccgacgcgtagtcgcgtatgttcttttaaagtagggcggaacacataaatcctcttaggattttgttttgtggcagacgatgagagggttacaccatgacaatttcacaggcagccccttctcattctcctctaagacgatttatcataagaagataactacctaccatctgcaaaatacgggtggggtgttgcctgcaaaataaccatttcccgatccagaggaaggcgatttatatggcccggctatgaaaagccttccctccctttgtaaatcattattgtattcctcagaaatctagaaaataaaaaagaaagaggaggtaaggggggataagaaggaagcggcggtactcaatagaagataaatacttttagccattgacttttcaacacattggtactagtaatgacattattattgcaagttactcccttcatcctagaggcctagaggggagaggggaaagaagaagagtgggcaatttagtcataaaaacttgaaaaatttagtgaaggagtaaatagtagtatatggcctggaaatttatgatggtatggttccaattaaccctttaattacatattcacaaccactttttttctccatttacctattgtccatccctaaaaattcttagtagtacggactactcactgcataaaaaagaaaccattctgtttcatttacttcaccagattattcaaatatttgctacaccctattaaatttaggttttctcaaaaaagttttggtttcagctattggttaagtttatttcttaggatatttaatatatcgtgtattaagtagataatttgtaagaataatctagtcgataatctaaattatacagggccagttaagcggagattaagtttcaagaggaaagaatatgctaccctttttgtaaatgacgtgtggttgaaagtataatatcaagaaatttgaataagaagtgacctttgaataagatgaatggttacatgttataatgttataccaaaaatcaatgacattatttattaaaaaacagttgtaatattttgtttcattcgaccgaagaagataattaattcgtactccccgtactcattaaggaaatcgttttagacagtaacacggtctccaaaacacaactttgacttcttgtttctataaaaaatatttattgaaaagtgatatatttctataaaaatatttattgaaaagtgatatatgtatatttttatgaaagtatttttcaagacaaaactattcatgtaatttttatattttcaaattattaatgatttatatatctaaggtttaacttaaacattgtcctaaacgacttcttttatgagtacggagggagtatactcattgaaagggcaacatcagttctgaattccgtactctttgtgcttcagaaatactgcagtttaagaactctattctacctctgtaacgagggcaaaactaaagcaatttgatgacttctgtccagctaaaatgttttttacatgccgtagtcaaaaactagttagtacagtataaatttagtatgttgcatctcaaacttttggtatcagtctctctcagggaggcaaaatgcctgtaaatttttcttggactcttcccttcaatttcactacctttgggcaaaccttcccaggacgataaaataggacagagcaatgcagcatctcaaaattcccggataagcttatgcatggttacagactgaaggtgaacatgacttgtccaaaccaaaccagtaagcttctttgtgcataaaattatctgcataaacatttgatatatcaaaaccatcatattaagagcattcaatccagtaaatagacatactgcagaacacaggacatctagcaacatcatacacatgttgaatggtcccaaacgtaggtgcagtgaattcatgtgtattacctgttgctccaaaagatccaacacagatggccatctttttccatgcttttcatgtcagctcccttatgtccttcagcaggtaggctattcctcacgctgcctgccttccagtgtagcataatcaagcatcaccagacctacataatgcacaccatcataacacaaagcaatcagtgtaacacgattttttttcacggtgaacataattcacaaagcaatcagtgtaacacgattttttcatggtgaacattattaagaaccgttgacagcaaagcacattattttacaaacagtttgccaggactgattcacagaaatagcaaaagttcaaatcacttgacaatcatcatcaacccagggcagacaaaggcaaagctgattaaatggagcacaaggtggaaaatagaatgcctggaaaaatgtaatgaatgcacccacatcaccccagtacagtctcctaaacataacataagatcaatgcaaagttaaacaaaacatcattcaggatctggttcatgttcagaagaaacaatgaaaggtcaagtgtttctttctgctgtttgaggccttcttttaaagcaaaacgaaaaggtaaaaatctataaaaggaagaaacaagcagcctttggcatgtatttcaaggaaaatggtatatcatgtatttcaagtcacgatagtatttaaaaataaatggaaaataaaaacttgtggtaacttatgtcagaaaactctatagtttacaatattcagagttgttggtctaagtgtcaaatgtaaaagtgaaacatggaaacttcacattttgatacagatctgatcaactccatgtcctccgatagacaaaaatgagcagtgactgtgttgcgtaagtacatactgcagatagtgcaaaccacatcacacatatatggtattcttttaagaggaaaatatggtaatttgacacgctcacgtatttgaggaacttacacttgaaaaatctctactactttaaaattccgtagtggtggcggtgactccaaccctggaagacacgcggaacatgagctgttggatcgccatatccaacgctcccagttatcagttatccccatgtgcttgtgcttcccccctccgcccgcaacccaaacccacgtcgctctcccgatccaaccgcctccgtccaaccgccgccgccgccgccgctccatcccctcgtcgcgcctcgccgtcgcaccacgatgcgccgccgccgctccatcccctcccgctccatcgcgccgcaacgccagattcatcgccgctcccctccctctcgaccgtttctctcggcgccatctccgcacatccccgccagcgccggatctcccttctcgccctgtttccttgctgaagcattgtcgtgatattcagtttgatctgctcgtcatatcgctgccgcacaactcgccgaataccaaggctcgtaaacaagcgccgccgctgccgccaaatccaccgaaaccaatctacgcggccaccacacgatggatgcatcaccgtcaattccgccctcgccgactccgccacagccgcctactccaccgccactacagttgtcaacgactccgccgccgccactcccgtcgtcgccggctccgcgaccgccgtccgtgctgccaccgcccttgccgtcatcttcggcgccaagcattgtcagcacagatatcgatccggtaagttaagcacctagcttaattagtccatgaaaactatcgatatatatgtgtgcgctgtattgcgatttgggttacttagctaggtaatgttaatgcatggtactgtagattaatgcaaggcactgtacgttaattaattattaattgaagcacctagctagccatccactattatattataaaattattacttataatatatcaattgcattaatatatactcctacactagcttgtgcgcagttctcaggcttgcttctttacttatatgaggaactcatctctcgcactcgcaaaactgagggactcattaacgcatgattaattaaatattactccctccttcccaaattgataatcatgtaatagaatccaaaatttctcaaattgatcatcatattactgcatggacacagatttcatctaaatacaattaatgcagtatgagagaatgtgtgcatgctatgatgtaattggcatagggttttaatcgatgcatgcattgtgggagaatacgtgcatggtgtcttgattgatgtgatttaaattgtccttggtcttggtacataaacttatatgatgatcaatttgggaaggagggagtagtttttaattagaacaaatagatttttatggttttatacaataactctaacaacataactcagcataaaatcaacctggccatcagctcattttacgaatatacaatactctgtgtggcatgattcaccaagaaaaaaaataattgatagctatgatcgagcaaaataaagcattgtaccaactaatgctacactaatattgacctccctgccgacgtgcttttttccagtgttatatataatctccatgtgcaatatagatatccttgcttaatctcatgtggtactcaggtcaatcaagacgccattcgtgctgatatgattacaacctgaccctcgaataaagcaaaaaattcggaatccgaggagcatggaaattttcagtttgaaataagtagcacagcctgaaatttctttaactgggaagaccatttgtacaggtttggtttcaatcgaagctacaggtttaatttggaagatcatgcagccatgatgctacaaatattaatcttgatggtttaaattaacctatttcatctatacaacttgattcagcttaatttagttcctacattagtgcacagttattcttcatttatttgtgcgtacaggatctatggaagagggccattaggtactaagagacctattgtgccattatattcatgaattttttggctgtttgtaacctgtgaaaacttataaggatgtgatgaaattattgttcgtgccataataaggttttcatcataataaatttaattattcaacatcattttactgtgattttaaattggtgtatattttttacccgttgcaacgcacgggcacctacctagtaaggaataaaaacaacatggaataggggagctgaacaattacttcatcagatatttattgttgtggcatgattaattgtgaaatgcactatttgaatgagaaatccccatccatatacatcaggaagctaaacatcattgaaagactatgaccgtggatatactataaaaattaaacagaggtctatttgtcaaaattgaatgacaattccaaagaggaaattatatcattgactatcagaataatatgacatggctaactacatatttgtagtttccaaggcctcatgctactcacaatatttagcgtgcactactgtcacaaatgtaacaaaaaacaattgaataggcactatcaggccaattaaaatatgccaatatgtggctatagaatgatatattactgtatgaaactatgaatagcaataagacagactcacctagaggattcacccaataaatttgtaggttcaaatcttccatcttgtgtgaataatccatgtgccttttggtttgttgaatgtccaaatgcattagtgtcatcaatactgcgtagttttgcttccagaaggttgagagatgagtctagtttcactattttcctagaaatggatagtctattagtccatagtttcatcagataggtacaagatgtaattcagagaagtatttatgctgacctacttttagtaataagcaagcaaaagcttagtcaagcattagattttctacagcaatgggaaagccattaacttctctcaaaaacagcatgattcatcttttatattccctccgtactcgtaaaggaagtcgtttaggacaatgtttaagtcaaaccttgggaatataaatcatgaataactctcaagttgttgagtttgaaaatgtaaaaattatatgaatagatttgtcttgaaaatactttcataaaagtatacatatatcacttttcaataaatatttttatagaaacaagaagtcaaagttgtgttttggagaccgtgtcgctgtccaaaacgacttcctttatgagtacggagggagtatatgctaaatctgtgctaattgccaaatcgccaacaatagcttctcatatccttctctcattgatttgcaaaaagaaagacagaagtacaaatttcaaagtaatcaatacaaaaaataacaacttctacaacacaattttctctagtgtcgtacaccaattcataagtttagaggcataggttgtgaaagcacgttcctcgcacttagcaaacaatgacaagagatatccttaatgctcagcatgaattgacttgtaaaaaatcttaaagaagatttatgcaatccagttaagcatgtcattctccaatacaacacttattccacaaacacgaggaaatcctgaacaggctattatcaaattttactccaatagagaactaaatggattcataagaaattaatagtgcaaaaatgtgcaagcctcctacaaaggtattttccaattcacacttttttgtgatggtactagccctcctagaaaaaaatagataggtaccatcacaaaaaagtgcaagttgaaaaatactattgtacttttttgcgatgctaccaagtaaaaatgcccttctgaaaaatacaaggattgaacgttgtatcccttttagagtcttgcaggtcaataattttgtaaaaaccaactcgttcccataattccggtgagttgtgagttccacacgatattgcatcaaaatagcttaaacattttccaagatactattcagaaacaacacatgattccggtaagaaataatttcccataatgctatgagattgtgatcctgaatcattgaactctagaggcaatgtccgcttccctgtattgtacacatatactgacttcttttcatgtgccgacgtatataattaccctgggtaattaactatttgccactcttacgagtggtgataaaggatttaccactagacccacatgtcatagatatatgagggtccacatgtcatagacaacgagtagcaaatccttaattagcacatcttaaaagtggtaaaaagttaaatgtccctagttacccatatcttagcacaactgtaacacacaagcagctatagcgatatctaggaatacacaaaagatttgggattttttattttttattttacctgtggaggagggaaagcttgtcattgcattgcgccgcgaacgagttgaggaactccaccgtgttcgctatgaacatgttcacctgcaatgcggagagagagacacacacacacacgcagtcagagacgccaaaagaccaaaatcgtttgctcaccccgaaggtggagcaccaccagatgagatcgaccgtggagatcggagagggggtgagggggcgagtgaaggcggggcggaccaggtagatggtcctctggtcggagacggcgatggccctcgcgctctcctcctcctcctcctcctcctcgaacccctcgtccctcggcgccggtgcggagggaggatgcggcggcggcgagcgcatggggctcctcgccgcggccgacttcaggtggcgcagcatggcggcttccggatcgagccgagccttggaagctggaacttcaccttgcgcggcagacaaaaatcaagaacacggcggcggcggcggcggcggcgtagaatcgccgacgagcgagcagagcaaatctcgtactgtgtccgtgtgggatctaacctaagagcccgttacgaactgccaaaaaggcccatcatggcccatgggccgatggtcaccttgctttaggctgtgtttagatcaggggtgaaaaattttggcacgttaaatcggatatacggacacatatttaaagtattaaacgtagtctaataacaaaacaaattacagaatccgtcagtaaaccgcgagatgaatttattaagcctaattaatccgtcattagtaaatgtttactgtagcatcacattgtcaaatcattgagcaattaggcttaaaagatttgtctcgcatattagtcgcaatatatgtaattagttattttttagcatatatttaatatagatattcaaatgttcgatgtgacgggtgaaaaatttttgggtgggatctaaacaaggccttactcattttctgcagagtaatcgatgcatggggtcccatagatatgatgatccatcatggcatcatttcctctcatgggagatgagaggacctccacctctaactttttaggtctgttttcgaatgccgaaatccaaaccgctggacagaaggaaaaggggttgttatactatgggattttgttgaatgataatggtacatataaggtattaggtgatacttgacgggaacagatgaaacaacatatatatcgaccgatatctgttggtatcaagtctcgcaccatctagtatcaaatctgatataagatcgattcttaaatatcacgcagtactatacctctacttctctctttctccacttcaattcaccaccaaacaattcatccccaaatttatccccttccccctcctcctctaagaaagtgaagaacaagaaataaagagaaaaatagtttgtggttagatctatgaacctgtggatgaaagataacacctccatgccttcaccgacctcgtagacttacttccatgttgtcactgctgcaagtggtgctgaccagcagtaacgcctcctctccctcatcgttggcatcgaggcagcactgaatgaggttgtggaggccacaagtagtgccgactgccgaccaacagtaacgcctcctttcccttatcgtcggcattgaggcggcgccgaacgaggtttgtggaggccgtaagtggtgccaactagtagtaacgcctcctcttcctcatcgtcaatgtcgaggtagtgccgaacgaggccgtggaggaaagggaagggaaaagggcgaggttgtggagtaaggggaagggagggagcacacaacggcagcggcgccacccactcttcatctcacctccttcctcaaaccatgtgagtttctctttttacgaaagaatggtatcatgcggggtgtggggtaagcattcccattccgagctaggtggatagcattttcgttattgtttggatgcttagtagaagaggacttttagatataggatttcaggagagagatagaaaccagaaaagtttcccataaggtataggcctcttttggatagaaggattttaactttaaatgccatatggattttgtttcatatgtctcattccaaatgaaaataagaatgagctcatagctcatgttttgtttttctttgagaagtcccatgcactcttttcctttctctctcttacccaaacaaacttctttcaagattccatgttgacactagttatagtagtcttgtgtgtttggcatccaatttgacaagagcatgatattcatcaattcttaggttccaaaagaagccctcaacctcatcttaattaaatatccttccaaaatatcatgaattaattcattccaaagtaatattataggaattacaaatgcccattcctttgttgtaaaagagcacctagaaaacttttctatgggatttcaatccttcaaaagctatttttcttttgttccaaaggaacccttagactaaggccctgtttgtttcagcttaagattactgtaatctagattattaaaccagattactctaagctggattataataagttgacatagaataagctgcgagctgtttgtttctctatattattggaggcatctaaggatagtgggtctttagccacccaataatctgaaaaaagctcctccagaggagattattagattatagtaatctagcttatagatcataataatctacttgtttgtttcagcttactcataataatccagattataataatagtaagctgaatcaaacagggcctaagttcgtatatacctttaggagttagctactccctctttttcttagcatacattttttgaactgctaaatgatgaacttttggcaaaaatcttcgatatagaagtttatttaaaaatcaaatattttttaagtttataatagctgacacttaattaatcatgcattaatgacccatctcaatttgcgtgccgctaaaaagatgagctggaacccacgttagtaaagattgatacctatgctctacactaaaagttgggtctactaaggcttaggccagtcccaacccaaaacactagatataattttcataaactccacatcatcaagaaattagtactagacaccactctttcaattcaaacaccacttttccatatttaaatttaatgttacttatctcacatgatgtcttgaatgttgtgtagaaaccatgtctcatgcaagacctggtttccttctttttctcatttattcacttgctacatcattttttttaatcctaggtggcaacttatttaatgctatggacactgtcggtgatatgggaccgggagtatcatgaccagaggcttgaggcagacacaatcgcccacgtagcctggcaccttcggggacgtcgggcccgagggtgaggtgtccgccctcctcctgatttcccccgaggggggggggggtcgggttgcgcttgccccggccccgagggccgaggcaccccgaccccttaaggaaatctgcgccatatatatataggataagtgagcacagctgtgctcacctaacagcatttattgcagtctggtcaagcgcgtcacgctgcatgcagcgcagtacagcgcgtccctttatccggtctgtgatcagtcacagaccggtcagatcacgggttaggtggcaactggcggtctggcgcacgccttgccccgtcccgtcaagacgaaagcctctatgcactcgtctcaagccggagttaagcgtgttatctcttagagatgacacgttagccccggtcgatatatgccaggcttcatcctaaccattacaggcaagatgttgtgtgaagaagggcaaacatgcacgttgccaagattacacgcggtggacaagaatgaccgatctgtgaccggtctgacactaatcatatcgtcagcgcacagccgtgttcccacgacgcgctcacccccggcggaagtggaggtaggtatgggcagtcccatcggagtgtcattcgaacagcaaccgtgctgatctccgcccattctagagaaaaagaacagtccagtttggaaagagaagggtgcatgtggtatccccttgaagtataaaaggaggaccttgcccatggggtaaaggggattgattcttttcaagattaggaacttagaacgggggagaagagagctcacacttgtagctcattcatacatagatccaccaaaacacaggagtagggtattacgcttctgagcggcccgaacctgtatagatcgtcggtgtctcgtgttttctggctggcagacaatctttccatatacagagagagagagagagcttgagatttcaccctaagcccccggccggactggcaaaggggggcctgcgcggtctcccggtgaggagccacgagctccgtcatctggcgcgccaggtagggggctcagcgtgtgctttctgagctctcagactcttccgtgtgccccaagtttttcttgttcagcctaatggccgagcaaggaaaaacgcacgacctctcgccgagtgtgagcggcgacgacggggagccgaatccacgccgtcgagctcgtactcctccacctcctccgcgccaaaaccctaagcaaggggaggcgcttgagagggtcgacaaatccgcggcgtcaccagccgcaggtgatgcaggggaacagcgagatggggagcgtcgcctcctcgtctacggcgacggcagcacacctcagggtgcgcttcaggctgctggcgcgctcctacgacacccgcctgtcgtccatgacccggagtctccagcccaacgatggctggaagacgtggccaacttggtcatgacggcacagcagcgcctgggtgctggtggacggtccgccacccccaccaagacctccggcgccgctaccaccggctccgtgtcatcaaggcggagggcgcggcgagcggcggcggctgcacgtcattcggctgccactccctcgtctacaccgtcgactcgggaggatcagcatggggagccggatgcccgcctcaacatcgggcgccggcgtaatagccggcgtactccccgtgcaacggagggagcctcctcgtccagagtgtcacctcgacatggacgtgaagatcagccctccgtgcccccggccggtggtgttggctgtagagcctttgtggcgagtcttcggaatgtccgttggcccccaaggttccggcccaccatcaccgagaagtacgatgggagcgtcaaccccaccgagttcctccaggtctatacgaccgggattgaggccgctgggggtgacgacagggtcatggcgaacttctttcccatggccctaaaaggacaggcgcggggttggctaatgaacctgccacccgcgtcggtccactcttgggaagatttgtgccaacagttcaccatgaacttccaaggcacatatccgcgcccaggcgaagaagcggacttgcatgcagtacagcgaggcgatgatgagtcgcttcgctcgtacattcagcggttttgccaagtccgcaacactataccatgcatccctgcacacgcggtgatctacgcgttcagggggggcgtgcggcacaaccgcatgctcgaaaagatcgcttccaaagagccccagactaccgcggagctttttcagctcgcggaccgagtggctcgtaaggaggaagcgtggacctggaactcctccggttccggagcggcagcttcggccgcccccggatccgccgctcagacagggcggcgtgataggaggaggaagaagaggtcggaccgttccggcgacgagggtcatgtcctcgccgtcgagggcgctccgcgggccacccgaaaggggaggcctgcgagcgacaaaaagaaagaggccggaactcccggcagggagcgccccgccggcaggtggtgctccgtccacaacacctccctccacgatctcgcggactgtcgtgcagtcaaaaacctggctgagcgaacgaggaagtgggaggaggacaggaggcaggaacgccgtgagggcaagtccccggtggttccatccggcaaacggcgaggtgaggccaagcagaaggcccccgttgttgacatcgatgatggtgatgatgacctaggtttccaagaacctggggccaccattgccaccgtcgatggaggagcgtgtgctcacgtctctcgccggagcttcaaggctatgaaacgagagcttctggccatggcccctacccatgaggcgatgcgtcgggcgcggtggtcggaggtcgctctcactttcgaccagactgaccacccaccgtgcattgcccggggagggcaggttgcgatggtggtttcccccaccatctgcaacgtgaagttgggacgtgtcctcatagatggaggagcggctctcaacatcctttcccccgcggcctttgatgctatcaaggccccggggatggtgctccagccgtctcaaccgatcatcggtgtgacgccggggcacacgtggccattaggtcacattgacctaccggtcaccttcggtggacccgccaacttccgcacggagcgggtgagcttcgatgtggcggacctcagtctgccctacaacgcggtcctagggagacccgcgttggtgaagttcatggcggcggtccactacgcctacctccagatgaagatgccgggccccggtggccccatctctgtccgtggcgaccttaaagtcgcgcttgcttgcattgagcagcgcgcggaccgcctcgctgctgcgtccaagcccgagggtggtgacgagaggcttggcccctctgcccccaccgccccgaggcagcggatggccacttgcgacgaggtcccggtcaaggaggttgccttgggcgacggcccatccaggaccacacggatcggtggtcttctggatggcaaataggaagacgcgctcgtctccttcctgcgggcaaacgctgacgtcttcgcatggagaccagcggacatgcccggggtccccagggaggtgattgagcaccgtctcgccgtgcggccgggtgcaaggccggtccggcagaaagtgcggcggcaagccccggaacgtcaagccttcatccgcgaggaggtggctagacttttggaggccgggttcattcgtgaggtcatccacccggagtggctagcgaacccggtggtcgttcccaaggcgaacggcaagcttcggatgtgcatcgactacaccgaccttaacaaggcatgtcctaaggatccttaccccctgcctcgcatagatcagatcgtcgactccactgcggggtgcgaccttttgtgttttctagatgcatactctggttaccatcagattcgcatggctagggaggatgaggaaaaaactgcgttcattacccccgtaggaacctattgttatacatcaatgcctttcgggttaaaaaatgcaggtcctacttttcagcgtactactcgaatttctttgggtagtcaaataggacgtaatgttgaggcgtatgtcgatgacttggttgtaaaaacgcgcaaccaagagaccttactttcagatctagcggaaacttttgagaatctccgctccgcccgcataaaactgaaccccgataagtgtgtgtttggtgtacctgcgggcaagcttctcgggttcttggtctctgcccgaggcattgaggccaaccccgagaaaattcgagctatcgagcggatgcgcccccccagcaaacttagggacgtgcaatgcgtcaccggttgcatggccgccctaagtcgtttcatatcaaggctgggagagaaggcgctacccttgtttaagctcctcaagcgctcggggccgttcacttggacggaggaagctgaaaatgccctcgcccagttgaaggcgtatctcagctctcctccggttctagtcgccccggagccaaatgagtccctgctactttacttagcggcgaccccccaagtagttagtgcagcgttggttgtggagcgcgatgaggacaatcctcattctgcgcacccccgctctgtgccgacttggcccgggagcaggcagggaggagaggcccccgagtcgaacggtggcctaaggcccccgacgaccggagtcggccctccacccgcttgtcaaacggtgctgggtgcccccgaccctcaggaaggccccgaggccactgagggaaggctgcacttaaggccctttggccccgaggctaaccctgtgctgactcgacccgggaaagagcagggagaagaggcccccgagccgaacggaggccagaggcccctgacgaccggagttggccctttgcccgcttgtccgacgatgccaggagtccccgacccccaggacggccccgaggccactgtgggagggccgctcctgtcatcctccgaccccgaggtcatcagcgcagaagacgagtgtgccccgaggggccacttggacgaagaacgccccgggggtacggcccctagcgaggaggatcggccccgccgaaaggtgcaacggcctgtctactttgttagtgaggccctccgggacgccaagacccgatacccacaggcccagaagatgctttacgctattctgatggcctcgaggaaactgcgccattatttccaggcgcatcgggtcactgtggttacgtcttaccccctcggtcaaatcttgcataatcgagagggtacaggacgagtggtaaaatgggcaatcgagctttctgagttcgatctgcactttgaaccacgccacgctatcaagagccaggccctcgccgattttgtggcagagtggaccccggctccagagaccgtctcaatacccgaggccagcacggacccctcacagctgcctcaaaccgcccactgggtgatgcagttcgacggttctctgtcacttcagggcgccggtgcaggggtcacgttgatctctccgaacggagacgtcctcagatatttggtccgtctcgacttccgagcgactaacaatatggcagagtacgagggactccttgccggactcagagtggcggctggactggggatccgccgcctcttggtattaggcgactcccagctagtcgttaaccaggtctgcaaggagtaccggtgctctgacccacagatggacgcctacgtacgccaagtgcggcgtatggagcgccatttcgacgggatagagcttcggcatgtacccagaagggacaacatgatagccgacgaactctcaaggctcgcgtcctcgcgagcccagaccccaccgggcgcctttgaagaaaggcttacccagccgtcggcgcgacccgacccctcaggggagacggatgcgcctgaccggcacccgaggcccgtcggagtccaggcctcgggacccgaagagagcgttccaagctcccttagattgattgcttggatctctgagatccaaacatacctcacagataagactctacctgaggaccgcgaagggagtgaacgcgtacaacgcatttccaaacgctatgtgctggtagaagggaccctctatcggcgcgcggctaatggaatcctcctgaagtgcattcctcaggaacaaggcgttgagcttcttgctgacatccatgagggcgagtgcggagcccattctgcctcgcgcaccctggttggcaaggcctttcgtcaaggattttattggccgacagctctcaatgacgcagtcgatctggtccggcgatgcagagcgtgtcagttccacgccaagcaaattcatcagccggcccaggccctgcagatcataccactgtcatggccatttgctgtctgggggcttgatatcctgggaccgttcaaacgggccccgggcgggtttgagtatctgtatgttgcgatcgacaagttcactaagtggcccgaggcttatccggttgtcaagatcgataagcactctgctcttaaatttattaagggcatcacggcccgttttggagtgcctaaccgtattattacggataatggcacccaattcactagtgagctcttcggcgactactgcgaagacatgggcatcaagctctgcttcgcctcacctgcccaccccagaagcaatggccaagtggagcgcgccaatgcagaaatcctcaaaggccttaaaaccaagaccttcaatattctcaagaagcacggcgattcatggatcgaggagttgccagcggtgctctgggcgaaccgaaccacaccaagccgagcgaccggggaaacgcctttcttcctcgtctacggcgcagaagcggttctcccatctgagctcaccctgaggtctcctcgggccaccatgtactgcgaggctgatcaagatcagcttcgtagagatgacctcgactacttggaagagcgaaggcggcgcgcggccctccgagctgcgcgctaccagcagagcctgcggcgctaccatcagcgccacgtccgggcccgatcactctgcgtcgacgacctcgtcctacgccgcgtccaaacgcgtgctggattgagcaaactctcaccaatatgggagggtccgtatcgagtgatcggtgtcccccggccgggctcggtacggctggccacgggcgacggcacggagctgccaaacccgtggaacatcgaacaccttcgtcgcttctacccctgaaggggggggtcgggtgtcaggttttggctcgggctaaccccgcaccccccctcgggtgtgcagggttagccgggggctaccacacatgcacatatattcctttcagcatttcaataaaagcagtttcaatttcctaaaggttgtgtctgtgccgttttttccttttgaagaatcttgacttgaaatagggtcactcgtgctcaaccttgccctcgggggctcggttcggtcagctaaaatcgccaaacggggcccagaaccgagccgtgccccggggcgtggtgaactccgggggggaatcggcaaaaacccacaatcgggtcacccatacccctcggtcaccacgttcccggcctggccagtctcgacatgcggatctccccaggcactagccccgacccgagccattcgaggaccgggacttgggcgtgagcccttatttcaagctaaggcgcaaaaggaccatggcacagatcatcctcaactcatatatatagcaaaataaaactaacacaaaaatttttcatcatttctcattgcagattaagttagattgtacaaaaaagaggcatgaaggccttagaagaaagaacaagaaaaaaaaaaaaaagttaagagtggcgggggcctgggggctcattcatatgcgcccgggtcgccggcctcgtcgccaccgccgtcctcgctgctggtgtcgccttcctcgtcggagctgggggcgaacgcgagccgaggggccgagccctcgaagccgttgacgatgtggtcagcagcatccccgacccgcgcgcgcgcctcgtcctcggtcccgggagggaactcctccagcgccatccatggggagaagttgggatcccgggcctggtaactcgccagcacgagttcgaccgccccccgggcgaggtccctcgaggatgccttaatggtcttctcgagctcctcggggagtcgctcgagaacccaagccatcctgttgaggtgcggagcgaggccttccagattggtggggggcaccgtcgtctggcctccccagaggcctgcttgccgaccggcgcgcttcatgcgggagaccgcgtcccaaagcatgccgggcccaatctcgcccgccaagcgaagggcctcggcctccccggtggaggagtccagcgcgcgctgcatgtcagcgacggtgtgttcggcagccgcgaggcgagcggctaagtcgctttcgcccgcagccgccccaccgatgcgcgcccccgcggccagctctttctcccgtgcctcgaggttggcagcccgctgctccagcgcggttctctcggcgcggacgctttcaaggttgcggcgcgcctgctcctcttgcgccgcctcacggagggagaggctgtccgccagccgtcgcgtcgtggcctcggcctcctcgagagcccgctcccgctcggcgagtgcatcctcgcgaaggcggagcgcggactcctcctcggcgcaggcggcctcgtgcgccgccagcgtcgcctcccggagagcagtggcggcctcgcggtccatcaagcccctctccacggcgccggcatgttcttccagcgccatggcacgggcctcaagggcctcctcgcgccgccgggacgccgcttcggcttccgttgcccgccgctctcgggcggcagcggagtcgagaaccccttgggcggcgtcgagcttgctcttcagctccgcctcccagcttgcgtgctgaagacggagggtgtcttgcgcctcgaccatcgcggtggtggcgacgagggcggcctctcgctcctcctccacctctcgggcgatctccgccagcgccgccttgcgggcttcgagctccgagatgtggcggcggtgagccttacggcccacctccaccatggcgtccaccgagcgccgcccctcctcgacgcgcgcccatgcggcctcgagctccgctcgttccgctcgcaaggcctccacctgggcgctaaatccgtctagtaccgcggtgtttgcggcggccaaggcctgcataatgggctcggcgctcaccggggcgacagaagaggaggagaaaagccgccttggagaaaaagcgacgcggcttggccccccggaggatacgctgagctcggggatgtcccccgggcccgtttggtcctgggcgtcgcccggtgaggtaggcccaggcgacgcgcccgcggcctcatcgcgagccgcctcggaggatgtcgcctgagggccgcccgagggactgggcccgagtgacgcgccagcagcagctgccgcctcagcttggcgagcccgggcggcctcctcccaggcagcttcttcggcttggcgagcccgggcggcctcctcccgagcagcttcctccgcttggcgaacccgggcggcctcccgggcggcctcttcagcttcccgaaggcgggctgcggcttcacgccggtcagactctcgcctccgctcctctgcggccgctggatcctcggcctcgaactggccggacttggggtggcgggaggaatgcgacgggacgtctctgaagcagaagaaaaagccagaagacgaacaaagtgagcaagaaaaaacttctttttggagaaagatggttgcaatgagagtaagacgaacctgcgagggggtcggttgaatgaccaccttgggggggaaattaggtttccccgggctggttccgtctcccccatcttgcggagccgcttcttcttgcgctccccctcgggctgagacgtcggcgcggccccctccgggcgccggccactggtacgcaccgccccgccccctcgggggggagatgggggaggtgttcctcccagcttcctcttccccggggcgtcggcagggcggctgctccccgagcccccgacgcggggcccagaagcacgaccccctcccggggcagattgtttcccccggcggcgctcgcccgcgccgtcgttgcccttaggggctctctcctctgaggccccgacccccagcataatggatagaatggagacgcggtcgggatcgatgcagagggggaggatctcctgaggaaggtgagacgcctccgcggagctaaggttcagcaccctttggaccacgatcttgaagtcctcgggagcccaatcccatctggctccctggtgggtccgcatgaagtcttcaggcccagtgtactcccaggcgctccgagcgcgccgttggagcggcgcaatccggcgacggaggtaatcgccgtacaccatggccccggtgagcccctgggatcgcaggcccgccaggcggtcgaggacggcgtcgtactcctcccccagatctaccggcgcccgccagttagagacctgcgccgggggctggcttggaaggcggaggcgcgcttcgtcggcgaggggggtgtagaaccagtcgctcttccagtcgtcccacttcttgcggaggacgcaggggatatagcggttcagcaccggcccccgcggctggaagtagcagccgccaaccaccgacggcggtgacaccgactgcacggtgaagaaccaccggaacagctgaagagaggggcgcaccccaatgaacatctcgcacaggtgcgcgaagatggccagtgtcatcaccgcattgggggtgaggtgcgccatctggagattgtagaactccagaacatccatgaaaaaatgagaaaatggcgggaccagcccagccatcgcgaaggggaggaagaagatggaccgccccgggtagtctggtgccgggcgcccctcgcccagcatcacaatctcccgaccggtggcggactccggcatgaagcggcgcggcagtccggcgtgcctctcattcacgatgcgggaaggcggcagtacactgccgtcgagcagagcagagccccgtgccatggcggtggaggaagagatgattgggaacgagcgcgtgtggcgaaagtagggcgtggcagagaaagagttagagctcaggcagcgaaggcaagaggaacaatggcgaaaggaagggagcaaatccttttctcgatgcttttatacccttgccatcgctgggcctggctcctcgtttctcgcgcccactacctcgctccctcgtatctcgctatctcgctccctcgtttcccgtgcccacgcttccactaatcccattcgcccgcttacggcgcttgaagtggatatgcggttgtggcaatcgaaacggattgtatcgtgcgcgcgttaattacgctcgccaaccgaagcggcgttaccgtatctccgggcgagacaaatctgctcacccagattcgcgcgctgctcaagtggtgtggcagtctcgaatagaccgcccattatggacaaccaaagttaccaataccaatgtgcatggattgagaccgttgggtattttgcccaactacggaaaccggtcccacctgtcacagggtggcgtcacacctgaccgcttcccttgggaagggaaattgttctggcacaacgccgggggctactgtcggtgatatgggaccgggagtatcatgaccagaggcttgaggcagacacaatcgcccacgtggcctggcaccttcggggacgtcgggcccgagggtgaggtgtccgccctcctcctgatttcccccgagggggggggggcgggttgcgcttgccccggccccgagggccgaggcaccccgaccccttaaggaaatctgcgccatatatatataggataagtgagcacagctgtgctcacctaacagcatttattgcagtctggtcaagcgcgtcacgctgcatgcagcgcagtacagcgcgtccctttatccggtctgtgatcagtcacagaccggtcagatcacgggttaggtggcaactggcggtctggcgcacgccttgccccgtcccgtcaagacgaaagcctctatgcactcgtctcaagccggagttaagcgtgttatctcttagagatgacacgttagccccggtcgatatatgccaggcttcatcctaaccattacaggcaagatgttgtgtgaagaagggcaaacatgcacgttgccaagattacacgcggtggacaagaatgaccgatctgtgaccggtctgacactaatcatatcgtcagcgcacagccgtgttcccacgacgcgctcacccccggcggaagtggaggtaggtatgggcagtcccatcggagtgtcattcgaacagcaaccgtgctgatctccgcccattctagagaaaaagaacagtccagtttggaaagagaagggtgcatgtggtatccccttgaagtataaaaggaggaccttgcccatggggtaaaggggattgattcttttcaagattaggaacttagaacgggggagaagagagctcacacttgtagctcattcatacatagatccaccaaaacacaggagtagggtattacgcttctgagcggcccgaacctgtatagatcgtcggtgtctcgtgttttctggctggcagacaatctttccatatacagagagagagagagagcttgagatttcaccctaagcccccggccggactggcaaaggggggcctgcgcggtctcccggtgaggagccacgagctccgtcagacaccatcctagtcattgggttaggaatggccttaaatcccatttgaaatgtacaaggccaacgtttagtgtgcagtgtcatgcttttgtgcttgaggttatccatttcttagaaataatttttttaaaataaattcttagaagtgtctaaataaaaaaatattcatatgtggtggtaggtgcacagatggaagagcaacctataaggtaacaacaatttgagtattctcgattttttggtgccacacggtacacccctttagcttggagttgctatagttatgacaggttgcccttgccattagtggtggtatgcaatcatcccaaatattacgaagagttaacctctagaactaacaaacatccttaaaaaaaacaaattttgctaagaacattcaaagtttatatagtttgctggtagatatcgtaaaaacatgatacgattggaggacacactcaaaatgtggtaatttgttatagaatactttcggccaattaaagagagaaagtctttaaaatataagcttagcttctatttgaaaatttgaaaattatgcaactctaaatcttccatcacccaaagtacattgcttgcatacatcatattccatcaccaaagtcaggttagaagcttttggctcgaaggacattctcgtctttttgaataatctctagccaattaggctgaatgggtcctctagcaaattattagctttttacagtgttctccaattgttatacatttttcgatgtctaccaacaaattacacaaactttgagtatcctgtagcaaaatttgtcaaaaaaaaaaggtacaaacaagcattgattttctcataactccgcatatttagctttattgcaaaaaaaaaaagaagacaaagaaccttcaaaactttctaaaatatattataaacactactactttattgaatcatctccaagaaaagagtataagctttacaagaatatatcctatttatgtgaagtactaagatctttacctaaccaaaagaataatcatgtacacgattttgaggcagctcagactgaaaacactcaacaatgctaacatcacatgaagcctcttattactatacaggaaaaagaactgctccagtttgatctaccctgcaaaaatcaatacaatcagtctaccaattgccaacaaacatagttaaaacataacgtctgcaaagaaaggaaggaaggaacaggagagaaaacggtcatagaaattcccgatcgaccgagcgccgtttccgtataagggataccgtttctgaccgtaccgtttttggctatcttaaaattttttttctaatttctttctgcatcgtattaatatcgatattgagtagttaaaatgataaatatggtcaattaccggccgatcgagcatcgtttctgaagagatgctaccgattccgatcgttttcgaccgttttcacccctaaataggacgaccttgttctatctaaataaaatggtaataagctctccccctatatggactagaacacttcaaagttgcctcaccttaaaatgtatcaagatttaggggaacatcttcatcaggcttcgcttttggttgagtttccttgccaattagtttcagaggaacatctagttcaggggggctctgcacatatagttatttagataatcagtgatgcactaaacaaactatctttgtcgaaatgtcttgatgctcgaaacattcaaagtaccatgcaacgtatgagtggccaattgatgtcttgaaaaaaggaatgttgcttgatgtcatttgcaccagcatttgaacctatacgatttgaaggatctctctgaagtaatccatggattaattgctttgctgcaagactaacctggagaatcatagtgatattaataaatgagaacaaatgaaaactaaaatacaataacgaagtgtaagataggcataaacattttcttatctaacacatgctaacacatacccttaacatgatatcttacaggcttgctggacagattgtaaattggactcaacctttgtagttgcaaattgaatacagtatgcaaaaaatattggcctgcatgacaggaaacttcactggccatttctctaaaaaagaagttcttaccggaatgctactgggaaatgtaaggtctttgtgcagtatgttataaaatgtctttttcctgttctttcctcggaaaggtgtacgcccatacagcatctcatacaatagaattcctatagcatgggaattgatgttagctggatgtcatcttattattagcataatgcatatcaaacaatataataatgccatatcaaacaagttctcatggttaggtacttaggtgtacctgaaaacacatatctagtacttacacatcttataattatctagagagactagggatgtattggtgtggtagatacatatacagatctcagaaataaacacatacggagggcagtgtaccttcgggtgcttctaggcatttgacatctaagcagcatggttcaattgacacatggagaatttggataggttggagtcagcacataaacccacatgttctaatcatagcacctaccggtaccttttacacggaggccacttccatggaagggctaggcatgagaggatttttagaagggatattacaccattcaattttatgtttgttttgatccctgttatctagttaaactgactaacctacttaatgtgatgtaaattaaaaaagtgtgatatagatcagttatagcaggcaaaagtttgctgcagtgcaacttgtgacatgagttttgtttaattatgcatagcagtgtagcacaaaacaattaacttaaccgctaattatttagtcaaagtggtaatatggactattctctgggtggaaacccatgttcaaaatcttgtttgaatggcacatggattattatgaataatttgatgagattttagttgaacctcaaacatcttttaggtgattgctataagactataccaactaccaagaagatcgaataaataaaactaactcttttaatccattctgtgcaattcttgtaatcaactagttcataagatgacccaaaaaaatatattaggttattgcttaccgagagcccaccaatcgattgcacttgtatgccctgcacccgttataacctcctaaaacgatgcaaaagttagacaacaatcatgctacttgctgagaaagaatcagagaccaacattgacaacaagcggtttcgtaagatgaactgaaaaatgaaaagcatacatgtaaaattaactaaaagataaaaaggctacacctgggtcttatgataatgcatatcaagttgaaattaaaacaattactccaacaataagcataaagaaaacacaaggatcattcttactggagcgatatactcttcagtaccaacaaatgaatttgatggagtggaaggttctgagacaaatgttggggggagaaattcttgtgaccttcttcgttttaatgatgtggaattttttatcacctgcaggagatttaaccaacatcagggcaatatcaagtgttttaagtgcgatagtttcttatgaacaacaaaaacacatgctggaaaccaccaacaagtactcaatataaacatgttcttgacaccattactgactttgaatactatgcaagtggaaaactcaaagctcattactcaggaatgaagtatatttttgttttaaagtttgcgatcacacattctagcatacagactataaatgaccaaaaaaaatgaaggtaaatggaattagcaaatattctataaaaactgcagcaagcctgaaagtttattccctcaacttacgtggggttttgaagtcgtcaaaaatgaaagatcaaaatcagtcagtacaatgtgcccatctgcttggagcaaaatgttttctggcttcagatcacggtatataatacctacagcaggaataacacatgcagattagcaatctttgatctcataataagtccaatggcaaatcagtatctttaatgaaatagaaatagatcgccgattgttaacagtaaacattattaatacttggtttcactcaatgaatctgttcaaaagataggagcactaaattatgtaaacacatctatacctaggcaatgaaggtactcgagaccaattacaacctctgcagcataaaacctacagaacggatcaaaataatgttatataataaaagagagagtaggtgagtcgaatgatatagttaacataagatgataaggattcatggcaagaatctcaattatcttatttttatatttctttactcctttaaatgttccttgtgggggtggtggtgagtctgcctcacataactagtcaaaagagaagactgaaaagaatggatatcgaagacttctggtgggtgttcgagaaaaagactactggtagtattctgttacatttctttcttctttttttttttcatacatgtagttcttcaatcctacactacatgtatgtgacaaaattatttactagaaacaatttcattctattgagcctcagaaacagtatatcacaacaactgaactcaacagctgtttgcaaataatcattcacaagttagcaaaagcttcaaacattgcaatccatgcaaacccagcataatttattaagaaaaaagcaactttatcatcattatgggaaaactacatacttggatagtttctacaacagaacataattgtttgtatcaaatttgggggaaggaataatctggctggcagatccaagttcaatcaagtagttcatatttacttgtttgtctgcccatggggtttacatggcagtaaaagcaatgcagtagttccccaaatcagtttccacagttttatttatcataagctagtaaaatagattaaaaaatgtaataatatgtaagatgtaagtacttttgatgacacatctttaggtggccaaacctattacaggaacaaatattatttgtaaaaaaaactatattccatacttgggaaattatgtaagagatacacttcaagaatgaaagaaaaggtaaattttgaaaacatcatgattttcaaatagtggtatgtacgaactgacccagatgcaggaaattggaacaggtaccttgcacattcttccctgaaaattttcatgggttgcctatcaagcactgcaaagagttctcctcccggacaaaagtctgttatgagacaaacatgtgttggcgtctgaaaatagacaacattagtaaagaaccttgtggtttttaaattagctggataatgaaaaactagtatggaagttaatacaaaaactactctctgatgtttgtgaaatgatgaacaccttacagaagccatatttaactgaaactatgagtaattattttatttaactagcaatacaaaatatctgggataaagcattggtcataacaatgtcagtctaacctgaaatgaagtatacaatgttgggagaaatggatgatccaatagtgcgtatatttctctttcaatacaagctcgatgtacctgcaagagagagggagttgaagtaattcttgcaccttatcgtactagcaacagcaggaaaaaggttgatcacatccagcatggatggaaatacaataacaacataacagcatgctcatgttcatgaattaaaattaccttgttgcggttcaacatcactgacttgtccatggccttcattgcaaataattcaccacttccttgtagctcaaccaagtgcacactgaattcaaaaacaaagagatggtatagagatacttaaacagggtggtatagaggcactataacctagacatgcaccatacagaaaagaacaagggagcctaagaaatatactctatccaattagaaaaaacctaacattaatattatactagttgtatccagtcctgctaacttgtagccacataaaagaatatttctggtttgtcctgttaaggccattaaagaatttcaagatcccgtcgaaccacttagtgtcatggtagtgactatttttactaaaaaaacattttaattaatccaaactagacaaaactatgactgacgttaccagttttttatgatgcagtcaaagtaaacattttgtttctgacagcatgctttcagaagatataacaaccatctatcagttagcaaaaagacatcgtatagaagattgttcaggacatcttagtacctgccagtgtcaccacagccgagaggttttacaggcttgaagtgtttcaagccaatcttctcccctaaatttgtagcctgcatgccaaataataataaaaaatttatggtttcatagaatttaatttgggagtttcagttaatatgtttcccattcaattttaggatgcacattatcatatttttaaaaatcagagactattaagagcttagggtgctaccagcgtccagccatttagtacaatccaggggtacacatttgctactttggaacatgtgtgattacagtcattactttgcatggattcatgtactaattcactggaacatgtttatagtcatgcggacagcacgctcaaactaacctgggtgctggttagcgcttttgacggaccatatataatataatgcataaacttttttcttgaatatgcaagagagttgcgtatcatttcattatgaagaagagaaaacggaggaacggggagggacccctctcctcaccaagaccccacaggcctaggccttaacaaactcaaaacctgaaaccgacctcatcccggcagagctagcgacctatctatataatgcataaaatgtctaaagcgtttgcatgttgagcatctttctggatgatctgtacatgtaaacaaaaatcgcaaaaacagaaactacatgatctatcgtgaaactaatattatacagagtgcaaacgtacatatctagttatgagatacacactacacatcctcgttattcacatctagatttactaggtggcaaaacatcgcaaataatgagaccatgtacactttcaataagcttagttatgaactaagttactgcctgaaaatgggtgaaatgcagcatcatacataatatgtgctctcaattacctccatcatgttctacagtagtcctactttcagcataatagtaacaaacatataggcgctggacaacacaccatcatcccttttctgccttgctttctatttaacaaatattaatgcattcttgccaggaaatctggttaaaaaggataacatgagacactattggcgttaacctccaagttcacttactcagctagtcagaggaattcttttgctataagcctagcattatatattatagagtattatctaatttggtacagtttgactcattgctgctgcagtaatagaatttgcgcaccaaacaacaaaattaacgtaccttttctatagctatccaagaagggttattccgtttgtgaggttttggagaaacacgcattgagtgaattgcccacaaatcctctggtctctgagacaaagatagattgtgttatgccccaacataacagagaaaagttaaataaaatacttctctaactacaatattcatataaggtacattaccattttttctcttttataatttagatattagttgtttacagtgtgctgcacaatggccaagtgcaaacagatgcgaggagcaaaccaaaacaatcatttaagtgtgaacgtcagcgtgcatacacacggtttgaagttctatatctctgttgaaaaattttatttagggccacaagccatcgtatcaattttcacattagtcacttataaaatgtttctaaggttgctactaggacctggtggttattgtgctcctgttggtatttcttaaatatttcatcactaagattgaatgaggtttccatttcgccaaataatcttcagttctttatgaagattgatgatggtacaaattatttgtcaccattaaggatttaatccattattgcatagtctagtatgggcccatactatttttcatgtcttgttttgaactgagcaattattgttggttctacattttttttttgggcgcaaagttggttctacattttcacattgctgacaacttccatcaagaactaactactaataaagtgaaacaacaaaaagcagatgtaccttaccaagttggcatcaggaagctccctgactgcatcatccacattctctgctgtagctttgacctaattggacaccgtatgaaaatgaattagcatatttcaaatcttaaagcaatgctacaacctacaagtctgctcggcgtttccaagtttcagtatatgtgaatctgaagcaacaataatatacagggaattattatacaatttactggtatactgaagtatgaaactaagccatccaaaaacacaacatgttatggacctgaaccaactaaacagtatccaactgattgagacgtaaccaaatcaaatgctatccaactgattgacccagtctctagattcatctcatcttattcctaaattaaaatattatacaccaatttatatttgagatcattgaaatggaaattaatacagtaagctggcctaccaatttggcactctgtatctcagtattctccgaaaggcggttcctgaggggttcaacatgatcacttccatcaagttgcacaccaatgaagtattgaagctccccctgcactcacagatgtgcaatcactaccatgtagtaatcatacccactactagttaaaaattgcaagctccaaaatacttgggagtagcattnggcacagatttttcagataccttctggtcgcgcatgggttgaaggtggaacaagttccagaacttcttccctgatcacacaacaatccaaaatcagacaaaatcatcagagcttctacatcatccaacagtactactgtatatcatctaaaatctcaatatctatccagttcaagagagggattcgtgtccagagtttggagcattaccgctcttggtgtagttgattagctggaccgtgatctccttctgctccctgatggcctccctgatcttgtccaccgtgccctggtcggtctccggcccttgaaggaatctgccacaatcagcaagaccgcaactataaattcaaatgcggaggagaggaaacaattaaattcaccaagcaacaaggccatgggaacagaagcacaaacgtcgagagttacatagcacgaccgccgaccagccatggcggcgcgtgcgcgcgacgctagtagcccacaccaccatggggggcacggtcgcggagataaccttctccgccgccggcgcgcgcgacgggaggatgcgaggttagccgcggcaaggaggggtggatgcggcggcggatcgcccgtcgggctaggcttacgcaggccgcggacgacggcgacgacggcggcggcggtgggcaaagccgctccgccgttgcgattgggctgggcttgggcttgggcttgggccttgngatatgagcctagtctgacccaagatcagatgtcacgagtaccgtgtttagtaggtcacaagtccaatttctgtcacatgttgcctgcctttgtagtggtgatttttagttgcactgtctaacttcagtcactatactactataaatattttttaaaccctttttgttttttatttaggcgataagtttagaaatgctatagaattttcttaaatttcacaaaagagaaaaataacatttttcacgaaaggtaatatgcttttttttaatcagcacaatctctagggtggaactttctagagtattttttatctagagaattatgctatcgtatttatcagggttatggataccacatacctaatagtagttgattaaatctcggcaggacccaccacataccatgtcttatacggaaataatcttcgaatatagaaggagttccgcataaggaaggatgaatagagttctacatggaaacgacaaggactactcgggttgtatccatattggttttcctagttctacatggacaaggggacacctattggtataaatacaagaccccctaggaagagaggggagacaatcaacatacacggaacaacagaagccacaacatacaagccaacatacgccaagacaaacgccagatatcgacaacagagatatacctggatcgaccctatccggttcctacagaggccgactgtagggatctagcgttgtctctgatctcgccggacacgaactcgaggaggaagactgccttgttgtcgactacgagtcagaccttcagaccgccatatcgacaacagttagataggctaccccaaatattgtattggtgtgattatgatgaataagagcaataccggcttcggccaacaggatgtagggttattacgtgacagcccgaacctgtataaaaatccctgtctccatctcttttacttcagtttcacgtataccctagtaccaacgatccccatactatgcaaataccggaatcgcgacatcaaacatcgacagtactgtaaaagagttttggcaccgcttaaacttttgaattatccataatcctcacgttaagatatctataataaaaaacatatgccatactccctccgtcccctatataaggtattgtgatattttacttatactgtttgaccattcatcttatttaaaaaaaattgaaattattatttattttatttttgacttactttattatccaaagtattttaagcataactttttgtttttatatttgcacaaattttttaaataagacgagtggtcaaacagtgtaagtaaaatgtcaaaatctcttatattaggggacagagaaagtatataacattaagtttatctactcatgcttaaaaaaatgcatatttatgaaaaccaatttacaccatcaaccaaacataggcggacgaacatcaagttttttctttatcctaaccacgacaattaggttgtgtgtgtttggctcaaagggatgggaattatccttcacacacacaatacacaacgactcattatcatatgatttattaaatattaactaaaattttgaaaaataattaatataattttttaaaccacttttctatagatatttttttttaaaaaatatacagtagtttgaggagcatttgcgtgaaaaacgagagaatagagtacaccaaagaaacacaaccttacaaattacataaaccaactcataggcaggcatgtaaatatattataaatatagatatggattctaatccctcgagacaacactttgcctctattcgagaacccaacagaggggagataaagtttcgggtattcgtggcacgcttcttaaactgttaaaatgtgcgattcgtgcgaaaattttctatatgaaagttattctaaaatatcagattaatttattttcctaagtttgtaataattaaaattcaattaactacaagttattatcacctcgttttacgtacaacactagttgattcacttgacaaacaataaaaagatgtgagcaagggggttttgaactcccgacctgcaattccttcccaggatctcttcccgcgtgtactccgtcagctccaggaagctatccgacgcgaagatctgcacaacccccccacaccacacccattctgtcagtcaccaccagcacacgcaaacacgccggcgaccggcgagaagaagagaccggcggcggcgaagtggctgcttacgatggggttgtccgggatcctggggtcggtgatgacgaagttcttctcgatgcgctccagcgtggtggccaggtcgatcccctgccggatgtccttctcccgctccgcccgctcccagctgtccgtcctctccaccacctccggcgccggcggtggcgccggcgccggctcctccaccaccgccggcgcctccctgctccccaccgagctcctcttcccgatcttgaacctgccaaagcatggacagacacaactctcagtgtcactgccgtcccggcaatctgtcgaacaggtggggtgcgagagtctgaccccatgagggaggagcggccggacttgcggccgctggcgagccggctcaggcgggactcctccttcttcaggtcccagagcggcgacttgaaggacccggctcctcctcctccgcccgagggagtgccgggtgccacgaccggcgacatggcggccatcttgtccgcgtcgctcatcttgggcggcgtcagcagcgccgcgtcggccggcgcgcgcgccccgcgcggctgcttcaccgtctgcaccacctccgtcatcgacgacatcgccttgtccttctgcctctctgcgctccacacacgccaatggcggcattggtaagacaagagaattagagaaacatcgaggaaacagaggattccgcggcggcggcggcggtgctcaccgtcgtagcggatgagcgacaccggcaactcgttcggccgcatccgcttgtcgctgagcccctccgtgtacttgctcacctccacctgcatcctgttcgctcatacccgaatcagaatcgcagcccagaactcgaatgcaaagctcatctcatctcatcaatggcgacgaacgactagtgcttcgcttacttacccgatgaacttgatgaccttgccgttgtcgtcgcggatgggggtgacggtgaggaggttccagaacggggcgccgtccttgcggtagttgagcaggcggccgcagaagctgcggccgtgcttgacggcgtcgcggatcttggccacctcggcggcgtcggtgtcggggccctggaggaagcggcagttgcggccgaccacctccctgggggagtagccggtcatggtgaagaacccctcgctggcgtagatgatggggcagtccgggcgcgtcgcgtcggacaccacgaacgtctgctgcaggctcgacagcgcgtccttgagctcctgcgacacccgcggcagggagtcgtgcgacgcgcgcccgacgccgccgtccaccgacgacttgccgctccccgtgccgccgctgtcgcgccccgccgtcgccggcgccaccggacgccacgcctgctgctggtgggcgccgctgcttccgctaggcgcatcctcggcgacgatctccaagccggcggtggcgccgccgccgccggaggtggggaacgccatccacttctccaccgcgtcgactatctccttcgagctgctgctgcccgccatggatgccgatgagattgtcctcggctatttatcagcgaaggtgtagcaatcttggccgtgcaaccatcgattcttgctgcaaacaacaccaaaaaaataataataatcagaaaattcatacattacactcacatccacccaaaaaggaacaaattaatcatcacaaaaccatgcaaccaacccttgctccaacaaatctaggacaccacgagaaaggcaaagatacctaaacagaaggattcttttgcttatctagggagtactataaaaaaaacccatccatttttttcactgttcaagttcagaaatgtaaagaacagcaacctgacagaagaatggtacaccaatcaaaacacccctctctctctctctctctctctctctcttcactgttccattaccctatccacttccttatctgggctactggtctaccacttcttccaactcaacgagaagccacataaaaagggaagtaagacgagagagagacaaattaatcagcaacctctcttcaggcagcgagcgagtgatcgatcgattcagattcaggcagcagacagcagagtactcaggtcactagctaggctgataggcttggatcgataccaatccaatcagtcaggtggcgccggggagacgagggaagaggaagaggaagaggaggaagcaagtaggcgacagaaagaatggcgggcgtagcagcagcggcggcaggtgaggataatgcaatccgcgagcccgtgagcgatcgagcgactcacggtcgtctcgccgggattctgtggccgcggcgcggccacctcgccccccggccggtgacggcatctccgcggccctcccccagaaattattgctcgggtggtggtggtggtggtggtgagaggggtgtgacggcgacgggcggcgacgacgatctttttggggcgggcctgcggccacgcgggtgagcacgacggtagctccgacggattgagatactctacattaaagcccatgtttagttttcacgcaaaaaattttcaccccgtcatatcgaatattttgacacatatatggagtattaaatatagaaaaaaaaactaattacacaaattaggtgtaattcttttaagcctaattacaccttgatttgataatgtggttatgtggtgctacagtaaacatttgctaataacatattaattagatttaataaattcgtctcgcagtttacaggcggaatctgtaatttattttatcattagactacatttaataattcaaatatatatccgtgtatctgatgtgacacgctaaatcttttcacccctaaactaaacaaggcctaaatcagataattttaagtcattaatatgtggagctcatagtaaagaggtcccacatataagtagctcaaagtcatgtagtaactcaatccggctccgactgcctgatcgaggtgggcggtgaagagaggggttaaccgaaatcaacgcggcgcaggtgtgggagaagatgactggagatgacgtagtacgggacgacagagagcaatcggtggtcctccgtaccgtcgctggatgaatgaaagctgcacacgttggtgtagtttttcttcttttctttttttttttatcgcaacttgctggtacaagttcgatctccaggacaaactgtatcatacaaatttcattaccgattggagtcaaaatgtcaaacaaacactcacttgggtctaacgagtgtaaactggaacaagcacaactttagaaaaaaaggccaaccactaacggctagcgcaaattatttttttagcggaaaacaattttcgttggtggtagtgtaaagagacccattagctaaaatatttttgagtaaaataatccactacttccgaggcccgccagatgcctatctgggatgcccaattgaaataacactgtccggcccaattgtgcaactgggatgcccatctttagatgtgggattcgaacttaagatctctcactgcaatcctcacgcacgttaccatcccacctactacacacatctgatttggatatatatgcttcttttttaaactaaccctggaagcatctttagtccgtgttggtaacaccaaacatgactaaaaatatctttagtccgggttggtgttaccatccaggactaaagatcaatgtttagtccgagttggtattactaaccgggactaaagatccctcatctttagtccaggttagtaatagcaaccggaactaaagtgatgatctttaatccaggttgttaacactaatcaggactaaagatcgttaggggcctgacacggtctgatagctattgaactgtggctaaaaatgatctttagttccggttgggggcctgacatggcctgataactattgaaccgtggctaaaaatgatcttcagttaccaaccggggctaaaaaccataaaagtgccgttgggcttttgaaccggggctaaagatattctttagtcccgattcctattcgaaccggggcaaatatgatttttgccatccaagcaaagatcagttctctagtaatgtgtcactgaggccacttgatttggatcgagctgcctcgtcccctacgtcattgccacaatcgagccctaccacagtccccattccgccaccctgccctttgccaccaccggtcgctggccgccaccaccacccttctcatcaaatcgagtgaaggagatcaggtgagggaggtatggattgagaggagaggtgtgagagttgaggattaaaagagggaggggaaaagagacttcatgatttggtttggaagcatctttttatgccttttacgagtttttaggtagtgttccttagaccccacttggaaaaatcgatttttataagtgaggtcttaagagaaccgcacccccaccaataaaaatctattttttctgaaggggctaggatttcagggcctctcgttatttttacaagcatgactttttagtcctccggtgaaaataaaacccaagtgtcctgaaaaatcatcttttagtagtgtaaaacacgtacatagaccgaacttgattacgaacaagctgaggtattacactccccatcctccttgcccccaaccccttcacaggccgatgcccttagtagcatatcactaatcggcatacgactacccaatatctcccatcggtgctacggtactatgtgtgttccctccatgtggccaacacatacacacaccatacccgtgcaacgaagcaactacctaggatatccccttggttctacagtgatgcattgtgtcccctccacaggccaacatgtacgcacacccatgtagcttcagttgaagctctggtaccaactataataccctcgcctccaataatcgtattaggtgagctccacatgttgagtgggctcatattcggaggtactatggttggagtgacatgggtgtataagctagccttaacctatttaaactttcaatgcgagactattctcaccaaacgaacagttgggactaagggcatccacaatgtgacgcaaaagtagtccatagggaatataatatttcattcagccacctattaacattgtgcaactagtccatataaagaaaataacaaaaggtacctatatgcatatggactacccatatggaataaataatattatctatctctatttctctctcatcttctaatgctatcttgtatccacatacattgtggagattgctatattaaagtctatttgtgtgggtcccatctatatggatcactttagctatatacattggtgatgccctaatgggtctaaaattggaactagaatacgcacataggccaaacctgattgtggaagtgctagggtattactgctactttgttgtataatcgtgtacgttggctagaccgttggatgtcttgatatttgttctcgcaatcccaacttatcgtgtgctttattcctatctgcaatttaattagatcacttttatatatcattcttgattgttctttgactgttggcaagtaggcaataataaggttaatttctgtctgcaagattaacaactttatgaatagatatatcgattgctacagtgcaacacaacatcttgtttgcttgttattgaattgttaacattttcttcacaaaattatagttatctctcctcatcagaagatcaagccaccataagttacataactcacctctcttcctcgtctccgatctattgtctttgcccccacctcctaaccacatagacaaatttctcctatgtgagcaacgttgacaaaccaaccttctcttctcccatggctgagccggggccataaccacctcacagtgacctaccgtggtcacctcctattgcagggatttcaagccatacagcttcaccctaccccaaaccctcttcccgcctctgctcttaaccctgctgaactaattcagcatgctttttggagtaagtcattgccaatgtcgcatcaccactagaggaaatcatgcatcgttgctagaagaagccgcaggtgagttctaccatcagtatcccgcttctccctctcccatggctagaggttgaaaatggcaccttgaccgtcagggagcaaagtcgatagcaaaaattgatctaataattaccctttttccttcgaaagagaagttaatgattagtttttaatgaatgaaaagagaagttcatgattagttttgaatgaattgattctagttttgtagataccatattgttgtacacttgaaagatgtggtaccagtcgttgtacatgatggacttgtttttgggagatcttgcgatcagactcttgtatggaccattcgtttagtgtaactaaacgacacataagatagatacagtgggggtacaatgttcaaagaaagccgtgtatcttggagctgtgctcactgtcaagccttaatttgtatactagaaaacagttgtaaatttgagaatatctcctttcagactttgccacagatagagaacttgtcgggggaatgatttcccttgttaatgcatggacagcccaacataatgacctaattagctagagccaaatcgagaatgaacaaatctataatctagagtctagataagcataaaagcatatacatgtggtcctatgaaaaatataaaacatcgcatgctaaaacttgcaatttcgtattgttgtgcaaatcaaattaaatttagatgattgatagaaaaattaggggactggaaagtataaacaaagtgatctcattgcaaactttgaattattttttattacctttattgatggtgagtatggaaaattttttgcaagaattttacttgaaataaattgttttcactacaatttttgtgaaatttctcgcgttttaaaggaatcataattattatattattcctcagggtaattaactttaatgataagtttttatgaaattattgattttaagtctgcatttttttaatcatgtgaaatatggacacctatgattgcaacgatgatatggacatgctttttggcagttttgtcactacagagtctttttgcagaccattcgttaaatactaattattatggcacttagaacagacacaatggagagcactgttcagcgacagcggcttatattggactggagcactactccttgagcattggtctcgtgctagtttgcatgcctcaagaatttgaaaattatctcctttaaatcggttcctgattcccctaaaaaaaaatcgcactacaagaaaaatactctgtatagacatttttctagtactgtagaggcacttatcaaatgcctttacaacaatgtagaggcattttaaaaaatgtctaataagtgtcttatggtgaattgtctctacaaacgaagagacattttataaaatgtctataatatggtagaggcattttttagagacactaaattgtaccgcaaacatataaaaccagtccaaaaaagagaataaaatagtttccttgcttttgataagtcttgaactcatgatcttttggttaaatcattttattcttcgatacactaaccaactcaactccatgtcattacttgtatacttgttcctttaattacttatatttagtcgtttagtacacattatcattctaaaaagtgtctctatatagtttaaaatgtctcaacaaaatgcctttacatattagacgcattttatagtgccgaaagaatgcctctacaagataaaatctaacaaactgatataaaaatgtctctagagtaaaagttttctaggcaatttttaaagtgtctctataaagtgtctctacactataaaacttctgattgtagaagcaatttacaaaatgcctctacaaaagtgcctctatacgaggtttttgttgtagtgtaaaagtgcctctatacgaggtttttgttgtagtgtcggttcctgactgataaattgttggacaatagttttcttggccgacctgttcatgacaaacctgctccaaaaaaaaacattatttcaatgaaaatagaaaaatgtattgggtttcaaaaaatatggcaaaactatatagcgccatgttgtccatttggtattgaaagtccatattttcaagttgaaagtcagacattccgtgttgaaagtcgaactacctgagcatcaattttggtgatttgtgcaagtttatgattttgaagaaattgcaagacaggtttgatcagttgaatatttccatgagtgtatataagaattctcagaagtttcaaaatggtcttgggatgtcctaagcttaccattaattatcgacatcattgaagagataatgcgatgtagaaagatgtctgattcttgaaacagtaggttcttttgtctgaagaccatgacaaactgaattaacacctagaaatccaattactacatcatctagcattggatacgaaggtacgttactcagaagattgagtggatccaccacgatggtaattgatgaaacctacgtagacaatgcttatccaaatgagtgccttccatgaattctgatcctttgcaaaataggtcctccaacggtaaaactagatttggattcttagcaaaaattagttccacatcgttgtagttcgcggcttttgctgtatatatatcgacaaagaaaatcgctataaaattatttttttaacatgatataaatgcatgtgtttatataaacgcgcgcgcactcaccctataaataattagccgtgaatgcgagcacccataccaagtttagaatttgaacctaggtggttaggttctagcacaagaaacctaactaatttagctacgctcatttcacaaatcacgatacactttaagactattattaggcgatattaccaaatacattatatgtagcatgttgacatagtcttcatctgacatggcgcttacgtggaatcacatacagaaaaaaactaaataagacctacatatcattgacaattttttttaaaaaaatctatggcccatatgtcaaccatagtgtgaggcccatatgtcatcttctctctccctcgcttcttcctcctccctatctgtgtcttcctcctattccatcttccccctttcttgcgtttgactggctggctctctcccatccccacttctccacagtaacgaggatgcattggcaacctcgacctcttcgggccatcagtgagctcgggtgctccaaattctgtggctcttggctaagagacagaggcagacgatggaggtagggaggcagtggccaacgaaacctagacgcctctgtcactaacttcttcctttgagctccgtgactcttagcgtatagatcgaggcagacgcagagaaagggaggtagtagccggtgaaccccatcgatccccctctatcgttgaccttcgcctttgcctatactccgtaccgaagcggcatccaccgggggatgacacttcatatgatgcactccccgtcttgacgctcctctggctccccaccgctactctcataggttgtgagccaatgggcaaggagcagcacgacgcgacggccatcggtaggggagatgaaagcagtatgatgcgttgtggtgtggagaagcttacggttgtttggcagcgggggtgcatatctggttagcgtggttaaggtcatgggcaatgtggcggagctccgtcatcggcgtgccctggacctcttcttcccctcccgcggccaagttctctctccctaccaccttgactctgctgtcctaggtgccttcttccagccgctccccaccgtcgctctctccctacagctgcctggctcgactcgtcgctcatcttgagaaaagagcaccggtagagattgacggagcgtggggctcctcaccggaagaccgcgcaggtccccctttgccggttcggccgggggcgctaagtgaggttcttcaccctcgatctgtggaatgttcgcgagagagccaatgcacaagacacgggcgatgtagacaggttcgggccgctgagaagcataataccctactcctgtgttatggtggatctgtgtgtgaaggagttacagagagctggagagcaaaagagttcaggctctagaacccctcttcctctttctctcctctacgagctcaggtattctcagagtcgtccctcctattcttgttctggatctcgatcctcttcttcggtgggcaaggtcctccttttatatctcaaggggataccacatgcaccacttctacctacccttcttttgggtggggatccaccctatcttaaccataacttggctcgcgcctttgcttggaagctaaatcacagcttgtccttgagtgaggcccagcgccgtcactcgcctgacacaggggatcaccctgtcattcctccattaatgggcggagatttgcaatggccgctgtccgaatgaccctccgatgggatgggtcatacctacctccagttcgccggaagcagatgcaacgtgggagcacggtttgtctgctgatgacgtgaccagcgtcagaccagtcacagaccggtcattcttgtccaccacgtgtcagtttagcatgccgcacgtctgtccttcttcatacaatgacttccttgcaatggttgcgatgaagcctggaatgtatctggccgggactggcgtgctaactccaggagttagcacgccggctccggctagggacgagtgcctggaggctctcatcattccgacgggacggggcgaggcgtgtgacaggccgcctgctgccacctaacccgcgatccgaccggtctgtgaccggtcacggaccggataagcgagcgcgctgcgctgcattaaatgcggcgtggcgcgctcgtccaacccgtaataaatgcggttaggtgagcgccgctgtgctcacctaacccgcacacgtggcgctaacaccacagggggtcggggcgccccagccctcggggccgaaacgggagcggcccgacccctcggggagacagagggaggggtggccacgtcaccctcgggcccgacccccccccccccgagggggtcaggccacgtgggtgagcgcggctgcccaagcctctagtcacgatactcccggtcccatgtcaccgacagagatgaaaaaaaagaagggtaatgatatcccactgaaatgtgggtccattgtattttttctttttatttttatttttggtgccacgtgtcctacactcaatcggtttgaccagggtcaaacatgccacatcagtgaaaccactataaatactgccgtgggagttattttgcatagtttcagtaataggaggcggttgtggggtaggaatcatatttgacctacagttgggggagttaagttagactttttacaagttaaatcacaagcccatcacaagctcatcatggttcccacgtgataggccttaggtgtagctcggtccggtggtcaagaattggcccattacatatatcccttctccttttattgtttttctttcactaattaaggcggtgaggtcgggctggtttattatgatgcggagagataatgtggtcatggttaattggagtacccccaaagtgaacggagagacgcaacaaaagaaaagggtgttagggtacatcgagatcttccgatttcgatagtaaatttatctttacttctttaggtttgttttgtggacgctccttacctactgaacaccgatgacagttactgtcaatgattttcatttctggtgagagatattcagtcgtgatagttggacttgtagtcgatattttgaatttgttgctgaatactcacatgtgtttttacaggaagcgcggtgaacaagttcaaaattagcttctactacaagggtgcacatgactggaaaagtgttttcattatctgaaacgacgttctctggtttctttgatgtcatctaaatagttataaaaaaataaaaaaaaatcatgtcatctaaatagttattattatcttttaaaatatcaagataaattaatatgagatatatcatttgacttctaaaagttataaaaaaataacaaatatgattaggaatgtctagtttcagtttaatattttctttttaatgcaacttgtagtcgaattttaccttgcattttgtgaagtgatatacctcatattaatataacttgtcaaaaaaaatttcaaaactttttcataactatttatgtggcagataaaaatcaagcagatgtctactcaagatatgaaaatacatcaccatgatgattgggaagatgattcaactatattccatcaatttaactatttctcaatattaggtatcgcaattatccaaatattatttttatatttaccttttttcccttacaaagaggtggttactcaacaatttaccacttttgcccacgtggtataccaccatggcaacccaaggtagaaaatagcgtgggacccataaatggcaacgacgagcacctcgataccaaggtcgtggtccctttgggctcatcacctagtggacggagcaatgatgcgaatggagggcgtcatccgcggcaacgtggacggaggaggcagcggcccgactgttgtggcaggcatgggcgccacggcggttctacttggcctgtgcgaggttggcgtcatggacagagagcgggaggcatcatgcacctctagtagcaccaggaccccacctcgcccgcacacaccaccgtcctcgccacactcctccgcacccacagtctcgatgacttcttcgtgcttcaccgatctcacatcatatcggactccccgatgccgcattcaccacctccacctcatctcgcgttcctggactggcatggcaatgggaggtcttttgtttagttcgatggtgtaatagcgctggcaacaacgtggtagcatggcttctatggtatcatggtggcacgacgctttgtgtgagtggtgcaccatgcaatgaggggttcgactagggaggcttggatggcctcagagagttggagctgaaaggcgagccgacgataaaggagatgactgaggaggatggtagggctagaactttatgcaaaagttgacagtcaaatttggtacttaaggattgtcaacaagatcatatcattttaaatgtatatacttccacatatgtattgtatgcaatattgttttaaattattgactgcacacattcattctagtaaaaataggacagttaggtatcaacaaaatgtgctacaacttgcaaaatgatgtgaataaaaattttcacctacactctttgtctaaaaaacctaatcctatctatattcaaaccaaggattgaattctctttggatagaggaaatatatttatagtattttatagtactttaaaaatagagtagcggtggactggtgacggtggttctacgtaccgccccactaccaactgcctacttctttttgaaaaaaaatgaataggtagggctatagggcccatatatcaactatcccacagactatctaccttttataagaacaaaaaaaagataatgtaggccaaattgtctacatatcagtaataaatatatataaaatgattaggagataatatataaagaaaatgatgataataacgcatttgataattttctttagttaaaatcttgttgcaacgcacggacaatatgctcgtatttgtagaaatcttgtgaaccctattgaaaggaagacagccagacagggccgtgctattgcagggttccaaaacctcgtacaatacaaacaatcagcactcagttgcaactttttatatgaattgtgttagtgaaggccaatactgggattgccctttcacacaaagtagttcagagatcgatgaatcgactattctaatttaacatgaaccaacttgcaactgagctcatgcatcaacatttacattttgtcttgcaactaattaaatttaactaatcaagccatcgactcgcgcacacgagcccatctcacgcgcgcacagatttgctgccgccagtttcttccccctcgtcgccgtcattgccgcctcgtggcgcacggttccgccttcgccatcaccagagagaaactcggtgatagctgcgggagaaagaggaagaagaggagaggagcgaggaagaaggggagaggagcgaagaagaagcaacgactgacatgtgagacctcagtgtcatagagttaaaatagggtgggtagatggtgaggctgttggagcgagtaactagtttgactagccaaatcagatggaaagttagctatgtgggtgtttggagagtccgatttagatatgctgttgaagatgctcttaatctttgtcaattgggtcaattaacatgcatgccagaaagaaattaaacctaaggtttttttttgttttattcgtcctaatgagccgacctaaaactttaccaaaatgaggaggtgaagtactaaccacattggggagaacaaacttttcgtaaagggcaaagaaaaataatgattcgtgaataatcccaggtcatatgagatctctctttttttccactcatctcctaaaagacaccgtgcaatcgtgcatgctacgaaaaagatctaaaagctagataacactttgctgcatgtataatccactatatagcaagaaataattgatgtgtggctctctgctctcttggaacaaaagacgaactcactaacaccataacattggcacaaaaagatactatactacctccatttgaggttataagatttttttaacattgtccatattcatatagatattaataaatctagacacacatatatgtctagattcattaacatatatatgaatgtgggcagtgctagaaagtcttataatataaaatggatgaaatggaggaagtatatatatattaatcgatcttgaaacttttgttttgcgaatctatagtgcaactacatctggaaatcttcaatggattcctgagctagaaggatttaataattacacaccaagcaccacttggattattgattgaattagcttttgaataatatgccttttcttcgattttgatgcaagagcaatacgaggttgatctgacacattgtccatgaaagcacaccatacaccaaataaaagatagagtaaatttaataaatcctaagttttgaggcatcggtaaagtaaaatcaaaatctgaggtattaccatttgtttcataaaactctaggttttggagtaaaatgtttaaaaaaagcatttgtttcatgaaactctagattttggagtaaaatattttaaaaaagcatttgtttcatgatcgaaactctaggttttggagagtaatatgtttcaaaaaaccataggtacaaacttatattgttccttcggctaatatatttatccatagtaactgtaaaaaaaaaggcatgagatatttttcagcacatatgcacattacttgtattttcaataaatgttggttgtcgacagttcgatcatttctatgtatattaacccgttaatgtgtcattattagtggggtattgtattgaatatatttgcaatagggaaatgaggatgtgaagaaaaaagtaaagtagatgagagcgatgtgtatttagtatactatgagagcgatgtgtatttagtctactatgtgtatttagtctctcgcaccgccgcccgtgagagaaagaggggaagagagagcaaagggcgccgccgtctccatcatccccacctccaccaccgccgcccaccgaccatccgcccccgcgcatcgccgctacacgccagccgcgcgggccgccgctcgcagcacacgcctccgcgtccgcccccgcgcacccgcgccgccagtccgcccccgcgcaccgccgctagccgccagccgcgcccgccgccgccgcctcggcgctgaggccggcgcctccagccgctgcccgtgatagaaagaggaagagtgagaagagtgaggagagtgagagagagaagagagagagaagagcgtatgacatgtaggccccacattttttatatagaatgctgactggactgccacgcgtacgccacgtagaccaaaaccaccgtggattgggtcgaggggggtaattcgtccagtttgtatagttcggggtgaaaaatgtccggttttgtggtttaggggggtaattcagatgaccgcgatagttcgggggttaattcgtactttttcccatatataatgatgaaatacatgcattttacataaatatggagtttctttaaacgttttacccccaaacatagggttacatgaaaaaaaatggcaattcacagggattacaatacggataccctaattaaaactgggattttataaaatttactcataaaagtaaaaataagcttgtacatgtgcgccctttttagtgtgggaatgctgcgtttaggccttgttcggtttggagggcattgaagatgattgaaggagattgaaggggaataattctacaccataatagttgtgaataaatctcctccattccctctctcattgggattaaacgaatgatgccttaattgggcacacacaccatcatacgcagcatagcaaacatatacacatatagatgttctcgatgtaaccacgcttacaaaggcctggtttagttcaccaaaaaatttccaaaaaacatcccattgaatctttatatacatgcatagagcattaaatatagatgtaaaaaaactaattgcatagttaggggggaaatcacgagatgaatattttgagtctaattagtccatgattagccataagtgctacagtaacccacatgtactaatgacggattaactaggctcaaaagattcgtctcgcggtttctagacgagttatgaatttagttttttcattcatgtccgaaaacccttccgacatccggtcaaacatccgatgtgataccaaaaaatttcttttcgcgaactaaacatgcccaaattatcaaaggaaccaaagatcctcctagatcaggcgtgtgtcagacgtgcccatgcactaaatgacatacaacatacatgtatatatgtgtactcttaactttgaaattattatatatgtaaacatgagatagagtgtcaagtttaggacaatctatataaatactatagagaagggaagtactgcaactagctagtgatcatagaaagccgtcatggttgatctcatcacatggagtagcacatgcttatacaggttgtagcatctgcgccgagatgtgtatcatgtgagcttaattagctcttgaggctttgcaaaatcaagtatataaaacccatttttttaagtgacagtgcaaaagcaccacatgcatcgatcatatacacacaccagtttaattatcttggtctaggcaatgcatgtgtgagcttgataagatgttgggcgtatatatgtacagatatgatatcctggaatttagaaaaacaatggatgggaaaagagaagataaatggtgttgccggctaagcggctaattaagccacaatatgtacctagcctagagaaggaatggagaattatcagcaagaacatatacatagtgtgtcaacacaaaggagggagaagatatatatatgtgctgtaatgaaaatagatgcacaacggagacacgaattttacgtaaaaacccttgcgggaaaaaaaccacgggcaccaaccgacaatgatcagtatagaggagttggatacaaacgcaggggatacattgggctatcgcaccctactcatgcgactttcaagggatatataaaggagaaatatatgagtcctaatgggaaaatacttaagagtcatattaggaaactaatcctaatagtcaagttctattatgaaacttatccgaatatattgcaggccaaaaattcgaatcacatatttaacatgcacacatgtgtacatatatacagtatctgcagtttaatttgtgtatagagctgtaaacatacatgtggcgattgttttttccctaaaaacagaaaagaaaggaacaatacatcaacattaataaatgcatgtaactttaatgtatattcaacaaagattatgtaaattatatctcttaaaacaatatatagtggcaaacaaaacaatagctacacagaagttatgtttggcaagcaactagaaatgtttagcttgagaaaccaacatggtaaaccttacattcgaaaaatttatttatatgactaatcgcctttcataaagattcatatatcatataacacaatatccctgcacacgcatggttcctaataaagtgtaataccccttgaaatatagaatggattcaaatcacatgcatatatactatgctagctctgttctcaaaaggatggcgtcctgaaatgctgtgtcagtccatcatttcgtctacaactaattataagccataatgctcattagcaacaaaaaaaattatagtaaaacttttacatatgtgttcttgacgacttaaaagtcaatattgaaaataaactgtgttgaataaacattaaaatcaattctaaaattaagttttaaaatatttaaattttggttgcagcaaagctgaagagcaaaccatggagctaacaaacacatgtataattgactggttgccaatttacattttccgcctcctaataagctagcatttaatattgtagcacccacagatagtcatccggaaagcagtaaaccagaaaccagacacattttgtgggatggtggcaaaatgtgtataaaaccaacgggaagcacatagctagcacacgaatttaggtacctataacctgccctcctcatatcatgtcatatgcgagataccaccaaatagaaaaataaaatgtgtatttacatttctcgcttactaagctagcatattattaagagaaaattgtgtgcccctgagtttttactcatccctttcatgccctttagtttttgttttcaatcacctttatagccattccttagactacatataacagtcaacttaaaaagcctaagtcttgtgttgaaagcaatttcaactcaaaaattaacatcgaaagggatagaattatttgacacccaaattaatttgaaaacaaaaattcaaattttgaaattaattctagttatgtttgatgaagttttcaatgataatttcacttgtatctcttcatagaaatttgttcaaatttgtttgaagttgattttaaattaaaatacaaattttagtttaagatagaaacagtgatgatatgtgtcattttcccttttgtaatttcatcaaattttattgcaattcatttaaaaaatttaaattttattgttcaaattcggggtcactcaactttctccctttaagttttataactaaagattttcttctagatatattatgttcttatctatgagtgagagacaatataatcattagaaaagctcaattgagatgaactaacaaaatgagtatatacagaaaagctcaaaagaaaacttagggctatgtaagggataagacaaaactcaaaagcatggaagagatagagcgagaactgcaaaggaaagacaaagatttttctctatttaataatagagcgcacacagtttatcattcggaaagcagtaaaccggaaaccagccacactttgcgggatggtggcgaaacgtgtcctaaaccaataggagggacatcaccagcacacaaattaaggtatctataacctgccctcctcgtaccatatcatatgcgagataccgccaaatagctttagataatagaatagcttaataaaacaatgtacttgttgcagaagtcgaggaaaataatactgttggttctcacattatagtaatgctctctctacttaatttatcaagtgtgctgtcagggatgacaacaccatggcaccatcagtcatcaggacagcccaccacctttgcaaatagagagaaaacggtacaatgacaggtataaacaaagaacggatagcttgccgatgttaccatttagacttctggccaactaaattatacttcactaattaagctctaataagaagccctggctgcttaaaccagcagcagctaccttagacatctattttggagcaatagatccgccatacatatattaattatctactcgatctctccattagtctccagctatacgcatcttccctagcttgctaagctagctagtcttctccttcctttctcctcttcctcctcctcctcttcttctcaatcttgctcagcaaatcttgtcggggagagagagagagagatcagcaaggagaagagggaattaagctagatcgaggtagtcgtcgatcgatcgattgaagatggggagagggaagattgccatcaagaggatcgacaacacgatgaaccggcaggtgaccttctcgaagcggcgcggcgggctgatgaagaaggcccgggagctggccatcctctgcgacgccgacgtcggcctcattgtcttctcctgcaccggccgcctctacgacttctccagctcaaggttggtgattatcatcgtcgatccccttctatagttctatatgtatatagctgctacctgctaggtcatgaaatatatcccaatccttcagatttttgtctatatatctcgatgtgtccagctatctagcttttgctttactctagcttagggttttctttgattctttggatgatcttaaggtgaaagacttctgttttttttagaaaaaaataaagaaaatcgatgcatccatttagatcactccttctcccatctaaataatctctatacactattaatttgatgaattgtgtatgcatatattgactctttctgtttagtctggagcattattcctgaaagagaaggagatgcgcagtaggagctggtatgcaaggggctgccagaatgtgagaatatatttctagaaatggtgtatacgatttttctaagttaaataactcacaagttatctctagatatatatttattttgatttgtatattaatttacctcgtttcttagctgaaaatttaggttaatttcccctagatgcataaaacatttgctatatattggatcgtaatggtatagtcttcctttttgttagcatgaaatcaataatagagcggtaccaggaggcaggagaggagcattgtcggttgctgaacccaatgtcagaggctaaggtatgcattctaatataatggtagcaaatttgaggtaaattaaaaattcatttcttgaggtcatctggttttgcatacagctacaaaagttgttgactaaattgccgcactttgtcgtcataaactccattttcccaattcttaactaaaattcctatatattccaatgtcattatttgcaattatcctgacatttctacttatgtattggcagttttggcagcgggaggttacaactttgaggcagcaagtgcaaaacttacaccacaacaacaggtaaaatcaagtccaatgtcaatgatatattacacatacaaccatagctaattacacacctcttctcaagttttttttttacccaaatcttagcataaccagatgaactcaagaaatgaagtcccccgcctgggaaaatgctttctctagtagtgatgttgacctcactttctctctaaattagtttttacttgtctgcaaactatttaaacgaaaacagtgcatactactttattaggatcaaccaatatgaaggtgaaaatgaaatcttttttaaggcccatgtggaaattcatgtttcaaataaaaggtgaaaataccttttaatgcatgattaattctacgtgctatcaattctagtcacattcttatatgacgtacactgataggcaacttttgggagaggaaatctccaacttcacagttagagatctgcagcttctccagaaccaagttgagatgagcctacattccataagaaataaaaaggtataatattgataatacccttttctcgactaataaataaataatcttttcctaattaaatggcgatatatctattgtctctttactaggatcaacttttggcagaggagattctaaaactcaatgaaaaggttgtacttgcatcttcttcttcttgatgaaatagctcatgatttaattggtatcagttcttacatctatacactgttcatgattgaggtaaaattacacgaatatatatcgctctatacttttaattgtaggggtctcttgttcaaaaggagaacagtgaacttcgcaagaagttcaacattgctcatcaacgcaacatagaattacacaagaaggtaaagtttctattcgatctactcgaaacatacaaaaatgtcgtagaatattattgatatataaatatacaatttacatcatcttgattaattaatttcagcttaactctggagaaagcacgtcaagtgagcaagttaccagaagctcaaaggatcccggagaatcgagtacaccccgtgattcacgtgtgtgtattgaccttgaattgagtcaaaaagaagttgaagatgaataacacatgatcaagtgttaaaaacagtgagttttcaaatctttaattacgtaaaccgtaaaacctcgctcttgtaactaatatatatttcttcaatgtttaatcaaagttgtcagagttccttaccttttgctagtatcacaaaacaagtagctatttgtttgtgatactagctagtaatttgtgttaagctagctagtaacttgtgttaaactagctatataaattaagtcacaaaatacccataaattaagctagctagcccttcaaattttgttgtttttctctgattagttaatactatggtttctagctagctagctagctagcccttcaaattaagcactgtacagaacttgttaattttctactcatctttactagtataaattatgccactaattaagttcctagagttacttttcatgttcagaagttgcatgcatgcatggcaagttactttaattactgtgctcttgtttaaagaaaagtgttaactttattctaaaaaaaaagtgttaactttacagttacacagatatgtccctcattagaaggtgtaataaatctgtttgtttgcagacatgatggccagtaacttttgcagcatcacgcctactacaagcgcaagaaaagctagctactactggaacaagggatcttaatcatgttttgaaacttaattagtaatattttaaaaaatcgtactatactaatcatgatgtgtagcgtattgcaccactgaatttattactgtaattaacatggtgagtgttaaaatattttgtgatatccatattatattgcaactcttacgtgtcatatatgtcatgttatatttaaacattatgtgcaaagagatcaccctcaataatgttctatggtatgtacatatatattcatatatgtatataaacaagatgatatccactccacacctccctccccctccctcacggccgctacagcatggtgtcgtaaactgtgtggctgcaaagatagctgtgacgaggccttcccttccttcccacatgctcccagaggcatatttcaaggcaatgaaggttgcgactacactgaggtggccagatgggcagagccacagaggtccgtacatttcatcaagcaaaagccagtttcatttaaaaaatccgtttgaagagaagagaggtgaagaaaagcgcatttataaagtggtgtggcaagaacttcggaggtaattaccattaaagtggagtcgcatgagataccaatgcctactggagatgaaactaaggtggccaaggcgagaagaccgcagttggagccaacgcagctcaccacgctggtttgaccgagccctccaggagtcgtgtcacctcaaggggccagtctgactgtgcagagaggtcggtttgaccagggtcatccagggagctcgagggcatcatcttcgtcggtcaaaattgctagaggtcactatattgcccccggaatagagccaaagctaagtggatgcccgcggacttgaccactactcaaagaggaggttgcaacatcttcgtgcttaagaattgaagaaaaaatagctgaaaagttgagaaacaagattcaataagttgtggttgtaaaatcaaggagttagagagacttgagttgagagaaagttagggtttcgagtttagtttgagattttggtgaggagtgctattggtgcactttgtaaacactagttgatgcaataaagtcgagaattctaatctacatcttcgagtttgtcatctaccggtgcttctgggttctgacagtctaaccgcaggtgtgcacctggtttgaccagtgggatagcggcggtctgaccggcgaggttttggcggtctgtccggcggtgaacatgcggttcgaccgactgtgacagggcttcgtcatctactccgttcgaggtaaatcttttatttcgcaaaagattttgggtttttggtttttcctaccattcacccccctctggtaggtttgtttggtcttgtgcgatcctacagtggccgcctccaagacaatagtagaggcctaagccaatggagattgagaaaccgatgatagatcaagacgatggtgaggacaaaaatggaggtgggttactggttattagcaatgattcgctgccaagacagaacatggatgtcaacatggtgtttgcattgccgatggaattttgtgtcatggatgaggctgaaatttctcaagatgtggtttttgagaagtctaatgagtctaaccatcatatgaggccactcatctcaaagggcacattgattggaaaatgatctctagaatgttggtggttggaggtgtcgtcgtaaatttgatgccacactccttattcaagaagttagggtgtgaagttgtggtgaattgaataataccaacatgatgctcaacggcttcaatggtgaaccaacgaaggcgagaacgatctttttttgtgaagcttaccgtgggaaacaatatgttgccaaccaatttcatcgtcgatgtgcaagataactatagcgttattggattcataccaattgttgtgttccttctaccttgcaccagtgcttgatttaatgggacaacgatgagattgagatcgttcaagcagatacatcggccgaggttgcaatagttgacgcgtcaattgagtggtatgggattattcaatgcttattagggttagatatttctaactataattttattagtgtttctaaagatcgttttgtacccattatttggagtggttgcaaaagagagtgcaataacatcagtctacaaagaatgacattggttttgcatcggctgatccactataagagggagacatacataatggatctattgcatggaaaacatatgaaagttgattactaggttaaagaatatgttgatttttttgaatgggaatatcatgaaatgtcgggagttagccgtgagcttgttgagcatcagcttccaataaaattggatttagaccttataagcaattgcctcatcactttaattcaaacatatatgatcgtgtcaaggaggagatagaccgattattgaaggtggaggccatgtaggtattcggagtgagtgtccaatattgtccccgttgagaagaaagggagtggtaagattagagtatgtgttgattttagagatttaaatagagctactcctaaagatgaatatactagacctattgccgacatgttgattaatgatgctttgggacatagagtcatttgctttttggatggtaatacttgttacaataaaatctttatggccgaagaggacatgttcaaaacggcctttaggtgtcccggttttgttggcttgtttaagtgggttgtcatgacgtttggtttgaaaaaggccggtgcaacataacaaagtgcaatgaacttgatcttttgtgatttgctaagtataatattagaaatttatgttgatgatattgttgtcaaatcggatggtatggatggtcatatagcctgtttgcgtttagcttttgggaggatgcgtcggtatggtttgaagatgaatccactctagtgtgctaatggtatgtcatcgaggaagttattaggcttcgttgtgcatgagagaggtgttgaaattgatcctaggaagatagaaaatattagatagtttaaagcgtcagcatgcaagaaaaaagttcaaagattgctaggtcaggtgaattatttgaggaggttataatcgatacttttgttcccatatttcgttgggaaaaagaagccgattttacatgtgaagcaaacaacaagaggcgtatgaggaaattaaaaagtatttatcacctccacccatggtgcttgcgcctaaagttggaactctgtttcggctctacattgccaactgaggacaatgtcattggtgttgtgttaacacaagaagtggattgcaaggagcatatcatcacataggtgggctgtcatcttttggatgccaaaacaacgtatgtctttatagctttgcttatgtttatattatgattgtaccaaattacagcattatctattatctagtacttgcacttgtcaaactgatattattatatacatgttgcaaaggcaaattctaagtgggagaattcacaggcaaatactttgattgaatatgatttggcttatgaatcgttcaagtctttgaaaggctaaatcatagttaattttataataaatcatcttgtggatattacttatgatagtgaggtctatttacgtagtgttacaccatggaaaccttattttgaaggtacttcttgcgaagaggggtagggtatatgtgcagttttgttttcacacaatagagctatttttgaaacatcggtttacttagagttttcttgcacaaataatcaagtatatgatgctttgttattcggcttacaagtattggaagctataggagcaaaacatgtataagtttttggtggctcggaattgatagtgcaacaagttgccggggtgcataagtgttttgatgggtcattaaatagatatttagatcaatgcttagacacattatcaccaatttttatgattttgttattagaacatgttgctagagaaactttaaggcaaatgatttggctcaacaagcatctggttatcatgttaaaaaaaaggagtattcttcatttagaaaaaaacggtgcttcaattcaagagtttggacaaaattggcgatgggccgtctgacagacgcaccggggccaatctgaccagggaggaccggtggtctgaccagcctggcatagccggtctaaccagagaccttacctgacctgatcgacctattatggctagtctaaccagattccaacaatcagctaggtggcacgagttcatgaacaagttggaggccgaattaattgtaaattcggacgtttgtccctaggaattagaaaatgattggagtgtccctttgatagattatttgaaatatccaatttttagggttgatcggaaaatttggtgtcaagcttttaagtatactttgtttgatgatgagttatatcgccgaaatatagatggggtgttattgaagtgcttagatagtgatcaatgcaaggttgctatgagagaagttgatgaagggatttgtggaactcttcaatcagcccacaaaatgaattggctacttaggagggttgggttctattggccgaagatgttgatgatagtttcaagtactatagagggtttgaaccttatcaatggttcgacaatgttcaattggcgcccaccgccttgttgaaaccaattatcaaaccatagtcgttctgaggttggcgtttggatttcattggtcaaatttaccctttatagtgaaaagaacatcggttcatgctagttgcaacggattatttcaccaactaagctgaagttgtaccgctcaataatataactcacacagagctagttttctttattttcaagcatattatttatagattcggtatacctcaaattttcactacggatcaaggagcttcttttatgtctaagaaagtaaaataactttgccgaatcttagtattaaattgttaaattcttctccttacactacgctcaggctaattgacaagtcgagtcgagtaataagggttttcttgaaattagttaagaaaaagattggggaacatccaaagagatggcattaagtgttctttgaagcattatgggctaatagaatatctaggtaaggtgctaacatgttaacaccttttgagttagtctatggacaagaagttgtttgacttggctctcttagatatatcaagtaagatgatttatcggtgacggagcgtggggctcctcaccgggagaccgcgcaggcccccctttgccggttcggccgggggcactaagtgaggttcttcgccctcgatctgaggaatgtcagcgagagaggaagtgcacaagacacgggcgacgtagacaggttcgggccgctgagaagcgtaacaccctactcctgtgttctggtggatctgtgcatgaaggaatacagagagccggagagcgagagagagagagttcaggctctagaacccattccccagagtcccaaccctccttcctcttttctttcctccctttttttctccctccttctctttttttctccctctttctctttttttctcctaggcctgggcctcctttttatctggtcaggggtcactacatgggcctctagctgcctaagaagggaaacatgctttttacaatgagggctagtctacagccggaagtgacctctgacaagcagagcacacgcctcctgccccgctcgcctgctttcccggtggacgcccatttcaaccttcatttaatggccagcgacttccttgccatacctgcgctgaagcctggaatggatctgaccgggactgacataccaactccaggagttagcacgccggctccggctagggacgagagccaggaagctctcatcattccgacgggacggggcgaggcgtgtgacaggccgcctgttgccacctaacctgcgatctgaccggtctgtgaccggtcacacaccgcgactggtcacggaccggataagcgtgcgcggcgccgcattaaatgcggcgtggcgcgctcgtccaacctgctataaatgcggttaggtgagccccgctgtgctcacctaacccacacacgtggtgccaaaaccacagggggtcggggcgccccagccctcggggccgaaacgggagcggtccgacccctcggggagacagagggaggggtggccacgtcatcctcgggcccgacccccccccccgagggggtcaggccacgtgggtgaccacggctacccaagcctctagtcacgatacccccggccccatgtcaccgacaatcggtcaaggagtataagacattaatggaagataatctggataatgtgttcgataaacgtttgaaacaactttagaagagatagaaaaggataaaaagagagtagcaaaaacctataataagagagtgagcaaaatcgtttcaagtgggagtttagtatgtaaaacaattttcccattagaatctagatctaaggagttcggtaagtggtcacctagttggaagggtccttatcggatattttgaatcattcgagggaatgcatattttattgaaactttacgaggagaacggtttcaaagagtgatcaatgggaaatatttgaagaaatttttcctgagtatctggtaagatgcttaggaggtaataaggccagtaattagattatcaccctaagatcacgtgttctatgtttttcggctcacaattcgacaaaaggcagggtggcatgtcttaccgcccaaatttggcacctagaaaagaaatatggaaaatatggctgaatttggaacatatcgggtctcttccgtgatgacggtctgaccgccaccataaggccggtctgaccgacggcatggggctggtctaaccggcaacatgtggccggtcagactggccgagtctgacttcgagtctaattttatcgagtctcgggtttccccaattttattgggtctcgggtttccttgtaattggtctctacccccgagtaagacatggagaaggccctgtacgagataagaccaacccatttataaaggctatgattggtgcaattgagcacacaatctacttccaacacttttagccaattgaattgctttttcaatatggcatttactttttgcctagtttctagtctagttcatccatctttgttgatttgtatagtaaatcgtctgcctttgttgtaggagtgtgaatcatctttataggtttgtcccaataaccttccattccacccacgagataggtgtttatctctattttatctaaatgagctccgctagccggttttgatttacaaaactcatcttaatttggatttgttcagatcaaggtggttggcgactcccaaattacagcaaagcattggttgtccggtcatgattggcgatgtgatcaaaaaagtttccaataagaccatactcgtctgaacatgcccattaaaactatgacaaaaagtaagatacatatagggtggagctgatgtgaataggcgcctgatcttctcacatagatactattggtttgatttatctacgtgaagacgtgtcatgagttcttcccattgattgtttttcttctgttgttcatcgagtgatacaattaaattaagcacatttgggatgaaattacatggagaggtctagtgcgtactatataactagctaggaccccatgcattgccgcaggcatatgatgaaattagaagttatttcaatcttttgccaatcaatgaaatattctttatacatgtatcgattgttacacgggtttatatatacatgacctctaatcgtttacttatctacctaaagtgggcataactcaatcatcataacataatggaggcattgaatttgtgagagaaccatttcctccattagctaattaaagaggctaacagagcatgcatactcaattcacttcaaatccactgaaagatgtacttgcagaatatggatgaacaaattccttatacttggtagcaccaatagaaaaatctcttcatagaagcggcagcaccagcttaatgaaatacgtatttatcctactcactaattggtgagctgaaataatagacctggaggctatcaaaatataatatacccaagcaagtacattggtgtaaaatcaaaggtgtttttgattattattctgtgatgaacaattggcattggagattattggttttgatatttggaatttatttgcgaagtgattttggagatgatcgggattttacaggcgatctacaggtactgctgattgggtccggtcagaccgggcacgggttgccggtcagaccggcagtgatggagcggtcagaccagcgcagcccgcggtctgaacggccgactctgtgtcgtttttgattttgggttgtttgtttggatatccgtgattgtttcatgattaaggattctagatggatactatgcgtatgtaatactgtcgtttgctactaatgagtcaagttggggatagcttggtcttggaatatggtttctttgtttgttctatgtgtaggtgactcgagatgccgaagagtatttgaggtgatggaccgggagtcggcttggggataagcgacgtacgtggtggtcagagatcatgcgggatactaaggctagagttcaatgcacgtggttggtgaagattccatatgtcatacgatggaggtattgtgtgcgtatgggatgcgcagtcgaatttggaaggagtccaaatttggtatgattggttatgtaaagtttgtttcttgtactagagggtttcctagggtgattagaacttctagtatgagtttggttcatggcttttggctgcctacctcgggtataaatagagggggagcgtgaggcttcccagtatcgctttcgagagcaaatgagttgatagttgagttagggcttcgagtttagtcgagattttttgtaaggagtgctgttggtgcactttgtgaacacatagagaattaataaagtcgtcatctattttaagagttcttcgatttgtgtttcatcgggtttcggcggtctaaccggcatcacactggcggtcagatcggcggcaagcaacggtcagaccggcggtggcagcaggcgacgggagctgatccaggcggtcagacaggagttactacctcggtcagaccggaggtatttaggcggtcagaccagcgcatctacttcggtcagaccgcaatccatcgaatttgagggtaacatttatttccgctaaaagttttcggtttttgggtataccaaccattcacccccctctggttggcttagttattgtgattcgatcctataagtggtatcagagctttgttttcttctttggattttaaccggtctagagtttttgccatggctgctaggttttcaactaagcctcatgttttcgatggaactgatttttctcatggtgtagtaggatgcaatcttacattatgactgaggattatgatattcggagaaaagtcaaatccttatgtgattcctgaacaaattaatactgctcctttaaaaactgaatttgaacaaaattacaaagctcgcaatattcttttgagtgggatttctcgttcggattatgaccgtgtttctcatcttcaaactgcccataagatttggattgctttgagtaattttcattaaggaactaataacattaaagaacttcgtcgagatcttttcaaaaaggagtacattaaatttgagatgaaatctggagaagctttggatgactatctttctaggtttaacaaaattttgagtgatcttagatctgttgattcttcttatgatgttaattatacacaatctgagatttctcgccactttttgaatggttttgacatgtctatttgggagatgaaagttacatctattcaggaatccgttgatatgtctactttgactttggattcgctttacacaaaactgaaaacacatgagatgagcattctttctcgtaaagttgattttaagtcgagtgctttggtttcttcctcaacttctttggatgttgattcttcttcatcgaagtttccgcaattgctttgtgtaatgccatgtccgatgatcaactctaacaattcgaggaggaggacctggttttgttatctaacagactttctcaagctgtgactaatgttaggtacaggaaaagaggtggtccaaatctttgctttgaatgtggtggtacggatcactttcgttcgcgttgtcct

SEQ ID NO: 6962 - DNA, 1308 bp, Oryza sativa
acttcagactttgagaattctcatatcatttggacagtatggaatggctggcttatgttggaattggacacacacctccccttcttttcaaaacccccaaaacggttttaggctgggctcgaggtgcgtggttgggttttgttagtcgtacctcgggtactataaggattaagctcgggcctctgttgcaaagcactaccgtacttccacatgtctagtgggtcaggcttagtttgtggctcaatctggttataaacaaaagtacacggatggagatggacgaagtcgagggtcgatggacatctctaggacaaatgaaggctacacgagctgcggcccggtagtcgagatgtcatggcacagggctggtgtcctgctgctaggggctcaatcctgcctgcctgtcccagaggttccggccgtaggcggggttgggtcggtactcttgtctagggctaggatgggttggaaactatgtcacgtcttccatccgtataccgtggtggtatgtggcacgtggttacacgtgaggaagatgtgtcttgtgggtaaagatgtacacctctgatcagagtataacctattcgaatagccgcgccctcggttatgggcatgcctagcaatgtacccaagttagcgttttaattcttaaaacctgcttaacaactaaaatgtggaatggttggcctgggttggcttggaacgagctgggacccagggtcgggttacaagttcggtctgaatcatcgtaggccttgggttaaggcaggttcttgtgggttcacggccttgactaataatattgtatagctctggaatcgtgtttacaaaatagctttgagcactaagtgtcttttaatgctgtttactgcaaaccttaaccctttatattataacccccttgtactcccttgcatttatcctgcacttgtgggtgtgtcttgttgagtacggtggttgtactcagtcttgctcaatttttcccaaacccagaagagaagcccctgaaagatgaaggctttggtgtctagctcgtgcctgccgtcaaagcgcttgtggtcgtcgcccctagtctttccgctgttttcccgtttgtcttttgtgtgtggtgggcctttgccggccatgttattaatttaatattttacgtttccactttattaacttttaaaaggaatcaacttttggtggaccttgccttcttggacaaagaaataatacacgcacgtaagaaaggccggttgggttaattcgggtggtgacaggatttataccaatagagtggttcttaataaaatttgaaattta

SEQ ID NO: 6963 - DNA, 3742 bp, Oryza sativa
gggttttaaggtttttctttttataaaactttgataaaggttgttgttgcttaataaataattccgttgctctgaaaattcaagtaaaatttgagggctccttttagaccaaggagaatttaacaaaaatttaaattctccggaccacattcgaatttttcttgtacgtattttagtgtttgccaatttatttttgaattttaattaattccattattccttttagagaatgatttttatttcgggatgaatttatcaggacgtgacaaatccaccgcccttacaggaatctcgtccccgagattcgagaacgctagcaagaatataggttgggatgtcttctcttctggactgacttcttccgctccgtcttctataacaaacttgcgtaacaaaacttctccgctctggagtgcttggctcgatctcctgttataaatggaatcttctcttcacctgacttttccctggttgcacctctagctgactttgactgggctgcggcattggaagatggggcttcagttccagaacttcttataattcatatctttggagtcaacctcatacaagttaccacttcatgtcatgcgtcaacactagcttttcattactaggataccatgtttgtcatcataagaatatcatgcttgtcatttacttctaacatgccaccaactgcctcatattagctttcctggtctccgggtgctagctacatctgctatttgatgcaagggtcgataactttgcctttgaattatgtttctcaacagaaccaacttatcccacttgacatgctttgacgtcttcccaaatggctttactgctggacttcttattgtttgatcgttatcctgccaaatctgaagcttcgttgttagatgtaattttaatgtgacctctatagactatcttcgaacatatcacttggttcataactgggaatagctcccacgaacaagcaactcggattcactttctttatgttcagtttactttccactattctcttcatgttgtcatcatttagcattcaacgtattcctttacaccttcgaccttgatgagttccttcccattggatcatcttccaagacatggcattgcctggtaaccggtgcctgcacttttcactccatgtagcatctgatccatagcatgttgatcccgtttaaagctattgtttctattcaactattgcatttattttcgaatgtcattgggtggaattaacctattgtttgttatagcccttttgttcttgattactttattccttgatgccttgggttattataacttgactaattgggctttatatattggttcagctagatattagatatgattgcttagccatgcttagaaacattagcacactattgggataacttatgactcactattatttaatgatggcttaatgatagctcatgatggttaatgatgattggttaattaattaatttgccaactaaaacctgataatggtgggttgtgagcacatggttttgatggtcgtgctcatgacaattaaggaccggttcacgagtttcggttgtgaaacattaaccgtgccaaccacaagccagcgtgggtaacgactttaccttttgtatagcatggttcattgcggagcaccaaactaagaagtggcggagataagcccacgggggtcgctggggagtccatgccttgtatataagggggtgattattgtcacgtcccaaaacgactttaaaatacatcctttaaatgatgcctagaataattaaaatccatgtgaaagcctccaacaattaaaatgtgcaaagttaaaagtcaaataaggcttggaggatttttgtatatttcctaaaagcctaaaatgcgtaaataaattttagtggaattttcagagcacaaataataattattaagaaataaacaaagttaaaatgattttataaaaagaaaaactctaaaaagtcccttttccctccctctccctcttgggccggctcggcccatctccctccccctccctctcctctccccgcggcccatccggcctctccccgcgcgtgcgccgctgacgggcgggcccgcctgccaccctactgacgggtggggcccacccgtcatccccttcctcccgccgctcccgccgcctcgcccacgccctagcgccaccgccgccgcgaatcccgccgcccccgtcctccccgcgtgcaatcaataggggggaattatttccagtgattccctccccctttccccccaattttccctccctctctcccttggattcgtttggaaaccctcccctaatcccgccggcgccattgatggagcccgagagcgccgcgccggtttccttcccctccggctgccctctcccccttccaaccctatataaaccctccccgcacctcctccgttcgtttccgcctctcgccgcccttcctcctcgccggaatggagcttgcgccgtcgctctctctctccgccgtcgccgccgagctccggtccgccaccgtcgtcgccccggaccacctcccacctcggcgccgcctccttcggcttcgccgcatcctcgccgacctcgtccacccctccgtttcgctcgtcgaccgccggagcgcccccgtccccgtcgacccgagccgcgccgccgccttcctccgctccggccgccttttcgtcatcgccgtcgacctagggtgagctgtggaccgccgcctcgtttccccctttccctcccttctctcggccgccgctccgatgtgcccatggccgccgccggcgaacattgggacgcgggcgcgccgcctaccgccggccgcgccgacgtggccgccttcgggcgcaccgagcggctgccgcgtggggcccggccgtcagccgcccgcgccctcgggtgcggctgacgcgtgggacccacggcgccggccggtgtgagcccgagtgcacccggtccaccgtggaccgtgaggctgccgcgtgggccccactcctgtggacccggtccgcgcgccccctcccctcgactgacgcaataaacccttttaaaattaaaatttaaatgaagaaattcgcaaatattcatttaaagagcatataaacttcaaatggccataacttggccatttgaactcggaattggaccgttcaagtctctaatttttccttaagaagtcaagaacccatttttgtgctttgttcctgcttgttatatggagtttattagagtaaaagcctttcttttccattggtcgtgtagacgctgcagcttcggaagatccgctcttcgtggaagttgaagccgacgtttgggaaagcgagcaaggcaagtcacatcatccttgaacatatttgtcacgtcctgataaattcatcccgaaataaaaatcattctctaaaaggaataatagaattaattaaaattcgaaaagaaattggcaaacactaaaatacgtacaagaaaaattcaaatgtggcccggagaatttttgttaaattctccttggtctaaaaggagccctcaaattttagtggaattttcagagcacaaataataattattaagaaataaacaaagttaaaatggttttataaaaagaaaagctctaaaaagtctttttccccccccccttccccctcttgggccggctcggcccatctccctccctctctgtcctcctccccgcggcccactcggcctttccccgcgcgcgcgccttgactggcgggcccgccc

SEQ ID NO: 6964 - DNA, 1830 bp, Oryza sativa
ccaatgagcttcccatgccagaagagcatgtccccttttgtcatgattgtagagaacaaggacactatgccctgaattgtccatgggtatatgctaaagaagccccttcctttggtttagcagggcagacatcgctaagccagcctcctcgcaccaagtcaagcttgcagcctagtgtgcaaagcagagagcccaatgaagagaatccattgaatcccgggaattgctttcttcctagcctttcgtaccacgtggggtcacacactaagcaagccaaaggcaagaagagtaagaatcagaagagaaaagcgccgatgcgaactgaagaagaagtacgtaagatgactattaccagcaccgaatggcctccagcagggataactattcctagacgtcaaagaggaaataccttccgaggtgcacgacagttgacccagcacctcctaagccatggtggcagagtatatgatagtgaagggtcagatcaagtctcctcggattatgaagatgagtctccccgacatctcggtgaggaagagatggaatcaaaagcatgcaaccgttgtggagaaattggacacattgctagcatgtgtctcacactctgccctcattgtgaggaagaccatccaccaggtgaatgtcccacccgcaaggtcacatgttttctgtgcgaaggtacaaaccatgtgcccaaggattgccaactcagtgtgttgttgaccaagaccgcagaaatccaacgaacaaccctacgattgtctcatcagctagttagctccaacagcaacatcgacaatatcatccacagcaccaatgctcctcctgctgcacctgactctgcaataaatcatagcaataataccttcagcaccaaccattctctgcaccgatagcctcagcaaagaattgtcatcgatggaagaagctgtgtctctccccgacctactccaggccgagcaaagggcaatcaatctcaggagggcgataccaagcagaagaccgttctctgcttcaaatagcaatcagaaggaagcttctcctgtgaatgatagcaatatgcagtcctatcacatcatcacagaaccaatcaaggatgcagtcactagaacaatgccagctatacctctccagaatcagaatgagtagccatgtttgtggttttcagttcgctacttatcattgtgtaatcgggagtttgcagcaatcatgtaataaataaatacattcatgattataaacaatgagtttgttatgtttatggatgattcatgttgaggatgcaatgtaccgatgttaagcaccttccctttttgtttaaggcaaggccttgtattcatgtaataagggagacatgtgtaataaaaacaagttctatgaggattatttcggaagatgctgatatgggattatgtgtataattgtttactgtcaaaggagacctagggtctcatttcagaggaactatgttctaacctcgagttaataaccaacctgatgatggaaaagaaaatcaagcgattaaccaaagagacatttgtttggactaagagtttcagatgtgtcttttttggatcaaaggcaacaaccgccagtctagtttttgacaaaccacatcaaggtttcactgaaaggcagcaagccaaaggacctcatcgtccccagaagcgtccgcaatccacattaaagaataccagctgttagagataagccgaaagaagattgataaaagagattggcaaagatgttctctagcatgaaagaagtaggccgaaaggtgattgataaacagaaacatgctctgcatcgctcaaggaagacccctgattg

SEQ ID NO: 6965 - DNA, 1998 bp, Oryza sativa
atagagtacccactagttgggttttgtttatcctagggtgagcaaggtaataataacaatagcaataataataaggtcataacaaaggtaaataggcatggctaaataaatcagtgataacgcgggaatttaaataaagcgacaatgcattaatttaaatcaaaataattttataaactaggattcaatatgctcaaggatgatgtgacttgccttgctgagagacaacggccttccgaaccttcggcgacgaccgcgacccacgcttcgagaacctccggaacgacagaagctacgcgaagcacacaagcaaagctacaagcctataaagaagcaataacaatacataaaaagaaagcacagggttctttaggttataacaaacattaggagacttgaacgggtcgattcagagttcgtatgaccaagacatggtcatccgaagtttaatgatgttatatggagatttgcggattattataattaggttttacaactataaaacatgtctaagcgctagcctggaaaagacaggaaggctgcgccgttgacatgcggaccccacatgtcaacctaagggaccacggtggaccgggtacacagagacggtccacgggttgacagaagcagatcccgtgtgtcaaccgaggcgagtggccgacaaacggactccactagacaccacacgtggaaaccacgcggctaccgagcggacacactaacacggtcaccacacacacaagcgaacgactaccgacaccgatacacgggtaccggggccgacaaccgcacaacaggcacgggcgacaccgaaaggacgaggatggggcagcgagggagagggatccttaccaccacgcgacgaggcgtgggaacgacaacgacgaacgggcgcggcggaaacggacggcgagggaacgacttcggcggcgatccttggacgaaggcgagacgcggccggcacaaggcttgacgacgcggaggcgagggcgaagacgacgacggggctgcagcggcacacttgacggacgcggacgacggacgggaacggcttgacggagggacgaatgccacgacgaccgggaacgacaagaggacaacgaccggaaccggcgaggaggcgatgagggcagccggcagcagctgcacggagacgaggacggcgcggaacacgccgctgcgatgacgacgagggtggcggcgcagcgagacgatgagccggcgaggacgaacgaccgaccggaggagtcgtcgacgaggacgaacggagacgacgataacgaacaccggcggggttcggatggaggggatgcgaggccgagtgcaaccttgacgctgcgatgccggaggaggagatggcgatgtcggccgacgcacgggcacggcggaaggggttgccgaaggaactccggcgaggcggagggcgagaccggcgtgggcgacagcgttccggcgaaaccgagggcaggccagggtggaggggacgtcgagggaggatggcgatgacgacagccgtggcatcggcgaggcggcacaagcggctggaggcggtggcgacaccactagtcgttggcgaggacgcgtctccggtggcttccccgcaaaacggaggcgacgccggggaagaggtagcggctgcgacgccgggggagacgacggcacggccggccggagcgctgacgcggcggcaggggcggctggaggtcagccggcgccggagagagagaaggagaaggcagggagacgtggtgaggccacgggagatcgcgggagggggctaaaacgagtgaacggagtgagggggttccattttataggagaggagagggatccgggcacgggagaggtgggaacggcggcggaaaagtcggccgggggcccatcaaaagcgcccggggttggcgcgtccgttcccggcgatttggggcacgaattcaaggggaaaattaaggggaattgaaaaggaaggaatgggaattacctccccccaattaattt

SEQ ID NO: 6966 - DNA, 1724 bp, Oryza sativa
ggcctacggctccatcttcacaggcgctcaactggggatgatacaaaaggcacatctttattatatcgataatatttacattattacaaaggcacttaaggcctgacaatcaaaaataaatagcagcgaactagcgggcctacggctctatcttcacaggcgctcaactggggtataagccaggactccacctaagacttcttctccaaagcttctcttactgaagggggggaaagattgagcaagaatgagtacaaccacagtactcagcaagccacaccggcagatgcatgattaatgcaagggggtacaaggggtaataatataggggttaagttttgcagtaaacagcttttaaaagtcacttagttgcccaaagccattttataaagatgatcctagagctacggagtgttattaatcaaggccgggaaccctcacgaacctgccttaacccaaggcctacgatgattcagaccgaacttgtaacccgaccctgggtcccagctcgtcccaagccaacccaggccaaccattccacattttagttgttaagcaggttttaagaattaaaacgctaacttgggtacattgctaggcatgcccataaccgagggcgcggctattcgaatagattatactctgatcagaggtgtacatctttacccacaagacacatcttcctcacgtgtaaccacgtgccacataccaccacggtatacggacggaagacgtgacatagtttccaacccatcctagccatagacaagagtaccgacccaaccccacctacggccggaacccccgggacaggcaggcaggattgagccccctagcagcaggacaccagccctgtgccatgacatctcgactaccgggccgcagctcgtgtagccttcatttgccctggagaatgtccatcgacccccgacttcatccatctccaatccgtgtacttttgtttataaccagactgagccacaaactaagccttacccactagacatgtggaagtacggtagtgctttgcaacagaggcccgagcttaatccttatagtacccaaggtacgactagcaaaacccaaccacgcacctcgagcccagcctaaaaccattttgggggttttgaatagagggggaggtgtgtgtccaattccaacataagccaaccattccatagtgtccaaatgatatgagaattcccaaagtctaaagttataaaaccacctaatgttgcctaattaatcagcgaagcatctacctaaattcatactagtggaaccacgaatagagtacccactagttggggttttatttattctagggtgaacaaggtaataataacaatagcaataataatgtcttaacaaaggtaaataggcatggctaaataaaacagtgataacgcgggaatttaaataaagcggtaatgcattaatttaaatcaaaataattttataaactgggattcaatatgctcaaggatgatgtgacttgccttgctcagagagaacggccttccgaacctttggcgacgaccgcgaaccacgcttctggaacctccggaacgacgaaagctacgcgaagcacacaagcaaagctacaagcctataaagaagcaataacaatacataaaaagaaagcacacggttctttaggttataacaaacattaggagacttgaacgggtcgattcagagttcgtatgaccaagatatgatca

SEQ ID NO: 6967 - DNA, 921 bp, Oryza sativa
agccatgtgccatgacatctcgactatcgggccacagctcgtgtagccttcatttgtcctagagatgtccatcgacccccgacttcgtccatctccatccgtgtacctttgtttataaccagactgagccacaaactaagccttacccactagacatgtggaagtacggtagtgctttgcaacaaaagcccgagcttaatccttatagtacccgaggtacaactaacaaaacccaaccacacacctcgagcccagcctaaaaccgttttgggggttttgaaaagaaggggaggtgtgtgtccaattccaacataagccagccattccatactgtccaaatgatatgagaattctcaaagtctaaagttataaaaccacctaatgttgcataattaatcagcgaagcatctaccgaaattcatactagtggaaccatgaatagagtacccactagttggggttttgtttatcctagggtgaacaaggtaataatacaatagcaataataataaggtcataacaaaggtaaataggcatggctaaataaatcagtgataacgcgggaatttaaataaagcgacaatgcattaatttaaatcaaaataattttataaactgggattcaatatgctcaaggatgatgtgacttgccttgttcagagacaacggccttccgaaccttcagcgacgaccgcgacccacgcttcgagaacctccggaacgacagaagctacgcgaagcacacaagcaaagctacaagcctataaagaagccaataccattacattaaaaagaaagcgcagggttttttaggttatacaaacattaggagacttgaacgggtcgattcagagttggtatgaccaagacatggtcatcccgaagtttaatgatgttatatggagatttgcggattattat

SEQ ID NO: 6968 - DNA, 2235 bp, Oryza sativa
catacccctcaccccatcctagccgtgacaaaaagtaccgacccacccctgcctacggccggtatcccgggacaggcaggccagggttgagcccctagcaacaagatctagaccgggtgcgccacacacataggggtgagaccacccgcgtactagtccagtgccatggcatctcgactaacgggcaccgacccgtgtagtcttcatttgcctagacatctcgattaccgagccgcagctcgcgtagccttcatttgcctcagagatatccatcgtcgcaacgacttcatccatctctatccgtgtccttttgttcaggactagcctgagcaccgagttaagccttacccattagacatgtggttagtacggtagtgctttgcaacagaggcccgagcttaatccttatagtggccggggtgctacttcccacaactggcatgcacccaaaccccaccgaaaacaggttttaggggttttgaaagaggaagagaggtgtatgtccaattccaccataatccaacaattccatagtgtccaaatgatatgagaattcccaaagtctaaagttataaaaccacctaatgttgcctaattaatcagcgaagcatctacctaaattcatactagtggaaccacgaatagagtacccactagttggggttttatttattctagggtgaacaaggtaataataacaatagcaataataatgtcttaacaaaggtaaataggcatggctaaataaaacagtgataacgcgggaatttaaataaagcggtaatgcattaatttaaatcaaaataattttataaactgggattcaatatgctcaaggatgatgtgacttgccttgctcagagagaacggccttccgaacctttggcgacgaccgcgaaccacgcttctggaacctccggaacgacgaaagctacgcgaagcacacaagcaaagctacaagcctataaagaagcaataacaatacataaaaagaaagcacacggttctttaggttataacaaacattaggagacttgaacgggtcgattcagagttcgtatgaccaagatatgatcatccgaagtttaatgctgttacatggagatttgcggattattgtaattaggttttgcaactataaaacatgtggaagcgctagcctggaaaagacaggaaggctgcgctgttgacatgcggaccccacatgtcaacctaaaggaccacggtagaccgagtacacagagacggtccacgggtcgacggaagcggaccccgtgtgtcaaccgaggcgaggggccaacaaacggactccactagacaccacacgggctgcacacgtggaaaccacgtggctaccgagcgggcacactaacacggtcaccacacgcacaagcgaacgactaccgacaccggtacacgggtaccggggtcgacaaccgcacaacgagcatgggcgacaccggaaggacgaggacggggcagcgagaggagagagatccttaccaccacgcgacgaggcgtgggaacgacaacgacgaacgggcgcggcggaggcggacggcgagggaacgacttcggcggcgatccttgaacgaaggcgagacacggccggcacgaggcttgacgacgcggaagcgaggacgacgaacgagaacggcttgacggagggacgaacgccacgacgatcgggaacgacgagaggacgaggacgacgacgaccggggccggcgagggggcgacgagggacagccagcagtggctgcacggagacggggacgacgtggaacacgccgctgcgatgacgatgacggaggcggcgccgcgagacgatgagccaggcgaccgatgggacgtcgatcggcgaggacgaacggtgacgaggaagcgacgatggcagccagcagcggctgcgcggaggaggggacggcgtggaacacgccgctgcgatgttggtgaaggtggtggtgcagcggggcgacgagccgacgaggaggaatgggtggttggcgcggcggcggcgttccggcgaacttcgggcgacgccgcagccgggccggagaagaggatggcactaccgcaccgacagaggtggcagcgacgtcggccggcgctcaggcgaggcggcagggatggctggagccggtggagtggtggcgacaccactagtcgtcggcgaggacgcgtctccggtgatttccccacgaaacggaggcgaagccgggaaagaggaggcag

SEQ ID NO: 6969 - DNA, 6168 bp, Oryza sativa
aaacaccacgtctaagaaattaatatctactttagtgtgtataactcaccaaagcaatcattatgcttttgttgattatagtgaacaataatcccgtatgctatttaggaactaaccaagagataattctcataagataaatctaaattactcaggaagaatattatattgaattcagagtaataaacagaataaaagaaataggagatgattaccgacaactccggaattcttccgacttcttatactctactttcttcctattctaatatacaatatagtatagtagagcttcttataattcagctcaagcttggaagtgtgtgagtgaagtgagggagtgatgtctttatatagaggtaggtatgacggttggcgaaggggaaatgtccgaagtgccctccaaccgtcatctgggatgcatctgagacgtccacgccaaaccccacatccaacggtggagatgatggttcggccgaaccagggggttcggccgaacctgggctgggcccatcttgcctggcctttagcccatgttctcccctggtcttcctctattcattcttcggtattttgggttgatcctctgatgttttgatgaagtttacaacccttccttgtatggatacataattctcctcactttagtctagatttcctcccaacatcggggtttatcgcctgcatacaaatatacaccaacacttgtggaatatgtgagattaagcacctatcactatgttggatgttttattatctgaactttatgcagatgttggcggtatagaatcggcatttaacagccgccaacaaaaccccccacacttagctctttgctcgtccctgagtaaaggttagtgtagaatgaatttcttcaagatatgaatcaagcatatacaccattaacaaccatacctgtacttgtgaactttatcagtggctatcttaccatcttgagtaattgatagatggaatgatctcaattccagtccttcttgcttctttgtcagactcatgggattttttatgaattttcgcaaaccaactcttttcctcatattgactttctctcttgtctctcaaggattttctttttggatcctcaccaaggcaaagtgtgccagaattttatcccttattctaaggctgatatgtggagcttggtagggataaattgtgatatacctgcatcatatatatcgcgaagccaaaaatatggactcaagaagatcatcagtcatactcctagatcaagggtctttatttgtggtggaaaatggaaaagtaaaatattttgtggaatgatggaataaagaaatgattctcccctttttcctataccttctcctccattttgttttcttggcatgaatatgcaaggggcatggctatattttcttttcatcatgctcaaatattttgagagcaagttttatttccttttctctcttttctttcatagccatgcctttccctccttttctcattttcctttttgccaagaacttttctaggagaagaaagcatagtctaatgtaggagtttatttgaatgaaatctttgtgggaagccagcttccagtgtagaagcttagcttaattaaatatgtgaaaatgaaagtggaaatgaccccttgatcatgagaatatgaaagatatctaacatgagtcacacaaatttgacaaagtttaatataatgtcaagcagtcatatgcataataaggtttatcaaagatactcttgcatatgcccttggtaggtataacatggagtcaattggaggattgaacttttgaaaaaaaaattattttgaaaacaaattcccaagagtcataacaagagttgcaaaaattcctttcatcttgaatcatctcacataaagcaattacttagatgcataaggttccctaaacatggatggttgttcaaaagcacaagtccagctgagaatcatgaatatacaagatcaatcttatgaagaaatttcattagttggaaattttatattttacttatgcttgaaccaattgttttctgaattttcagctctagtactatatcatggtggagatatacagataatagacgtgctcacctgcttacctgtaaaaattgagaggaattggagccaacactggttcggccgaaccactctggtgcccaatccttctgcaattttctgtagagtacagtgcctttcaggtgttcaaagattcaacaattttcagagtatatgcacgtcagaagctgggatatctcccccacacttattcaaaatctaaactttattaacataaaacaaaaaacaactttggcaaccattggggttaacaccaatgagccacattattcatagtaagtactttacatgattggaaaaataaaaaccaagcatctactaccattttatttatgggaaaggagacatctaattagcataatacttattctccttccatctctatgaatgcacgcttgattttagcgcacaaactgcggctaagggtaccaacattatttctaatctcagcgagttctacccctagctccgtgttgcgatccctaagctctatgttctccttgcggagtttcttcacttgagcggtgagcttatggaccgagggctccggcgattttacttcatcctcttggattttgctgggagccctcacgattggagggggcgtcaagtgatgcttcaccttcataggtggagggctacgggattctgttgccccctcattctccgatgccgtcaaaggccggagtaaacctttgccatacctaccgctgggaattcgcactcccatgatgcagaatcgctcctcctttggagtggatggagtagcggtgggtgtggtgtacttgtggagcacctcatcccctgccttggtgaatagggtgcccacatatcgctcggcgggaggcggagcgtgtaacatcccgcctctcccaggctaggcctacttacatctggtagttttcataggtcatagactgccctcacaaaccaacacaagtcagcccacttacaagactgccctcacaaaccaacacaagtcagcccgcttatatctggcagctttcgtaggtcatagactgccctcacaaaccaacacaagtcttttctgcacactttgtcctcactcatgagcaatcgggaagaatttcctgatcggtcatccatccctaaattgctccaggccaaacacgcttaaccctagagttctttggagatcggcttccggaaaagaagttgcaacttgttgatatgggtattctattaatcctattaagccctaggccgggatgtcacaatcctcacccccttaagacaccgacgtcctcgtcggttgcctgcgcaactgcgacacacacgcccgtgaaaccgcgagagtcggctctgataccattttgtaacgtcccgcctctcccagactgggcccgcttacatctggcaactttttaaaggtcatagactaccctcacagaccaacacaagtcttttgtgcacactttgtcctcactcgtgtgcacccgggaagaatttcccggtcggtcacccatctcgaaattgctccgggccaagcacacttaacctcagagttctttcgagatcggctttcggtaaagaagttgcaacttgtttatatgagtattctattaatcctgttaagccctggcgggatgtcacacagcgaccttctcatcatattgaaaaaggcgtcgcgctttcaaaataccgagctctcccatagtcggccatcacgcaggtgaatccccctgaattttttgtcttcataacatggcgaggggagagggatcgcgttgccgaacggggccgaggagggttcggccgaagccctggttcggccgaaccacggagctcaccgacgggctacaaatttgcaggggagcctgacactattgcgaggggctgcgcccacagtgcgtttaccccttccatcgtgtagttttccaccgggatcaattgattcgctggtgttggctctccgtcgagattataggtggaattagaggaggagccaatgtatgggatcaaggacttgccagccattggtgagttgtgtgtggagaatcaaggaattgaattgggatgaagaaggagtttgcacaagaggaggagaggaggaagaataagtgctctgagctttgatccgatcgatctacctccgaaagcgcatcacaacagactacaaacgagcgagggaattggaactaatcgggcgccgtcctggtttggccgaaccagtaggttcggccgaaccctggtgggtccaactggcggccaatttttccctaggcccactaaattctaaactaagcacaaaagtgacaactatacatggttttaagcatgcattagatgagatcatcatggttcatgatcgattaattcaataacatccacttcttcatctaaagtttcatttggttcaagaaaaatctttaagcgttgaccatgtaccttgaatattttacctgagtcgtcgcggagtgtgattgccctgtgcgaagaggtgtcgatgacatcgaacggtatgttgatgatatgctgatgattttcccctagaggtatgtacttggataccatgtagttcactatgttggcataccacgggttggagtcgcgaaccgtcatcagcatatcatctctcaagaagtcatttatcggctgttcctgcatgtcaatgatctgcagtctagacaaatgatctgctacagaattttgtactccctttttatccttaatttctaagtcaaattcttggagcagcaaaatccaacttaagagacgtggtttagcatctttcttagtgagcaagtatttcagagcaacatgatcagtatagactatcaccttagctcccaccaagtaagatctaaacttatcaatagcaaaaacaaccgcaagcagctctttttcagtagtcgtataattcaactgagctccgattagggtttttctagcatagtgttgacgaccaaatttggtaagatatgtacgaggttcgacattggaatcgaatcggattcagcaaagagaggattcgaagaacagagcatgcatcggctacgaaggcatcggttggagtctgcatcggctgagatggatctgacagaggacaaccgatagaggtgatgcagccgattccgatgatgatggtttcaaagatgtttctagaatcgatcaaggtgcttcacgaggattgccgtgatggagataaagctctatgatagggaattgtatctattaattaggatatttcatgtaatttccttagagatatgtttaggcaaaagtctgtcacaaagacttatggtatcttagagtttgttagagataagtgtcgagtccggcaattacatattttgtacctcgagtataaatatgacccgaacccatgtaatcaaacaacaataattcaatacaatctcggtgcatcgccaccctttttactttcgtttatttcgacgagttcttgctttcgggttgagctgcatcggattcgatcttcaactagaggtaaaacttgttatggtggcttgcgttctcggggttaatgcttccatcttcatgacattttaaccctatttatgtaattcgccgagttatcatatacatgacacaatctatgttgtgctatataacttgttatcggctggttcttattgttaggaagcaatcgaaagagttatgtgtcgcgaccgggaaaatttcattttcccgaacgctactgtattaatccccgtcccaggaaaagccggggtacaccatacaaacatgatataaaagacgcatctttattatatcgataatatttacattattacaaaggcacttaaggcctgacaatcaaaaataaacagcagcggactagcgggcctacggctccatcttcacaggcgctcaactggggtataagccaggactccacctaagacttcttctctaaagcttctcttactgaagggggaaaagatagagcaagaatgagtacacccacagtactcagcaagccacaccggagatgcataattaatgcaagggagtacaaggggataataatataggggttaagttttgcagtaaacagcatttaaaagtcacttagttgcccaaagccattttataaagacgatcct

SEQ ID NO: 6970 - DNA, 6540 bp, Oryza sativa
  unsure (1)..(6540): unsure at all n locations
cgctgcctctcccggcacagcagcgccatcctcttccccggccaggccacggcgtcgctcgaattttaacggaatgttgtcgcccgcgccggtctcgccctccgcctcgccggagttcctccggcagccccttccgccgtgcccgtgcgtcagccggcgctgccgtcccctccctcggcaaggtgacgtagccttccacctcatccactcctcggtttcgcccagaagccgccgcacatcgccgcgaacctctccatccgcctagccgcaatttccccggtcggcccttcctccacccatgcgccgtcggccgcaccaccaccaccttcagaatcgcagcggcaaggtcatcctcggcatcgccttccctccatcccaacccctccactgtccgtcgtcgtcgtcaccgttcgtcctcgacgtcgacgtcccgtcgncggcccggcacatcgtctcgcggcgccgcctccgtcgtcggattcgcaacggcgtgttccacgccgtcctcgtctccgtccagccactgccggctgcccacatcgcctcctcgctggccccggtcgtcatcgtcgccgtcctcccgtcgttcccggtcgccgtggcgttcgtccctccgtcaagccgttctcgttcgtcgtcctcgctccgtcaagtgccgcagccccgtcatcgtcttcgtcctcggctccgcgtcgccaagccttgtgccggccgcgtctcgccttcatccaagaatggccgccgaagtcgtcttctcgccgttcgtctcagccgcgcccgttcgttgtcgtcgttcccacgcctcgtcgcgtggtggtaaggatctgtcctctcactgccccgtcctcgtcctttcggtgtcgcccatgcccgttgtgcggttgtcgaccccggtacctgtgtaccggtgtcggtagtcattcgcttgtgtgtgtggtgaccgtgttagtgtgcacgcttggtagccatgtggtttccacgtgtgcagcccgcgtggtgtctagtggagtccgtttgtcggccactcgcctcggttgacacacggggtccgcttctgtcgacccgtggaccgtctctgtgtacccggtccaccgtggtcccttaggttgacatgtggggtccgcatgtcaacggcgcagccttcctgtcttttccaggctagcgcttacacatgttttacagttgcaaaacctaattataataatccgcaaatctccatataacatcattaaacttcggatgaccatgtcttggtcatacgaactctgaatcgacccgttcaagtctcctaatgtttgttataacctaaagaaccctgtgctttctttttatgtattgttattgcttctttataggcttgtagctttgcttgtgtgcttcgcgtagcttctgtcgttccggaggttctcgaagcgtgggtcgcggtcgtcgccgaaggttcggaaggccgttgtctctcagcaaggcaagtcacatcatccttgagcatattgaatcctagtttataaaattattttgatttaaattaatgcattgtcgctttatttaaattcccgcgttatcactgatttatttagccatgcctatttacctttgttatgaccttattattattgctattgttattattaccttgttcaccctaggataaacaaaaccccaactagtgggtactctattcatggttccactagtatgaatttcggtagatgcttcgctgattaattatgcaacattaggtggttttataactttagactttgggaattctcatatcatttggacagtatggaatggctggcttatgttggaattggacacacacctcccgttcttttcaaaacccccaaaacggttttaggctgggctcgaggtgcgtggttgggttttgttagtcgtacctcgggtactataaggattaagctcgggcctctgttgcaaagcactaccgtacttccacatgtctagtgggtaaggcttagtttgtggctcagtctggttataaacaaaggtacacggatggagatggacgaagtcgggggtcgatggacatctctaggacaaatgaaggctacacgagctgtggcccgatagtcgagatgtcatggcacatggctggtgtcctgctgctaggggctcaatcttgcctgcctgtcccgcaggttccggccgtaggtggggttgggtcggtactcttgtttatggctaggatgggttgggaactatgtcacgtctttcatccgtatgccgtggtggtatgtggcacgtggttacacgtgaggaagatgtgtcttgtgggtaaagatgtacacctctgatcagagtataatctattcgaatagccgcgccctcggttatgggcaagcctagcaatgtacccaagttagtgttttaattcttaaaacctgcttaacaactaaaatgtggaatggttgttaagccccatcaaccgttctcagcgcgacccctacctgacacgtgaactgtcgatattttgtatcggtaataataaaaggggtagcacacaagacttaaaagtggatggatacgaaagacaaggattttagacaagttcagaccctttcgatgagaggtaatactactcatgtttgaggatgttttcgacgtttgagatcgcgactacagtatttggatggtatggggatcgtcggtaccagggtatatgcgagattgagataaagagatagagatagggatttttataaaggttcgggccccttatctgacaggtaatagccctacatcctgttggccaaagccggtgttgctcttattcatctgaatcacacaagtacaacatttgggataacctatctagctgtcgtcgacttggcggcgagataaccaacacgtagtcgaagatagggcagtcttcctccttgaatatgaatccgtcgagatccgagatggcgctagatccctcttgccggtctccgtatacaccggatagggtatgtctagactaatctctaatgccgatatttggcggcgtattggtttgtgtatatgttgtatcttgtgtcttgtcccctctcctcctaggggggcttatatttatacccataagtgccctcttgtccaagttgaactagggagaccaatatggatacaaatcaagtagtccttgttgtttccatatagaactctactcgtccttccttatctggaactccttctatatacgaagtttgtttccgtataagacatggtatgtggtgggccccgccgagcttaatcgattactattgggtatgtggtatccataaccctaatagtagcccccgacttcaatacaaatgaacgagttaaggttctcgatcgaagactttggaacaactattgtcgtgctcgcttgaccgttctcggtatgatcagaaataacactagattcctcttattggcctttgtaggcactatattaggtttgtctaggttaatctccgatgtcgaccgagaagatacggaacatgcgactaagtctcccgtcttgttgtaatcgagaatttggattgaagtgaagaaattccatctcggcgggtataccatcgcttgattccatattccttgacaagccccatcaaccgttctcgagtaatcgagtaggcgtagagtctgcaacaaagccttgaaatctgacttgactattctaatgtctgactctcctaaaatcaatactcagaacatttgctgtactcgcttagtcgatctcggtgtagaaccatagagacacagagtcttcgacaatgttgaatagaattttcatgaaatcaacactcagaatagaatattaaatagaaatagccctcgagcgacactcaaagggtaacatgttataatacgtatggaaaaattgaaaataaacaaaatctgcgtgtgacaataaaagagtactctcgctagagttgccctcagcaaacggagtttggtacccttcctagcccccagctgtttttatggaaaaactattttccacaaagacagcttgaatcttataacaaatcatgctgaagctgacaaatcctagccccaagccatgaagttggaaaagtcaatttccaattacacggcttggttaatacgcatccattgagcactcttacatgaccaggttttacatggttcattcggttcttataatccaacaagaccttatctgttctgggcgtcccctgccgaaattcccttgggtttctcagaggcttgtcagaacagtgcaaagggacaataggaccaccttcaagacgaggcgatataagaagagatcaacggataaatattgcacatgtaaatacttacaaaaattgatgtagatgatgagacgaccaccacactggacaaagaccaagtgtatagttgtactcaacaaatcgcagaagtagtaggagaatagctacaccgctggtcaaagaccagttgtagtcataactcgaccactaaaaattgaggtgcgagaaccgctacgctgctggttgaggaccagtcgtagtcgtaacttgaccattggaagtcgtggtacaaggatcgatatgttgctggtagaggtccagtcgtagtcgtacctcgaccattagaagtcgtggggcgaggatcactacattactggtcgaggaccagtcgtagtcgtacctcggccacctgaagggaatccggagtaatagatggacggcgtcctcgcaacttgcgagaaccgcctcctgatgacgacgaagatgataaggaattattgtagtcggaggttcggctcctggacctactacctcatcctcgggctctctagaagtctggggatctcgagtttcatcgtcgtcgtgtgatgtcgtgatgtcataaccttgtttgttgtcatcctaatgtcgttagtcctagacgttgttgttctggtgacaacggcgatctattcggccttggttgtcgctatcacgataatgttgattgtcgcgttagatgtcgagagattgctgtaaccgactggtcgaggaccaggagtagacgtatctcgatcacctgaagacgaatttttaggtggtgagagatcgctacgatctactggtcgaggaccaggtgtaggcatatctcgattacttgaagatgcatttttaggtggtgagagatcgctacgatctactggtcaaggacctggtgtaggtgtatctcaatcacatataggcaattgataggcacacgaaaacaaaccgtattcgcgaaagcatctcttgttatccgtgactccccttatcaatatttgccgtactcacttggtcaatcccggtgtaagaccgtagagacatggagttttcgacaacgatagatggagttcagcgatgcacaagtgaatttagattgataggcggtgagatgtcgttacaactgtctggtcgataaccaggagtaggcgtctcttaatcacctatagaggcgctagagttggttattacatgtgcatctcatgtggccaacatgactcacatacccaacttatagccggcgctgtacatgagataagtcgtcggtcttcgttggtaggttggttgtgacaactcagcatttttcgagaatgttcacgataaagggatgtactcgaccacatcctactcgagtgctcaattgttcctgaaaaagatatatatagcagagaatatcgagcatgtacttgaaagactgcgtgaatcttctaatattatcatgatataacgagcagattaaatattaggcattatgtaaactgtaaacaagcatgatttatactaaagaaaataaagcgagcccccagtattaaaccgtagtcgacctaacaccggaaacactcgcacaataaatattatatagaaaacatgctctagttaaatataataaattatagatctaacaatttgtattgatctaaagaattggtacggtaagttgtataaaatattacgtacctttacagatatatctacgaagttagtagattgacttaaaaaatcaatataccagttaccttggttgatggtgtatacatgcagtaggcctgtagattaataaatattctcctctagccactcatgtacacgtacaagatcttctcggctgcactgacttgctttgaaaaatcaatatgtcccgtcatcggtagaactcctgctggagactgcccgcgtcgagatgatgcatgtgaagtagtttaatctgagctcctgattcatctgatgcccacgctagtcggcctcccatgaaattttgccacctgccgtctttggttaagtacgaccaaatagagggcaaattgacagaaacaaggggcgccgccatgatggaatcagattcgttgagcagctcggaagtagttgatcaggccgaagtcctccggtcaacaatattggaccattgttgcccgtggcggtgatagtgttccgatctcgtcggaagacatactccggtcgggttagatctccctatagttgaagtcattgagtagcttgttgttggaagaatccatttcttaaacccatttcatcgaacccttgaagcaccaaaatc

SEQ ID NO: 6971 - DNA, 6075 bp, Oryza sativa
atcaaaactctaaaaatacggattttcaaaaactttttaaattaaatgcatcatgccgatcttattcgcctattttatttggatttaatttcgaagttcattaatcgtgagtaaagaatagttaattaggaataaaccctaaaaacaaattgataaaataaatataatttaaaataaagattaggtgtggatagaaataaaatattatcgcgaccatatttggatcaattgaatttaaatgcgatggaataagaattaaccctaattaaaaattcaaataaattatataaataaaatatgagtaatattaatctagagtaaatccattggttggaatgacacaaatattgagtaaacttcatttatacaagatttaggatttatagaatcaaatttaaataataaataggctaaaatcgggttaaataagaaaagtcactattcattgccccctaggtgttcgatcgcgccctagcccctcctctgccacgctgcccttgcgccccgcacgccgcgcgccgctccgcctcccctctgctgtcgccatcgccatcaccgcgcatgccgtcgtcgcctcgcgcctcgtgccgccgcccgcccgtcgccatcgccgcctgccgccgcgccgacgtcgccgtgccgtcctgagcccgcgccgacatcgccacccccgtgctgcgcgtgctgccgtcccgtcgccacgtcgcctcgagccccacgcagccgtcccgtcgccgtcaagcccgcgccgcgccgcgccgcgctgtcctaccgccgctgctgtgctgtcgccgtcgccgtcgctgttgcgtcccgcctcgcgccgcgcgtgcgtcccatcgccgcctcgcgccgcgcgcccccactgccgcgccgtcgctgtcgccatcccgtcgccgccgtcgcgtcacccgccccctctcttccctcttccccttactcctccccctctcccctataaaagctccaccgttctcccctctcctcactccatctccccctcctctccctcttccccttctccacgcgccgccatcgtcgagccgccgcgtcgccgccttcgagccaccgcgccgccgccctcgtgctgtcgtgccaccgcattcgtgccgccgcgccgccgtctcagggtgccgtgccgtgcgccgtcgtcgctgccgccgtcggtgagccgctgcccccccctgtttgttgccgtgccgccgggtagagagggagccgagagagagaggaagggagaagccgagggcgagaaagaagaaggaaggaggagagaaaccgggagggagagagagagagaaagaaaaagaaaagaaaagagagagagaaagaaaaaaagaaaagaaaagagagagagaaggaaaaagaaaagaaaagatagagaaggaaaaagaagagagagataagataaaaaaaataaatagaaattagagggagattagggaagtttagaaaatttaaaataattagaatttaattatagattaattatagtcgtagaattgcaaaatttaatataaattatggattattcttggcaatttctataagaaatcaattcgcggtaataatttagatgtagttaataactaaacaaatagatgaattcttatagattattatagattatttttggtaatccctataagtaatcgattcacggtagaaatttggatttaactactagggattttacccgtgtattatatttaatcatttagtcatagactaaattaaatcgtataatatttctaggattttgtccgatatttagctcgcgatagaaatttctaacctattatatggatataatgctcgggtagattaaattaaaaacttatgacaacaaaatatttatacccgcaaaatagtttgaatcgaaattgggtttgccttagttcgcgaatagtaaagttaatataaagaaatcgactttcgcattcgacttttatttggatttatttggatttttatttgaattctaaccaaattcaaatcaatttttgcacgtaactatagagcccgagggagttgcggatccaagcgaaggtcaagacccgcaagacattgagcaaggcaagtcatcactattccctgaacatgttggtcccaattgcgaaattgttttgtttacaaataaaattgcatgcaatgatgaacatcctacttgtgattatgccatgccttgattattatttgccccttattccttcgtaaccatatttacgtatgagtccctagtcaattatgacaattgcttagaaatgctattctagaatcatgcatactcacatttatcaaatgttatatgcttgggcaattacctttgggaaggtaattgagatgcggcatgtggagacatgagcgccacattgccatgatgttgatgacatgatttgtgaaaggagaaataaaattaaacaattgttttcgactggggcggacggtggatttgggtggtatctgggaaaggctagtaccatccccggtcaattaaggaccgagccatgaagttaagcatgaaacgacccccgtacaacagcacttctcgtatgagtatagacctagcggattagatagccgagcggaggcagtatccctgcatagatggttcacccctgagtgaggcaggtgcgctacggtggggcagccgttgaggtagggccgagaggcgtgccctacatcggtgtcgccatcggtaggactgccatgagtgtgtgagagagagaacttaacttgaaccataatttaatatgtgtgtgatacttctctttctcgggagcgccagaactcctctcactgctagaaacatggacgcctagagtgcatgaggatttaagttcatggagcgggtactgccaatgcgaggttatcaaaaagctttgccgtgacgcgtctcatgtgctgggacgaggctcatgtgttgggcaatcgtggagtgcgggtaaagtgtacatccactgcagtgtgagtaaaccaaatctattcgaatagccgtgctcgcggttattgagcaccgggacatgtattacacttggctagactctaaattcttaacttgggtgggatgggatgttgcatgatgatttctatgctgatggagccactttctgagaggcgggaaggtggacgtcctcagaaaaccatgacgactcaatggcgggaagctatccttgggatcataatggatggtggatagaaccgtcattgtttaatatgaacactggtaataaaaatttgatcagtctgtactaggtcttaggtttgtgaaaagaattacaaaacttgctttgcgcaaaagaaccatagccatcctttgaatacccctgtcatatgcattgttgatgtggtggcttgctgagtacggttggtactcacccttgcaatattcaaacttaatcagaggccggagatgaagcttcggaggatccctatgcctattaccaggagggtgatcaagacgatggcgctcagtaggtcttagttacggtcgttgcctgtggtaatggcgtgccgctgccttaactccgctgccttaccttcttctgtttttggaatgtattccggaccgctcggtccgatgatttaagactatgcctgcgggcttatggtgtaatgattcgtactagacactcgtgtatgtgcacttgatatttcagctaagaattcatgtgtaccagactacttgatccagggaaatggtactgtttacacgattgattcctgttataaaaacgggggtccacagatactcttcgacattgttgacatcccttacaactacaacgccatttttggcagaggctcgttgaccaagttcgaagcagcttctcatcacaattacctcaagctcaagatgcccggcccggtcggtgtcatagttgtgaagggttctcagccttcggccgtcacagttacacgtttcggcagagaggttcacactgtagaagtcgaagaacaagagaagacaaaaccagttccaaagccgaccccgcatggcaatgtcgtccagcgacagctagacagttctgacctagccaaggtcatttcacttggtagtgatctaagcgagcaagaagttgaaggcatcctagccgtgttgaaaaagaacattgacattttcgcctggggaccagacgatgtggggggcgtttcgccagatctcataatgcatcgcctcgcagtcaaacctgaagcaaagccaaagctaaggaaaatgtcatcagatcgccaagaggcagcgaaagcagaagtgaacaagctgctgaaagcaggggtgattcaagagatcgaccacccagactggttagcaaatccggtattggtcagaaagtcgaacgccaagtggcgaatatgtgttgacttcacagacctcaacaaggtgtgtgcgaaggatgatttcccattgccccgaatcgaccagctagtggattcgaccgacggatgtgagttcatgagctttttggatgcatattccggatatcatcatattcatatgaacccgacagacatccccaagacagcgttcatcacacccttcgacactttctgccatctcagaatgcccttcggcctgagaaatgcaggggccactttcgccaggctcgtgcagaaagtcctggggttgcagttgggtcaaaatgttgaagcctaatttgatgatattgtcgtgaaaagccgcaaggctttcgaccacacatcagatttgcaagagaccttcgacaacctcagaacagctggcatgaaactaaatccagaaaaatgtgtcttcggcgttcgtgccagtaagttgttgggatttcttgcgtccgaacgggggatcgaagcgaaccccgaaaaaatcgatgccattcagcaaatgaagccaccatcgagcgtacgacaagtacaaaagttcacggggcgaattgtggcactaagtcggttcttgtcaaaagtagctttcggtgagcttaagcaataccttcaaagccccccagcactggtcagcccagcagcaggtagcgaactatagctctatctggcagcttcgcctgtggcagtcagtgtagctctggtgcaagaaaccaaagcgggccagaacccggtttactgtctctgaagccctctagggggtgaaagtaagatacatcgaaatggaaaagttagcttacgccctgatgatagcttcaagaaagctagcttacgtcctggagcccgagcctatcgaacaaccatgggttatgcactcagatggcttgtggtctcacaaagggcgggcaccgctgcaatcctaacttcgccaggaggcataccaattcagtgtgcagcaagattacagttcgacacaaccaacaacacaacggaatacgaagcagtattattaggtctgagaaaggcgaaagctatgggcatgcggcgcttgctagtctggacggactcaaagcttgtcgcaagccaagtggacaaatccttcgaggcgaaagaagaagggatgagaaaatacctggaggccgttcggtctatggacaagagtttcgctggcataacggtcgaatacttgccccgaggccagaatgaagaagccgatgcattagcgaaatcagccgtttgtgggggactgcattcgccaggcgtcttttttgaagttctttacacgccgagtgtgccagaaaacagccaggacatcatggcaatcgaccaggtcgagctgggcgaagacccggacgactggcgaacgcccttcgtcaaatatctcaaagagggatggctgccagatgatgaagcaaaggcgaaacagttgcaaatcagatctacaaagtacagcttagtctctgggcaattgaaccgaaccgggatgctgtagcccatgcttcgctgtgtctccttttccgagggtgaagaaatgataagggaaatacaccaaggaatgtgtggagcacaccaagcagcaagaactgttgcatcaaaagtatttcgccagggcatatattggccaccggtactaaaagtatgtgttgagcaaatcaagaagtgcgaaagctgtcagaaacatggtcgaagccaagcggcccctcagtacgacttgcagccaat

SEQ ID NO: 6972 - DNA, 4480 bp, Oryza sativa
agccggcgccgaggaaagagaaggaggaggcggggagaggtggtgtggccacaggggagctcgggaaggggctaaaacgagagaacgtagcgagggggttccattttataggcaaagggaaggagccggccatgggaggagcggggaacggcggcggaaaactcggccggcggccatggaaggtggccggggttggcgcgtccgttcccggcgatttaaggcgctattcaaggggaaaattaggggcaattgaagaggaaggaatggggattaaaaccccctaatcaatttcggaaaccccggtttgaatcgtgtggattttggggaggattggcactagggtttgcatgggagagagaaaggaaggaggccgggcgggaggacgacgacgacccgggggtgggacccatgcgggcgcgccgtcagtgcacgcacgtgcgcggcacgggcgggagggcgccgctctgcttgggcccggaggcggcccaggaagagaggagggagaggcaggcctgggagagagaggggaggggagggagctgggccgggagggggagggaagaggtgggccgggaggaggtggagaggcccgggagaggagggaaagagagggaggagagggtgactttgggctgggcttggcccaaaggaggaaggaggatttatttttagctttttctttttaataaactttgttaattgttgttgttttttaataaataattccgttgctctgaaaattcaagtaaaatttgagggctccttttagaccaaggagaatttaacaaaaattctccggaccacattcgaatttttcttgtacgtattttagtgtttgccaatttcttttcgaattttaattaattctattattccttttagaaaatggtttttatttcgggatgaatttatcaggacgtgacaaatccaccccccttacaggaatctcgtccccgagattcgaggaggctagcaagaaaataggttgggcggtcttctcttcttgcctgacttcttccgctccgtcttctataacaaacttgcctagcacaacttctccactctggactgcttggctcgatctcctgttgcagatggaatcttctcttcacttgacttgtccctggttgaacctttagttgacttcgactgggttgcggcacttgaagatggggcttcagatccagaacttctcatagttcatatctttggcgccaacctcatacaagttacccacttcacgttatgcgtcgatatcagcttgtcattactaggataccatgcttggcgcttccttccagcttaccaccaaatgcttcagactaagatatcccacttaccaaggataccatgtttgacgacttgccactaactgcatcatattagctttcctggtctccgggtgctagttacttctactattcgatgcaagggtcgataactttgcctttgaattatgtttctcaacagaaccaacttatcccacttgacatgctttgacgtctccccaaatggctttactgctggacttcttattgtctgatcgttatcctgccaaatctgaagcttcgttgttagatgtgattttaatctgacctctgtagactatcttcgatcatatcacttggttcataactgggaatagctcccacgaacaagcagctcggattcactttctttacattcagtttacttcccactattatcttcaggtggtcattatttagcattcaacgtattcctttacaccttcgaccttgatgagttccttcccattggatcatcttccaagacatggcattgccttgtaaccggtgcctgcacttttcactccgtgtagcatctgataccgagttgaagatttcactccttgccttcatagaaacacttttacctaggtcatcttgcttactcacgatttttttttctctcaatgacaaggtgactgttgcagggcgattactgtcaggagtcttccttgtgtgatgcagagcatgtttctgatgatcctttatcaatcacctttcggcctacatctttcctgctagagaacatcttggccaacctcttttatcaatcatctttcggcctatctctaacaggtggtactctttaatgtgggttgcggacacttctggtggcgatgaggtcctttggtctgctgcctttcagtgaaaccttgaagtgtttcgccaaaagctatactgactgtcattgcctttgatccgaaaaagacacatctgaaactcttagtccaaacaaatgtctctttggttaatcgcttgattttcttttccatcatcaggttggttattaactcgaggttagaacatagttcctctgaaatgagaccctaggtctcctttgacagtaaacaattatacgcataatcccatatcagcatcttccgaaagagtcctcatagaacttgttgcattacacatttctccctcattacatgaatactaagcattgcctaaaaggaaaggtgcttagcatcggtacattgcatccttaacatgaatcatccataaacatagcaaactcactgtttataaacatgaatatatttatttattacatgattgctgcaaactcccgattacagtgataggtagcgaattgaaaatcacaaacatggctactcattctgattctggagagatatagctagcattgttctagtggctacatcatccttgattggttctgtgatgatgtgataggactgcatattgctatcattcacgagagaaacttccttctgattgctggttgaagcggatgacggtcttctgcttggtatcgccctcctgaggttgattgccctttgctcggcctggagtaggtcggggagagacacaacttcttccatgcatgacaattctttgctgaggctgtcggtgcagagaatggttggtgctgaaggtattattgctatgatttattgcagagtcaggtggagcaggaggagcattggtgctgtggatgatatcgtcgatgttgctgttggagctgactagctgatgagacaatcgtagggttgttcgttggatttctgcggtcttggtcaacaacacactgagttggcaatccttgggcacatggtttgtaccttcgcatagaaaacatgcgaccttgcgggtgggacactcccctggtggatggtcttcttcacaatgagggcagactgtgagacacatgctagcaacgtgtccaatttctccacaatgggtgcatgcctttgattccatctcttcctcgccgagatgtcggggagactcatcttcatcatccgaggagacttgatctgacccttcactatcagatactctgccaccatggcttaggaggtgctgggtcaattgtcgtgcacctcggaaggtatttcctctttgacgtctaggaatagttatccctactggagtccattcggtgctggtaatagttatcttacgtacttcttcagttcgcatcggtgcttttctcttctgagtcttactcttcttgcctttggcttgcttagtacgtgaccccacgtggtacgaaaggctaggaggaaagcatttccggggattcaatggattctctccattgggctctctactttgcacactaggctgcaagcttgacttggtgcgagaaggctggtttagcgatgtctgccctgctaaaccaaaggaagggtcttctttggcatatacccatggacaattcagggcatagtgtccttgttctctacaatcatgacaaatggggacatcctcttctggcattggaagctcattgacctagggggcaaatgctcgatcaaacacatactgattttggtcttgacttcgaaccaatggtagctgtgaactaagcagcatgcttggaatggaccaagggtctgcccttgttaactctcttgaggccagtggtggattgagttgaaaacttgagttactagaggcatacccgctgacattctttcctttttctctattaaacatctattacagggattgaggtgagagaggaaacaagccaggaaagaatagaccagaactagagacaggtccttaaaggaactaactcttcttgttgatgtgttgtttgcttcacttattctgcaagttgattaagcaaacaacttagcatggttacatcacaacccaccgatgcaaaccacgcgctacacacacaagcaaggaaacacatgacaaacgaaacactagagggtggcttaggttctgcgacgggttctccaagatcttcactgcttcttccactttgctaacaaacacaacagccttctggagcttcggcagacaactgacgatttcttcttcttcgctaagttgaccatctagtactagttgaaatccgaagaaggaagaagggagtaaaccttttgcaaatagcattaggggaaggagaaaaaaaaggaactttcgcatagttttatttataaaatatgcccttaggttttatccat

SEQ ID NO: 6973 - DNA, 23033 bp, Oryza sativa
tatatatatattataatagaaaaataaagtcaaagatatattttgtagactgtgtcattttacaaaacgtcaattaaaatgaaactggagggtttggggtatatttgtcgccttcccttgagtgcggccccgtataggctgtgttcggggcacatccgtctccgagcacacctcaccatgggttgtgcaagcacatctagctccgggtgcggtcccccgtgggatgttcctggggcacgtccgcccatgagtgaggtcccatgtgtgttatgctcagggtacatctctcaccttcccttgttcgctcaggcagcaacaatgcattgacccaatcaagcctcgcattcaataagaggtgacgtataccaacccagcttgcatccgggacgacaggcgacaaaacggctcatgccgcctctaaggatatgccatcatcaccactaaaaaggtacggagcatgggcagtcagacaacatgcgcctgtaccaggctacagtagtgcggtcccacctagcctctaaagctagcaagcgggcccgacaaccatcatggtgtccatgtcacctacactaagccacacgtcgaatgaaggatcaaggcagcggaaaaaagctgctctacgtcccaccagcacaatcgacacgaacgttcaggtccaacagtgggcaccaccaattgttggggacaagaccgaccctaaccacccctttgagctgggttccatctgtgtacaatgtacgcatgattgggcactgtgtaatcccctcgatatataaaagaaggatcaatgccactgagtaattaatggggggtattggaaaactactctcagtgagtctaagttagattctagaaaaaaacaatgaagacggattcatcatcttccacttagaacatccacccaagaacacattgtgaacttcatcatctagccatgaacataggagtagggtattatgcttccgagcagcccaaacctatctaaatgatcgtcttttgaagcccatgttgatccacgtgacacgaatcgtctcgcttccgcacacccacttcaaggctgaatccaaaaaggagtaccactcctctctgctagaggagcatcctgctccgaaaaatacgtatgaggcaaaggctttgttgatgtatggccgccgttgatcggtacactaggttaaagggttaatttgatcggtgccactgtaaatgtgtctattcagataaatatcattacaattcatctatttgtagctgtgctattcaaattttacaaaactgaaaccataccatctctgtcacgttttccttcttctttcctatctacacgtggaacccatccatccgatttatttctttctttcaccctcccttatcttgagcactagggcatctgtgagacggccatgctccagggtaagggatccagggcgtcgtcgtgcacgagcggaaaaagcgtcgggacgagaccagcttagggcgtctagagacagtagctctatggtagcgatggcagtgtcacatcttcggtgtccttgtcctttcccaaggatgcggcgacggtgctcgacggcggctctcgaatcgggagatcaagaggacggagctctggtctcggacatgctgctgcatccagacttggtgagctgttgctagacatcgttcgcgttttggggaggagcaggagcagcaacatcagtagcagttggggaagatgagttgttgtgctggtggttgccgtctgcatcttggggaagaacaggagcaatggcagcaatagcagtggaagggagaacagggggatggaggaagaagataaatgtgatgggtcggtcccatgtgcagatgggagagaagatagaaaaaacgtgacaaaaagttatggttttaattttgtaaaatttaagtgattcggttacaaataaatgaattataatgatatttatctaaatatgcatatttataatggcatagatcaaattaaccctaagctaaaacacctaaccaaatgtcctttgcagctagtcacattcgtgagcgcaaaagagaattaaccaacataacgctaggctaactataacaaaagcacatacaaataatataatatataatgccatggaaagttggtgcacctaggatttgccctgtttattgagctcaaactcaaaagaaatggttccatattctagtattagctgaggcattttaacttttgtactactaggagtaattctctgccacgcagcaagaaaaagatgtgcagaaggctctcaaaagttaaaccaacgaaaggataaggacatatatatatgctctttacccaaattgtttgtttttaaataacagtagccacagggccacacactgcgaatctgatcgcacacagcatacgaccactcctgagtcctggccatctaatttcacgcgagtcaaagcccatccagtcaattggctacgatcgagaaatcgaccgtcctccctaacaacaaattttcataagagaccaaccaagatcaggtttttttttggggcccgtctagacgctatctcgcgatcacattcacatctcgcatagttgcatggcaggcgagccgatggttagagaccttggtgcccaaagacgaggacgtgtgggcgtgtggcagcatcaagcgtggaacattgcagtactgcagcagggccgtccagtcaaattcgggcccctgtttaaaattgaaagataaaaacttaatttatgatataatataaaaataatttatactccgtaatatatttcatagcaatctagaatggtctaaggccctgtttgattcagcttagcattattataatctaacttattaggagtaggctgaaacaaactggtagattattataatctataagctagattacttttttcagattattgagtggctaaagacccactacccctacatacttgagaaaaattacccacctatgccatcaaccgaacagatagctgagggcattatagactttagccattcaaacccaacaatccatgccttcaataatccatacaaacaaacaactcacagcttattctatgcctgcttattataatccagcttatagtaatctggcttaataatctatattataataatcataagttgaaacaaatagggtctaaaatgataatccaaaattagcgattaccgaactcgaaattaccagaaagaattaggtcagggtgcgtcaggcggcacgaccgcatgagagagagaggtgaggcgtcatttactcctctcgttcgttgcgattggcgattggctaggtccacagtaggaggcgattcaagattacgaaccagcgcaactgtgcgaaccggcaaaaggcgtaatcgaagctataacgacaagaaaaataacaaattttcggaactatttagattaccaatttacttattaagttgtatatctagtgttgaggttttgagcctagaagacccctgaaaattaggagccctgtacagacgcgctggtcgcacgctggtagggacggccctgtactgcagtgcagcgggggtccggaggagaaggggtccaggtgccaactgcagccatccagcccacgggaaaagggcaaagatgcgccttgcaagttgtggaaaatatatattctccaaaacggcaacagctggaggaggcggcgtttagaaaactcagatgagagttgtggatcagttacgtgcaagaaacaacctccggcacaaatggggcgcagatatgctcgaggcaagatgttaaaaaagccacaaaagttggagagaacttttgcttgaggtggatggattcaatgcatatgtttagagcttgataggtccattttaaatttgatttgagctgccgaccactcgtgatcgtaaagaacaattatattttaccgtttcaactattgtacaagcgtgcacttgagaaaaagagctatcgcccgagtaaaaaaaaatcccaatagtttgctacacgtactaactgatcctgcatgcgagtagggcattctcattttagactgttccgttgggtaataaggtgggttccgatcactaggagagatattatcttcaataccggtttttaacccctattaattctggttatagcagccgagactaaatttcttgatgtttagttttattagtaccggttgaagcatcgttactaaacatatatgctaagtcaaaaaaaaacatgaaaaatccctattaattctggttgtagcaaccgaaacaaataaccggtactaaagttgttgatttttagttttagtatcggttgaagaaaccgatactaaacatttatactaagttacatatgtgtgatgtgggattcgaactcaagatatctcacctcagcccttaaacacgttaccatctgttggcggatggcatgaggcccttcaaccaagtctgccgaaacccgtggcgtaggctatggagcaagaatggcgtgaggcgaagagtcgtatgagtgccttgccgggccagaggcgtctcaagcgaagggtgcaaggcaaagactatccgccgagggaagacgacttcgccatgataagttcgcccccgcgagggccgaagaagcctttccgacccatcaagcctaggggttataaggccggcgatcgcctgacggcccatcaggggcccatgagcccctataacattatgtacccctgtaaatatccctttcgtaagggtaatcatgtaaattcccctgtacaacctaaaccctagtagtaagatcctgtaatggggctataaatagtcccctagtgccatgtaatggggggatggaaagaaaagaattcaaaagttcaatacacttcgtttccttccaaccactgttgagtaaccacgtctttcgacgtatgcagttgtcatttcgacaacagctggcgccgaccgtggggacctctgagcgaaaccactgagagcgaatgccaccgaagagggtcgtgaaggagaaggttgccaggcggaaggggagcgacgccggaccggacatggccgccgaggaaggagcagagcattcggcgcccgtggccgaagatggaggagcactagcgccgtcacaaccgccttcggcccctgcaacctctgtgcgggtgccgaacgcggccgacgtggcgaaggcggctgcggtggcaagggcgctccagaccagggaggagatcctttcgacaagccaaccggtgatgccccaagccgctccatcgcagccggcagcggccccaactgcgctcgccgttgtacaggcccaaatcagccttgaccccgaagcacaagccgaagccgacatggaagccgtgtggcagaacatgacacggctccaagacatgcttcgccaaatgcaagagcaacaacaagcatatgaggcggcaaggcggaccaaggcctcgtcggctccaatgcttcagtattcggcagattatgtcccacctcaagtccatccgcaagtgacgacccagccctttccgccacaagccgcacaggcgccggtgtacttcgcaaggcagcatcaaccacctggccaagcgccacaaacagtggcggaaggggcttcggctctgcaggcgcaactccaagctttccttcagcaactcaaccaaccccactacatttcaagtacaaccccatcggctcacccggaggggaatacaagtcagggtgcgcctaattggttgccaccaattcagccgggcctgggagtttcgccgtggaatcaaggaccgcaattcgacttcgtcaacgctgctcaggcaccgaccgttcgacagcaagctccaactccagtcttcggaacaaaccaagcaccaatccaagctgccatgatgtggtcgcagccaatttttgactcatccatggcggctcagcaagtacctccagttggagccgggcagtcgaatgccacggcccaacctcacgcacaagctgcgattttgcccttcgccacaccgtacccgcagcaaggtgcggtaaacagggcgggaggcgaaaaggggctaccactgagtgggggaatcaagactcgtccaataccaccccagttcaagttcctgctcgtcccgcgctattcaggcgaaactgacccgaaggagttcctctccatttacgagtcagcgatcgaagcggctcatggtgacgaaaatatcaaggcaaaggtaatacatctcgctctagacggcatcgcccgttcttggtatttcaatttactagccaatagcatttactcatgggagcaattgcacgattcttttgtccttaactttcgaggcacttatgaggagccgaagacgcagcaacaccttctcggcattcgccaaaggccgggggagtcgataagggagtacatgcgtcgcttctcgcaagcccggtgccaagttcaagacataaccgaggcgtcggttataaacgctgcttcggccggtctgctcgagggcgaactcacaagaaaaatcgccaacaaggagccacagacgctcgagcacctacttcgcatcattgacgggttcgcaaggggcgaggaggattccaagtgacgacaagctatacaagctgagtacgataaagcctccgtcgccgctgttcaagctcaagcacaagttcaagttgccaaaccacctcccctctctattcgccagtctcagccggcaatccaaggatagccgccgaggcaaggccaagcccccatgacttggagaaagttcagaacagatcgggcgggtaaggctgtgatggctgtcgaggaactgcaagccctctgcaaggagttcgacgcccagcaaggaagcaaccatcagcagccagcccgcaagaaagtccgaaaagacctccactacgcctttcacggacgctcttcgcacaccacggagcaatgccgaaacattaggcaacgtggcaactcgcaagacccaaggccgtagcagggaacaactgtcgaagcaccccgcgaagcagttcaggagcaaacacccctagccgaacaacgccaagatgcacagcgaaggataatccaagtgattacatgggccgacccgccaagccagttatccaaacggcagaaaaagatgcagatccgtatggtccacagcatcacttcggcgggcaaaggggcgccgcaatatctgaaccagctaatctcttttgggccggaagacgcagaaggagttatgttcccgcatcaagatcctttggtaatctcagcagagatagctggtttcgaggtccgacgaatactggtcgacggagggagttcggccgacgttatctttgccgaagcatatgccaagatggggttgcctacccaagcacttaccccagcaccagcatcactccgcggtttcggcggagaagcagttcgagttctcggccaagcactcttgctgatagcctttggctcgggggagaacagacgcgaagagcaaatactgttcgacgtcgtcgacatcccgtacaactacaatgccatcttcggccgtgcaaccctgaacaagttcgaagccatttcccaccacaattacctcaagctcaagatgcccggcccggcgggggtgatagtggtcaaggggcttcagtcttcggccgcttcaaaaagcgatctagccataatcaatagggcagtgcactgcgttcagaccgaaccgcatgaacggccgaagaacacgccaaagctcacccctcacggcaagataacaaaagtgcagattgatgatgccgaccccacaaagcttgtatcactgggggacgacatgggcgaagaagaagttgagagtatgctagaggtgctcaagaagaacatcaacatcttcgcctggagccctgacgaggtgggggggggggtgttccggcagatctcattatgcatcacctggcggtcaagccagacattaagccaagaaaacataagttgtgcaagatgtctgccgaccgccaagaagcggcgaaagccgaagtacaaaaattgctcagggcaggggtaatccaagagattgaccatccggagtggctggcgaatccagtgctggtgcggaagtcaaatggcaaatggcgcatgtgtgtcgatttcacagacctgaacaaagcgtgtccgaaagacgacttccccttgccacggatcgaccagctcgtggattcaacagctggatgcgagctcatgagtttcctggacgcatattccggctaccaccagatccacatgaacccacttgacatccccaaaacatccttcatcactccgttcggcacgttttgtcacctcaagatgcctttcggcttaaggaacgcaggaacaaccttcgccagactggtgtacaaagtccttggcaagcagttggggcggaatgtggaagcttatgtcgacgacatcgtcgtaaagagccgcaaggctttcgaccatgcgattgatctgcaggagacattcgacagcttgcgcgcagcaggcattaagctgaatccggagaagtgcgttttcggtgtccgcgcaggcaagttgttgggtttccttgtttccgaaagaggcatcgaggcgaatctcgagaaaatcgatgccatccagcaaatgaagcctccgttaagcgtacatgaagtacaaaagcttgtaggccgaattgcggcactcagtcgattcctctcaaaggcagccgaaagaggtctgcccttcttcaagaccctccggggcgcgggaaagtttaattggaccccagagtgccaggcagcattcgacgagctaaagcaatacttgcaaagcctgccagccctgataagcccacccccaggaagcgaactgctattatacttagcagcttcgccggtggcagtcagtgctgccctcgtccaagaaacagagttcgaatagaaaccggtctacttcgtctccgaagcactgcaaggagcgaagacaagatacatcgaaatggaaaagctcgcttacgccctagtgatggcctcacgcaaccttaagcactacttccaagccaacaaagtcatagtgccatcacagtaccccttgggcgaaatactccgaggcagggaagtcacgggccggctcagcaagtgggcggcagagctatccccgttcgacttgcattttgttgcacgctctgctatcaagtctcaagtgctagctgacttcgtagctgaatggacaccggtacttgccgctgaccccgagcccgccgaacaattttgggtgatgtgctctgatggctcgtggtcgcacagtggggcgggtattgcagcagtcctcttttcgccgaatggtgtgccgattcggtacgcagcaagactgcagttcgacacaaccaacaacgcagcagaatacgaagccgttctcctgggcctaagaaaggcgaaagcactgggagtccggcgcttgctaattcggaccgactccaagttggtagcaggtcatgttgataactccttcgaagcaaaagaagaaggaatgaagaagtatctggaggctgttcggtccatggaaaaatacttcactggtataacggtcgaacacttacctagaggccagaacgaggaagcagacgccctggcgaaatccgctgcttgtggtggcccacattcgccgggcatcttttttgaagtcctacatgctccaagtgtgcccatggacagttcagaagtcatggtaatcgaccaggagaaactgggcgaagacccatatgactggcgaaccccatttgtgaaacaccttcaaactggctggcttccggtagacgaagcagaagcaaagcgtttgcagctcagagccacgaagtataagatggtctcgggtcagctttaccgctctggggtacttcagcccttacttcgttgcatctctttcgccgaaggcgaagaaatggcaaaggaagtacatcagggactatgtggctcgcaccaggctgcaagaacagtggtctccaaagtatttagacaaggagtttattggcccactgtgttgaaagtctgtgttgagcaaatcaagaagtgcgaaagctgccagcgtcatggccgaagccgaaccgcgccccagtatgatctgcagcccattgcgccaatatggccctttgccagatggggactggacatcatcgggccgttcccagtggcgcgaaacgggtataaattcgcaattgtagctgtggaatatttctctcgatggattgaagccgaaccccttggggcaatcacttcggcagcagtacagaagtttgtatggaaaaacattgtttttgccgtttcggagtgccaaaagagttcattactgacaacggcaagcagtttgactctgataagttcagagaaatgtgcgaagggcttaacctagaaatcaggttcgcgtcggtcgcgcacccgcagtcaaatggggcggccgaacgtgcaaatggcaagatcctagaagcactaaagaaaagactcgaggaggcagcgaaaggcaaatggccagaagaattgctatcggttctctgggccctccggacgacccccacaagaccaaccaagtttagcccgtttatgcttctttatggcgatgaggcaatgaccccagcagagctaggggctaacttaccaagggttatgttctctgggggcgaagaggggcgcgaagtatcgctcgaactcttggaaggggtaagggtcgaagcgctcgagcacatgcacaagtacgtcacaagcacttcggcaacttacaacaaaaaaagtttgacccacggagctgatgcctggtcatcttgtcctaagaaagaagacgaacccagtagcggttggtaagcttgaatcaaaatgggaacgaccgtaccttatcaaacacaagtccaggacgggatcttttcgcctaacgacactcgaaggcgaggagttcgaccattcctggaacgccgcctctctcaagcgcttctatgcctagaatgggtggcacccaaatcgccaacttgtaaaaatgtacatatagtcatgtaagcccttcggcactatgtaagtctttcggcaaaagaaaaaaaagaaaaaaaaagagaagagagaaaaaagagaaaaaaaactggatgtagggctattatccactatggaggaccgaaccagtataaaatctctgtgtcctccgccttctttttatttttcgtgtgattgataatttgtggaaaaaccccaaggcaaacgcctgatcagcgaaaaaggccagggggtgaaacgaatcggccgaagcattgcttgccaaacgttgaaaccgcaacagcttgtctcggaaaaaaaatagccgaacaacgttacgaccgatcagcataaaagcaaaagcgtttctctcgacacagaacgctacagatcgaaaacgaacgacgaaaagctgaaaagtcagtacacctatttcgctaatatacgcaaaggggccggcatgttccgacctaacaaaagcacaaaatgtgacgatgcgaaaaatagcgaaaaggaaataaagcacgttctttattaacttcgaaaaaataatcgaagaatacaaggttcacaacccgatacaattcacttcacaagtaaattacatctttgcccccgtaatcattatccctccctaaggaatggtcagacgaactaggttcgtcatcactactaatatcatacacaaccttaagaggagtagggggcgaaacacagactaaactgtaacgacgctgaaagatcgattcctgacgtttagttttctgatggtttcgccaaaagcgagccatatcctccaaacgtcttgaatgaacaagatcgtaatcttctaaggttcgcccggggtgcgcccgcagccaatcggcaaccttgaaaaccttatagctgcgaccgtttatctccatttggcgataaacaggccgaaatggacatcgcaccttcggcagacccttcaacgccacaaatttctcgttttgacttcgccagctcccagaagggggccaactgcaagattttcagcgaaccccctggtagacagtgcagaaaaggcaaaacacaacttacatagtaagaataggcaaaagaaggggaaggtatggcataatgcgaaatgagcgaaataataatatgccaaaaggctttgatcattaaaaagtggttaaaattgtgtcatacagtccaagtatgcaaaaaggcctctgctaaggtttagcggcagcttgccgaatatacaacggttcgccacatctagcgaacaccaaaagaaaactatgaaaatctaagagaagggcggagggcctcacacctctgggtggtcctgggcatcgcctccaccctcttcggccgccgcgccttcctcttcacaaaggtccgccgcctctgctttcgtcagctgctccaaaaggcgcgccttagcggcggagcggccgtccttctgccagaattgttttcaccacgcacgaagtgcaggcgaaatgtcttgcgcgctgatttcccaatcccccttcgcgtacttggggaactcggcgatgtgctcgcagccgaactgctgcaggaggcccatggtaaaggccgctgacacgcgcgcacagcagtcgccgtatgcggtggcgcagtccgaaaccgaaccaccagcctgttgggtccattcggagaagtcgaaggctgaggcatcttcggaggggacatcccgcactttcatgcccatatcagtaagggcgaggcgaagcgtttggcacgctgtccgcgcggactcggtggttttcaccatctcccgcgaaaaccaccgcgactccaccgcagcgcttgctttggccttgcgaacctcctgccgaagagcctccatcttcggctcggtgaggttgtaataatctatgagcacggcggtgtgggccttctctttctctagttcagcctttaagcgatcgacttcggccctagcttccttctcttttccagttccgattggagccgcttgtttttggccttcgcctccttaagggtgttggcaagggcctccatctccatatttttgcggcctaattcatcatccttggcccgaagacggcttttgaacccgtcaaggcgggctcgcacagttcgctctgttgaacagtgagccgcgaggatctgggtgcagaataggagcggcgaagagaacaagtgtcagttgtaaaaaaaagagagggagagtaaaaataaaaaaaagaggggaaaacgtacccgaacagccaggctttttatagcagagcacccctcatcgaactcattcagttcggtgaacaatctcggggcactggcgggcagtacaagattgcttaccccctccacaaaaggaaggaggtccgcccgcgtctcgaaatcgccaggggcgaagcggggtaacgggagcgaatattccgaagcggacgtctcaacgaccgctctctttcccttcgcctcaatcagcggcgacgcaaccggctgacgtgaaggactgccgaatactttcgccgcggccgtgacaattctttcggcagaggccgaagccccagcggcggtactaccgcccgctccagcggcgccgagtggaggaacgggggcagccgaaagatccaggctgcggccagcaggcgaagtaggagtcccgtcggaggactcatcatctctaaaaacgcgagcgacatcgacgagtcctttcttcttagccacctttttgacaagacctcccttcgccgctgcacccgaagagaatgcaactagggccttcgccccgtctaagtctttctggagaaggggggagctattcgactccaccccggtctcgttatggccaggactcagagtaggggtatagccgggagtctcagcgcggcccccgaccgcctcgcccgttgtcttctcgaccatgatctccacctcctcttctccccccctcctctttgccattatgttcttcggcatcctcctcgtcatcagcatcagagtccgacgaagcaggagccctacgcttcctaggggcaagctttacctgaccgcgcatccgtttccgcgaaggccctgtttcgtcatcggtcttgtggagattcgcccggggaggcagttcgccattgcaaacccggttcgcccgaccagctgcctgccgtgtcagcaactggctgaactcaacgacagacacatcgccgatcatcttgcgggattcggcttcagcttggtcgagggttagcactgtaaaagcaaggagggggaatcacgattaaaagtcaaacaaggcaaaataataaagcacaggagtacagcaaaacaacagtcttactgttcgtccccttaggaagaaccaagttcggtaaactgtcaacctcttcgctttgctcaaccgtgacttgccatgactgggagaggggaaagatgcgaagcatacagaactcctccaccaagtcacgacagctaaggcgggagcaagccttgcgcagcagaacgaaccgcgcctccgtagcgccgtccacggcgatcttgggtttccggttcggcgcaatcgccctacgccggcaccggagggctttcgccgattcagaaccagcctcgaaggggatggtgtgatagaaccacctcgccatccaatggcggtcccacttcgacatggcagcgttcaccggccagagatcggaccgctcggggcgaacgttgaagttcacactcccgaacacggtcttcctcgtcccagctggggtaatcaccgtcttcgagttcacggtggcaaagaatatggcgccgaaaagctcggcgttaggctcaaacccggaagtccggcatgcccagtcaaaaatagcggtccgaacaagagccgacgggctcggctgtggaagttccacctggaagaggcgaaggatctccggcaacaacacgttgtagggataccgtagccctgcctcaaaaaagatggcgaacaccaccgtccgattgtcgattggtttcagcaccatggctttccctagagcgaaagcctgcccctcaaccaatgctccagagctgaccagcttcgccagctcgacgtcgtccataagagaaacccccaaaaaggcggtgctgtcgtcatcgactcggccgggatccagccctttcgccgaagcagggtttggcctgcgaggggccatggcgaacggtgcgtttgcaatggcgaagaaagagaatgggcgaaatgcttgaggggtcaagagattccgtggaagaaagaaatggaggaagagaccgcccacggtaaaatggcaagtgtggcggtgaaaaggaaagagcggcgggaatttatagctcacctgggcgaccgttcgcctacccaccagtaataaagcaatacgtgtcgcaagggtaggcgaaatggtaaattcccaccatccgagcggcacagtaaaaagcccacgaagggaaagcccaatactgttccgttcggcccgggaaaagaaaatatataaccaccaatcgcaggaggcgaagcgtggcaaaataataccagccgcacaagtaacaaacttcattcgcaggaataatgtaggtttcggcaggagcatcggtcgaaaggagggcgccgcataccataccacatggtttgcacggtctcggccgaagctccaatctcacccttgtccgtgaggggcttgttggaggatggcatgaggcccttcgaccaagtctgccgaaacccgtggcgaaagctatggagcaagaacggcgtgaggcgaagagtcgtacgagtgccttgccgggccagaggcgtctcaagcgaagggtgcaaggcgaagactatccgccgagggaagacgacttcgccatgacaagttcgcccccgcgagggccgaagaagcctttccggcctatcaatcctaggggctataggaccggcgatcgcctgacggccctttaggggcccatgagcccctataacattatgtacccctgtaaatgtccctttcgtaagggtaatcatgtaaattcccctgtacaacctaaaccctagtagtaagatcctgtaatggggctataaatagtcccctagggccatgtaatggaggggatggaaagaaaagaattcaaaagttcaatacacttcgtttccttccaaccactgtcgagtaaccacgtctttcaacgtatgcagttgtcattttgacaacaccatccgttttcttttctaaactaaccctgtaggcatcttcagtaccggtactaaaaatatctttagtccctgttggtactaccaaccggtgctaaagatacacttttagtaccggttggtaagatcaaccgggactaaatatcttttttgggacttgagctttcagaaccgttattaaaaagttttcagtactgattcttaataaatccgacatatctgtggtttggggcaatggataaaagatgagttgtctagtagtggttatcaaatatgataattgctatagtgtactccctccatctatcttgagaaaatcctttgtatacccctaaaattatagctaatcctttttatgcccctaaattttgcgcctcaaattttgattttgatcccttccattccatactcctcccatcagttgaccgtgagttgatcatctaaattctataaaaatgacaattttaccctttgaatgagtatagaaatttatgaactatattattgaaaatgtaaaagtttgttatgggtttgctgtgcgatacactatttatgacaaaaataatttttagataattaaataaaaaatatgtatttattttattttcaaaaattcataaaaaattagtagcaatcaaataaagataggactaccaatgctcatgatatttttttttatgaatgctcttgataaaaaaatttcactgccgtattaaaattttaaaaaataattttaatttatacatttgttttattttcaaattaatgttaaattttttcactaattatttagtcccattaatttcataaaatacacatactgtgaactcaaacaaaatttccaattgttattcaagctcatattcaaacctaaatcatcaaaatgtaacaacgaaatgaaggaaaatgtaacgacataggcatgaaaaagatcaagttaaaatttcaggggtataaaataaatcgggtaaatattaggggtgtcaaaagggatcggttgaattttcaagggtacacatggaatttactcatctatctattgctccctctgtccatgaatttagtggattatggaatgtaaaggatttttgttaagaagtacaacagcaataaaaaattgagtactcccttccgttcccatcagaaaaaaaatatagagaaaagtacatgtagtattactctatagctctgaatctaggccctgtttagttcccaaaataaaaattttcacgctgtcacatcgaatgtttggacacatgtatagagtattaatgtaggcgaaaaaaaccaattacacagattgcgcgtaaattacgagacaaaacttttaagcctaattgcgccatgatttgataatgtggggctacagtaaacagtaaacatttgctgatgacaaattaattaggcttaataaattcgtctcgcagtttcctggcagaatatgtgatttgttttgttattggactatatttaatactccaaatatgtgtccgtatatctgatgcgataaccaaacccaaattttttccccaactaaacaaggccttatgtttatttctaagtctaagggccagcttagttcacgaacgaaaatttttggcgtgtcacatcagatatacggacacagaaaaattcgtctcgcaatttacacgcaatctgtataactagtttttttctatatttaatactccatacattatccaaacattcgatgtggcatggtgaaaattttttatttgggaactaaagagggcctaaatgtatactttctacacttctttcattctaaagatgagtgtcttttcacactaccaaatggctcagatgcatttcttcctcttccttaatttgggctatattgggcataataccctataatcttcgacagagggagtatatactaaaaatacattaaacttcttaaaaaggctctcaagcttacatgtggcattaaaaaatgctctcaagtttacatgtggcgctttaataaattagataaaatgctaagaaaaaacaaaacatatcacttgattttcacttaaattggtgggtctaatattatgaactattatgttatattcgcagcaagccggcatctcgtctactccgagcaccagctgcgaatcggcctcatcggccgccgctgccgagcacctgctgctccaccaccacgagctcgacaacagagaacttggcggtgagcctcaccttcgcgtcccggatgatgcgcaccatgtcaacgatgtcggcccccggtcacctcgcctctgctccccgtcgctgccaccgggtagaagcagttgctgtagaaccccatcgccgccacgccgtccgccttgagaatcaggtggcgcgtgttggcgaagaagcagacgcgcatgatgcactcctgctcggcatcgccggcggcaacgagagcgcgggtgcgggcttgccatgtcttggcgacacagacgtcgaaggagtagcagcggtggccggtggacgcgaagaaggtggacttgaccttggcgatgtggtccaggctgaggtcgacggtgaagtagcggaggttgagcagctcaagccgcggcgatggcggtgccggcatcttgggtgggttagggatgacgttgcgcgcccacaccagggacacccatggcttggcgaggccgcgcgcgtagtcggccacggcattgatgaactggccagcgccggcgaaggagctcgatgtcggcgagggagctcagcggcggtgagggagggagcttggtggcggcgaaggagctcggcgccggggatggatggatggacgatgaaacgaaggaggaagggggatgacgacggcgtgagaggaaaaagtgacgggagtggcatggttccaattttagaaatttctagtgatatgatgaatagtagtggcatttttgtaattaggcaaagttacattggcatggatccaattaacccataataatatgggaggtgatatggaggatgtaatatgaagagaaaatcccttctatacccctgaaattgtagctaatctcttctatgcccctgaattttgcttacttctttgtatcctcccaaaatttgattttgacaccttccatatccctcccgtcagctgaccgttagttgatcgtctaatttctataaaaataaccattttaccctttgaatgaacatagaaattcatgaattgcattattaaaaatgtaaaagtttgtcgcataagactattatagttatgagtttgttgttgtcagggttacggataaggtatacactctaccattggatatacgctttacatcaatatggtatatctgcgcgtgtacggacgtcctctgtatgcgctaaggaaattcatcacagagtccatagatggagagattcctaccaggataggactgggtcgtcactgtatcgtgtagggtccgatgtctctgagtccaacttggagaccacctgacctgcggtataaaagggacccctcgggagaacctaacgcatcaaatctcacaaccaagaccaccacagcttacgaagccggagcctataggagccaagttgccgggtgatttagtcgaaccaactcgactacgatctcgtcagtatcatcgagttctgttattccctcgagttctgttattccctttgtaacttgtggtagggctattacctataaaggggcctgaaccagtataatctttgtcttctgtttccttgatgtcatactatgtagatcctcgtaccaacgtaccccagtaccctctatatccggtctatgggtatcccctgtcgacagtggcgcgccaggtagggggccttggtgctcaaggttctactactatgaaatcaagcctcgtcgacaatagcatcaacaccggcctcatccaaggagtccctacttcaacaatgctggtgtggactcaagtcggcgaaatcgtcttccctatttacaccacaataccgatctcggctagtccatcaatgatcggaagcgagaacaccgtggctataaccccgggcgactccatgtcgaaagatcctcccgctgtagcggagaacggaacgtcgatgacatacgagcccgagaaggatcctagtgcggccaaaccttatccttccgacaaggaccatgcgccgacaaggacaacttccgaggtgacaaagccctggtgtcctatccacaagaccaggaaacacaatttgcaagcttgttgggtttttctcaacgtacaagctaaaattcatgcctgcaaagagcatggaatccagcgtgcttctccaactcgtgatgtctattgtcctattcacaagacgaagaatcacgacttctcaagctgcaaagtccttctccgtgccatgaagacgccgcttcctaaggtccagcaatcaaaaatctctcttagggatgcagacaaggaacaaggagcgacgctgatctcggatcgattcgttggagtgattgacatcgatccccacgagccatcagtcctatacttgctcgaagactatggctcatcatcctccagtacaccacgcgtcgtatttgccattggtgggaccagcacgtccacgcacgctaatgcataggcggagaatcaagcggtcacgccggcccaacacctcggcaccatcaacgcaatactgagagaaaacacctatgatcccatacttaacgatgatctcgcatgatggacagaatgactatgggaatcggttgccaatctcagtaacgcgttcgaggaggccgctaccagagcgcaaccagaacatccgacagctggcggtgctgatggcgaaccaccggaggaacggacgtcgcctagacgagctacccctccacctcgcggcaccggcgatctccgcgaccatttgaatggccgccgagaagaacgacgtgcgtgagacaacgagaatcgttcccgacatcgtgtctcttcacggcgtcgcgagaacgaagagcgaggaggccgctcaaacggagatcgacaccatgataatcgtcacaaccgccacgaccgcgacgatcacgaacagcggacgccggaagatactgttcgaggacgccgacatgacggcgatgataatggggatcggcgccaggacaacaatgctggacaacgacaggactctcaagaacccgaacgtcatcctcggaatcagacaccggagccgagtgacccatcgtcatcgtcatcatcctcttcatcctcgtcatccgatagacatccacggaggacatacgatcgctgataacccaccgcccccagtgccgggtgtagagctttcaaccgttccctacgtgatgtccgatgtcctgagagattccgacctggggcaatagagaagtacgatgggagtaccgacccagaagaattccttcaggtctactccacagtactatacgctgccggagcagatgacaatgcgttagcaaactatttgccgacagcgttgaaaggttctgcgcgttcgtggctgatgcacctcccgccctactcgatttcttcatgggcagatctgtggtagcaattcatcgctaacttccaaggaacttacaagcgccacgcgatctaagacgatctacacgcgttaacacagaatccgggtgaatctttgagggactatgttcggcgctttaatgagtgcagaaatacaatccccgaaatcacggacgcctctgtgattcgcgctttcaaaacctgtgtcagagatcgctatactacccaagagttggcaacaaggcgaagattgttcgaagtcatcgatcgatgcgctcacgcggacgacgcactaagacgcaagaacaacaagccaaagacggggggagagaagaagccagccaagggcacacctgaaccgagcaagaagaaaagcggcaagagtgggaaaaggaaagctcaagcggaagttcccgcgtcggaatacgaacgccctcccaaacacctagacccacaaggcagtgacacaaagagaatatggtgccccatatacaagtcggacagacattctctggaggattgcctcatcttcaaaaagtcgctggaaaagcaactggcattggaaaagggcaagcgagtacgtgtagtcgagaaagctgccgaggccaccactcaggactcgaactcagcatacccagattctgatcttcatgtctcgcacatcttcggaggttccaaggcgtactcctcaaagcgagaatacaagaaagtggagcgtgaaatttgttcgacatggcaggaggctgcacccaagatgaagtggtctgaacagaagatcgagttttcagatgaagaccaccccaaggctgctgttatcccaggacgatatccgatcgtggtcgaacccactattcggaatatcaaggaagcgtgagtccttattgatggcagcagctccatcaatcttctcttcaccaacaccttggacgcaatggggattccacgaagtgagttgacacccaccgatcaaccctttcacggattctgtcacgtcctgataaattcatcccgaaataaaaatcattttctaaaaggaataatggaattaattaaaaattcgaaaagaaattggccaaccctaaaatacgtacaagaaaaattcaaatgtggcccggagaatttttgttaaattctccttggtctaaaaggagccctcaaattttagtggaattttcagagcacgaataataattattaagaaataaacaaagttgaaaaggttttataaaaagaaaaatccctaaaagtcttcttttcccccccttcctctcttgggccggctcggcccaactctccctccctctctctcctctcccccgcgggccatcggcctcctcccccgcgcgcgcgccgctgacaggcgggcccgcccgccgccctcgctgacgggtggggcccacctgtcatccgcttcttccgccggtcccgccgatccgccgtgcctaacgcc

SEQ ID NO: 6974 - DNA, 16618 bp, Oryza sativa
ttttaaatgctgtttactgcaaaacttaatccctatattattattcccttgtacctcccttgcattaatcatgcatctgccggtgtggcttgctgagtactgtggttgtactcattcttgctcaatccttcccctcttcagtaagagaagcttcggagaagatgtcttaggtggagtcctggcttataccccagttgagcgcctgtgaagatggagccgtaggcccgctagtccgctgctgtttatttttgattgtcaggccttaagtgcctttgtaataatgtaaatattgtcgatataataaagatgtgtcttttatatcatgtttgtgtggtgtaccccggcttttcctgggatggggattaatacactagcgttcgggaaaaggcaattttcccggtcgcgacaagctggtatcagagccatcttgactgtaggataagccaagtggataaaacccaaggacatattttataaataaaaattatttgcgaaagttcctttttctccttcccctaatgctatttgcaaaaggtttactccgttcttccttcttcggatttcaactagtactagatggtcaggtcagtgaagaagaagacatcgtcagttgttcgccgaagctccggaagactgcaggatctgctagtgaagtggaggaagcagtgaagccagctgtgaagcaggagtgaagatcttggagaacccgtcgcagaacctaagccaccctctagggtagagtcgttagtcgtgtgtttccttgtttgtgtgtgtagcgcgtggtttgcatcagtggggtgtgatgtaaccatgctaggttgattgcttaatcaacttgcagaataagcctaacatacatcataacagcaaaagacttagatctgttaaggtcctatccttagtttctaatctgtctctcccctttgttttccctctctccctctccaaacctttgcaacagatggctgacaatgagaaaggcaataaggtcagaagtcaggacattggtacctcaagctcccgagtgaatgaagcaccagacaccagttgtgtggcagtggtccaacacctgattaaccagaacaaattgcttatagagatactacagcagcatcggatgccaattttgaacccgagtcagatacaacctcaagtgcagttggaggcagtccaagcactcacaccacaagtcagcgcaccgccaacatcccagaaggcccctcatgccatgccacatgttgacccaaaagaagcaagtatcatctgttttatgtgtgatgagcaagggcactatgcaaggaactgtcctcagcagaaaagaaaagcaccaatgcgaaccgaagatgaagtccgtaagatgatcattaccagcacagaatggcctccaccaggaatgacaaaatgtcagagaagaaattcctcccgaggtgcacaacagttgacagagcatcttttagctaatggaggtagagtgtctggtagtgaagattcagatcaagtctcctcagatgatgaagatgagaagtctccccaaggttttaaccagaatgaaatagaacttaaggcatgctctcgttgtggagaaatcggtcatgttgccagctcgtgtgcctctacatgcgttcattgtgaggaagaccatccacccgataggtgtccaatgagcaggatcacttgtttcttttgtgaaggaactgatcatgtaccaaaagattgtcgattcagttttctgctgacgaagaagatggccaaccaacccgtcagttccaacggagagaagcatcaaggaaacacaaatcctcgccaagattacagtttcagcctaactccagtgccaggacagaggaaacaaaatgagaaaagaaaatgccgagtccgggaagatatctgttgcttcaattgtcaaggaatgggtcatttcgccgacaagtgcccaaaaccgagaaacgtagctgccagcacgtcagtccacgcaaacccccgcaatcagaagcttgctcctcaacgaattgtcatccatgcatcccgaagcagtcctatagcccgcgttgcaacagctccaatttcaatgagtgcactaccacaaggtgtcaatgctcaatttcagccccagccaccagctgacaagacagaggccagtatctgcgttgtacctttggaagttccaatacagcagctgagaaatcaagtacaagatgaagaacccgagtgtaagaaagttattgtttgttacaactgcagtgaagaagggcattactccaaaaactgtccccaaccaaggcaaaatcgacctccacattaccgccaatttacacgaagcagacattccaatcgtattgtggtcactggagcaaacgccgtacccgtaaggcctcgtgttaatcagaacccatagcagaaacaatgcaccaatgctcctcctgctgcacctgacttggcaataaatcatagcaaccattctctgcatcgacagcctcagcaaagaattgtcgtagatggaagaagttgtgtctctccccgacctactccaggccgagccaagagcaatcaacctccggagggcgataccaagcagaagaccgtcatccgcttcaaccagcaatcagaaggaagcttctcctgtgaatgatagcattatgcagtcctgtcacatcatcacagaaccaatcaaggatgcagtcactagaacaatgccagctatatctctccagaatcaaaatgagcagccatgtttgtggttttcagttcgctacttatcatggtgtaatcgaaagtttgcagcaaccatgtaatacataaatatattcatgtctataaacagtgagcttgctatgcttatggatgattcacgttgagaatacaatgtaccgatgttaagcaccgtccctttttgtttaaggcagtgcctcgtattcatgtaatgagggagaaatgtgtaatacagacaagttccaggaggattcgtttgaaagatgcggatatatgatcatgtgtataattgtttactgacaaaggagacctagggtctcgtgtcagaggaactatattctaacctcgagttaataaccaacctgtggatggaaaagaaaaacaattaaactgtgttgggttaaaaagccaacgagacagtagttgaggataggagtttggatacgccttttacagatcaagataaggattgttggaggaaacccctaagggtacccgccatgcctctacattgataagatcggatatacctgccaacagttaaggagatccaggagacatcaatatttgagaacataatagtcgatggttggtaattagtttatccggtatcagaaaaaggtcaaaggtgatgtggcagaagaacaatttggatgctccccatctcgaggaagcactaaagatgaccattggcaattaaaccctagtggtatagatacagatagcaggcaatgtatttccctgaaggtagtcagtgcagcttttgacgaaccacatcaaggttccactgaaaggcagcaagccaaaggacctcatcatccccagaagcgtccgcaatccacattaaagaataccacctgttagagataagccgaaagaagattgataaaagagattggcaaagatgttctctagcatgaaagaagtaggccgaaaggtgattgataaacagaaacatgctctgcatcgctcacggaagacccctgattgtaattgccccgcaacagtcaccttgtcattaagtaagcaagatgacctaggtaaaagtgtttctatgaaggcaaagagtgaaatcttccgctcggtatcagatgctacacggagtgaaaaatgcaagcaccggttaccaggcaacgccacgtcctgggagatgatccaacgggaaagaactcatcaaggttaaaggtgtaaaggaatacgttgagtgctaactgatgacaacatgaagagaatagcggaaagtaaactgaacataaagaaagtaaatctgagttgcttgttcgggggagctattcccagttatgaaccaagtgatatgttcgaagatagtctacagaggtcagtttaaaatcacatgtaacggcgaagcctcagatttggcaggataatgattagacaataacaaatccagcagtaaagccatttgggaagacgtcaaagtatatcaagtaggataagttggctcccttgggaagcataattcaaaggtaaagttatcgacccttgcatcaaatagcagaagtagctatcacccggagaccagggaagctaatatgaggcagttggtggcgagttagaagcaaatgacaagcatggtatcttagtaatgacgagctgatctcggcacatgacatgaagcgggtaacttgtatgaggttgactccaaagatatgaactatgcgaagttctggaactgaagccccatcttcaagtgccgcaacccagtcgaagtcagctaaaggttcaaccctggttcgagtcaggtgaaaagaagattccacctgcaacaggagatcgagccaagcagtccagagtggagaagctttgttaggcaagtttgttatagaaagcggagcggaagaagtcagacaagaagagaagaccgcccaacctatcttcatgctagcctcctcgaatctcggggacgagattcttgtaaggggggtggatttgtcacgtcctgataaattcatcccgaaataaaaatcattttctaaaaggaataatagaattaattaaaaattcgaaaagaaattggccaaccctaaaatacgtacaagaaaaattcaaatgtggcccagagaatttttgttaaattctccttggtctaaaaggagccctcaaattttagtggaattttcagagcacgaataataattattaagaaataaacaaagttgaaaaggttttataaaaagaaaaatccctaaaagtcttcttttcccccccttcctctcttgggccggctcggcccaactctccctccctctctctcctctcccccgcggcccatcggcctcctcccccgcgcgcgcgccgctgacaggcgggcccgcccgccgccctcgctgacgggtggggcccacctgtcatcgccttcctcccgccgctcccgccgctcgcccgtgccctagcgccgccgccgccgcggattccgccgcatcccgccgtccccgcgcgccataatgaggggggaatcattccccgcgattccctctctctttccccccgtttttccctctctctctccctcggattcgtccggaatcgctcccgcaaacctcgccggcgccatcaatggcggccgagatctccgcgcccgtttcctccctctccggccgcgctctccccctcccgacgctatataagcgttccccgtgctctccccctccgtttccgccactcgccgtctctcctccccgtcggaatcgagcccgcaccgtcgcaccttctctccgccgtcgccgccgagctccggttcgccgccgtcgtcgctccggacctcctccccactcggcgtcacctccatcggctttgccgcgtccccgtcgacctcggccacccctccgcttcgctcgccgaccgccagagcaccgtcgcccacgccgtcccgaaccgcgccgccgccttcctccgcttcggccgccgttcccgtcgtcgccgtcgacccggggtgagccgaagaccgccctttcgcttccctctcctctccgctctctcgggcgccgctccgccgcgccggtggtcgccggcggtgaccatcggggcgcggtcgtgccgcctcccgtcggccgtgccggcgaggccgccttcgggcgcgccctcgcggctgccaagtgggcccggccgtcagccgcccgcgcccgcgggtgcggctgacgcgtgggacccacggcgccgaccgccgccagccgcgtgctcccggtccaccgtggaccgagaggctgacgcgtgggccccactcccgtggacccggtccgcgcgccctctccctcggctgacgcaataaacccgattttttaattaaaatttaaatgaagaaattcgcaaatatccatttaaagagcatataaacttcaaatggccatatcttggccatttgaactcggaattggaccgttcaagtctctaatttttccttaagaagtcaagaacccatttttgtgctttgttcctgcttgttgtatggagtttattagagtaaaagccttttcttttccgttggtcgtgtagacgctgcagcttcggaagatccgctcttcgtggaagttgaagccggcgtttgggaaagcgagcaaggcaagtcacatcatccttgaacatgttgaatcccagtttatcaaattattttgatttaaattactgcattattgctttatttaaattcccgcgttatcactgttttatttagccatgcctatttacctttgttaatacattattattgttattgttattattaccttgttcaccctaggaaaataaaaaccccaactagtgggtactctattcctggttccactggtatgaatttaggtagatgcttcgctgattaattaggcaacattaggtggttttataactttagactttgggaattctcatatcatttggacactatggaattgttggattatggtggaattggacatacacctctcttcctctttcaaaacccctaaaacctgttttcggtggggtttgggtgcatgccagttgtgggaagtagcaccccggccactataaggattaagctcgggcctctgttgcaaagcactaccgtactaaccacatgtctaatgggtaaggcttaactcggtgctcaggctagtcctgaacaaaaggacacggatagagatggatgaagtcgttgcgacgatggatatctctgaggcaaatgaaggctacgcgagctgcggctcggtaatcgagatgtctaggcaaatgaagactacacgggtcggtgcccgttagtcgagatgccatggcactggactagtacgcgggtggtctcacccctatgtgtgtggcgcacccggtctagatcttgttgctaggggctcaaccctagcctgcctgtcccgggataccggccgtaggcagggttgggtcggtacttttgttcacggctaggatgggtgaagggttatgtcacatctttacgacgggttccaaggccatggaatgcggagtaaagatgtgtcttgtgggtaaagatgtacacctctgatcagagtaaatctattcgaatagccgagccctcggatatgggcaagccgagcaatgtacccaagtcagtgttttaattcttaaaatttgctcaacaactaaaatatggaatggttggcctgggttggcttgggacgagctgggacccaggtcgggttgccagttcggtccgaatcatcgtaggccttgggttaaggcaggttcgtgagggttcacggccttgtttaataatactgtgtagctctaggatcgtctttacaaaatggctttgggcaactaagtgacttttaaatgctgtttactgcaaaacttaatccctatattattattcccttgtacctcccttgcattaatcatgcatctgccggtgtggcttgctgagtactgtggttgtactcattcttgctcaatccttcccctcttcagtaagagaagcttcggagaagatgtcttaggtggagtcctggcttataccccagttgagcgcctgtgaagatggagccgtaggcccgctagtccgctgctgtttatttttgattgtcaggccttaagtgcctttgtaataatgtaaatattgtcgatataataaagatgtgtcttttatatcatgtttgtgtggtgtaccccggcttttcctgggacggggattaatacactagcgttcgggaaaaggcaattttcccggtcgcgacagattcacccctcagtcatcatccaagccattgggcaagatcacgcttcctgtgactttcggacaagcgagcaacttccgaacagagcagatcacgtttgatgtcattgagtttgacatagcatacaatgccatcattgggagaactgcactcgcgaagttcatggccgcatctcactatgcatatcaagtactcaagatgcccgagccgaagggaacaatcactattcaagggaacgcaaagctggcgctccaattcgacaagtggagccttgacatggtcgagcacactcctagcccacccgccacagctgagccacccaagaaagtgagcaaaacaaccaagacgccgaaaccagacggcgcaatcaaaattgttccactctccagcgccaaccccaacaagacagtcaagatcggggcatcactgaacaagaaataggaactcgcgctcatcaccttcctccgcgacaatgctgacgtgttcgcttggccatacgagaagagctcgacaaacttctcaaagctggttttatcagagaggtactccatccagagtggatagccaacccagtcatggtgcggaaggccaacgggaagtggacgatgtgtgtcaacttcaccaacctcaacaatgcgtgccccaaggatcacttccccctccctcgaatagaccaactagtggactcaacagctggttgtgagctgttcagcttccttgacgcttactccggctaccaccaaatcagcatggcaaaagaggacgaggagaagacagcattcatcacgttgttcggtgtattctgctacgttaagatgctgtttggactaataactgcaggaaacacattccagcgtacggtccaaggggcactcaacgatcagctgggaaacaatgttgaggcctacgagaaacctttgacaacctccgatgatattgcctcatgctcaatcctgagaagtgcaagttcggagtaccatcgggcaagctgctcggcttcctcgtctctggcagaggaatagaagcaaaccccgaaaagatcaaggcaatcgagaacatgaagtcgcccacgagactcaaggaagtacagaagcaaaccggatgcatggtggcactaagcaggttcgtcgctaggatgggcgaacgaggacagcctttcttcactctactgaagaaacaagaaaaatttgtatggacacaggaagccgaagaggcgtttatcgcactcaagcgctacctgtcaaatctccctgtacttgttgctccccaacctaatgaagaattattcctctatattgccgccacgccctattctgtgagtacgatcattgttgtcgagagagaaaaggtgcaaagaccagtctactacgtcagcgaagctctccacgacgcgaagataagatacccacagatccaaaaactgctctatgcagtaatcatgacgtcaagaaagctacgccactacttccaagcccacagggtcacagttgtctccaccttcccccttggtgaagtggtgagaaatgggtagtcgagctaagccagtttgatgtccactttgtaccacgaacagccatcaagtcccaggttctcgccgacttcgtagccgattggactatgcctgaaaacatgttagacagtcaaacagacaacgaaacatggacaatggcgttcgatggcgcactcaacagccaaggagcaggtgcggggtacatcttgacatcaccttcaggagatcagttcaagcatgcaattcaccttacttgagggcgaccaacaacacagccgaatatgaacgactactcgctgggataagagctgcggttgcacttggagtcaagcgactgatcgtaaaagtggattccgaactagtcgcaaaccaggtgcacaaagactacaaatgctctagccccgagttgtctaagtatctcgcagaagtcaggaagctggaaaaaagatttcatgggatcgaggtccgacacatatatcgcaaggacaacatcgagccagacgacctaagacggcgtgcgtccagacaagagccactcaaacccagcacctttctagacatcctgacaaagccatcagtgagagaggccaacgatgaagatagcccagtcgcccccgacatcagctcgggggctatagaggcagaacgcatcgttgccgacattgagaccacgaacgactagcggatcccattcattaaattcgtaagtagcgacgagttacccgaggacgattgttaacagtgaaatttggtaaatccggaatagtcatcggcttagagtcagcatcggcttcgaagtcctgagattagccgataagagttgtcaagtcgccagttgtcggattcttgctatattcggttaaggaaattgatctactaaaggaagcttatccagaagagaccgagttcaaagagaatacggcatggcaagttatctattaattaggaatagtttgttagtttccttttatctttaggaaagtgtgtttagtgtcctataaggactttatcttttccttttatctttaggaaagtttctttcttgtccgacaaggacttgtatcaactcatggttataaatatgtacacccggggtgtatgtaatctatctctacgatcaatacaattcggtgcatcgccaccttttaccttttctactttattttatcgtccggcgggaattggaacttgatgcggggctgcatcggtgttcgatctccgcctaaggggtaagtccaatgttccaccggcccaggcaattgtatcgtctacatcggcatcgttcaaggctgcatcagtacattcgatctcttggattgctctggtttgaatgatatatttgcctacctatttatcatatgtctctgttaatctagtcttagcatctcaatttagctctatcggctgcttctcgttttagggtttctgccggtatcggctaaatcgccatgctagattagattagcttagatatctaccaccctgaaaatcagtcaacggcttgattgtatagatattgtgtttcttttcatacttagtgctgcatcagttaagtttgatctactaagtcgtgcttagattcataatctctagcctgctttttgactgccaataagggtttcatcggggtttcagccgatgaggtatctggacattgcatcagcttataaggattgcatataagttggatttagcttatgacaataaaggtttcactgttttatctaatcatttggattttatggcatcggacccccagccgatgtatgctttagccttcggatcaatgcttattccatcatattattatcagccgattggtttttatcggattatattatcgttatattatcatcagccgattgcctttatatcattattaatatcaagtgtcagattctacattggatatatagccgatttatcaaaaccctatcgagatcggctggtatcggtatcggctattatcggcatcggctagaatcactccatcggcttgtcagctatcagctgtttgatctactgtttgcatatcttgtcagttgtaggatcaaactgactggcacgtccgcatctcatcaagatttggacatgcacaggagctaagcagatctcctaggctggtgtgttcgatttttttcgtcaacaacgatgcagaagccgagaaaataacccgtcaggcaaaaatctacagtatgatcggcgacgatctatacaagaaggcgccaaacagggtacttctcaaatgtgtctcgtccgatgacggcaaacacctcctcctcgacatacacgaagggatctgtggatcacatgccgtcggtcgtacattggtcgggaaagcctttcgacaaggatttttctggccaactgccctcaaagacacttgcgacatggtacaacagtgtgaaacttgtcaatttcatagcaaacacacaaagctaccagcgcaagcgctgcaaaccatccctctcacttggccgttctcgtgctgggggctcgacatactcggaccgttcccacgaggacagggcggctacaaattcctgttcgtaatgatcgagaaattcaccaaatggatcgaagtgtcacgaccagaattaacccaacgggcgttccttacgtgcgtgtattattccttgtcccaggaggcaaggtacaccaaaagttgatacatttcagagtttatcaagcggaagcgtaaatagttaatttattacatgggcggcgaaggcccagcacacacaaagacaaacgagaaacagcggaagactagggcgacgaccacaggcgcttgacgacaggcacgagctagacaccaaagccttcatcttccaagggctcctcttctgggtttgggaaaaattgagcaagactgagtacaaccaccgtactcaacaagacacacccacaagtaaacagcattaaaagacacttagttgctcaaagctattttgtaaacacgattccagagctatacaatattattaatcaaggccgtgaacccacacgaacctgtcttaacccaaggcctacgatgattcagaccgaactggcaacccgaccctgggtcccagctcgtcccaagccaacccaggccaaccattccacattttagttgttaagcaggttttaagaattaaaacactaacttgggtacattgctcggcttgcccataaccgagggcgcggctattcgaatagattatactctgatcagaggtgtacatctttacccacaagacacatcttcctcacgtgtaaccacgtgccacataccaccacggtatacggacggaagacgtgacatagtttccaacccatcctagccatagacaagagtaccgacccaaccccacctacggccggaacccccgggacaggtaggcaggactgagcccctagcagcaggacaccggccctgtgccatgacatctcgactaccgggccgtagctcgtgtagccttcatttgtcctagagatgtccatcgacccccgacttcgtccatctccatccgtgtacttttgtttataaccagactgagccataaactaagccttacccactagacatgtggaagtacggtagtactttgcaacagaggcccgaagaccggtccttatatggccgaggtgctactatcaaaaccatacaccccgagcccagcctaaaaccattttgaggattttgaatagagggggaggtgtgaatccaatttccacaataatcaaaccattccatagtgtccaggtgatatgaatatcccaaagtctagagttgtaaaaccacctaatgttgcctaattaaccagcgaagcatctacctaaaatcatactagtggtaccatgagtagagtgtccactagttggggttttgtttattctagggtgaacaaggaaataataacaataacaataataaggtcataacaaaggtaaataggcatggctagataaaacagtgataacgcgggaatttaaataaagcgataatgcaataatttaaatcaacataattctgtaaactgggattcaatattgtcgcgaccgagaaaattgcattttcccgaacgctagtgtattaatccccgtcccaggaaaagccggggtacaccatacaaacatgatataaaagacacatctttattatatcgataatatttacattattacaaaggcacttaaggcctgacaatcaaaaataaacagcagcggactagcgggcctacggctccatcttcacaggcgctcaactggggtataagccaggactctacctaagacttcttctccaaagcttctcttactgaagggggaaaagattgagcaagaatgagtacaaccacagtactcagcgagccacaccggcagatgcatgattaatgcaagggggtacaaggggtaataatatataggggttaagttttgcagaaaacagcatttaaaagtcacttagttgcccaaagccattttaaaaagacgatcctagagctacacagtattattaatcagggtcgtgaacccgcacgagcctgccttaacccaaggcctacgatgattcagaccgaactggcaacccgaccctgggtcccagctcgtcccaagccaacccaggccaaccattccacattttagttgttgagcaaattttaagaattaaaacactaacttgggtacattgctcggcttgcccataaccgagggcgcggctattcgaatagattatactctgatcagaggtgtacatctttacccacaagacacatcttcctcatgtgcaaccacgtgccacataccaccacggtatacagacggaagacatgacatagtttccaacccatcctagccatagacaagagtaccgacccaatcccacctacggccggaacctccgggacaggcaggcaggactgagcccctagcagcagggcaccaaccctgtgccatgacatctcgactaccgggccgcagctcgtgtagccttcatttgtcctagagaatgtccatcgacccccgacttcatccatctccatccgtgtacttttgtttatgaccagactgagccacaaactaagccttacccactagacatgtggaagtacggtagtgctttgcaacagaggcccgagcttaatccttatagtggccggggtgctacttcccacaactagcatgcacccaaaccccaccgaaaaacaggttttaggggctttgaaagaggaagagaggggtatgtccaattccacaataagccaaccattccatagtatccaagtgatatgagaattccccaagtctaaagttataaaaccacctaatgttgcctaattaaacagcgaagcatctacctaaattcatactagtggaaccatgaatagagtgtccactagttggggttttgtttattctaaggtgaacaaggtaataataacaatagcaataataataaggtcataacaaaggtaaataggcatggctaaataaaacagtgataacgcaggaatttaaataaagcgataatgcattaatttaaatcaaaataattttataaactgggattcaatatgctcaaggatgatgtgacttgccttgctcgctttcccaaacgtcggcttcaacttccacgaagagcggatcttccgaagctgcagcgtctacacgaccaacggaaaagaaaaggcttttactctactaaactccatataacaagcagaaacaaagcacaaaaatgagttcttggcttcttaaggaaaaattagatacttgaacggtccaattccgagttcaaatggccaagttatggccatttgaagtttatatgctctttaaatggatatttacgaatttcttcatttaaattttaatttaaaatcggatttattgcgtcagccgaggggaggggcgcgcggaccgggtccacgggagtggggcccacgcggcagcctctcggtccacgatggaccgggtgcacgcggcttacgccggccggcgccgtgggtcccacgcgtcagccgcacccgaaggcgcgggcggctgacggccgggccccacatggcagccgcggggcgcgcccgaaggcggcctcgccggcacagccgacgggaggcggcgcgcccgcgccccgatggtcgccgccggcgaccaccggcgcggcggagcggcgcccgagagaggggagggaagggggaaacgaaatgggcggtccacggctcaccccgggtcgacggcgacgacgggaacggcgaccggagcggaggaaggcggcggcgcggctcgggtcgacgaggacggcggcgttccggcggtcggcgggcgaaacggaagggtggacgaggtcggcgaggacgcggcgaagccgaaggaggcgacgccgaggcgggaggcggtccggggtgacgacggcggcggaccggagctcggcggcgacggcggagagagagagcgacgtcgcgagctcaaatccggcgaggaggaagggcggcgagaggcggaaccggacggaggaggtgcggggagggtttaaatagagccagtgcgagagagggtggccggggaagggaggaaaccggcgcgggaggtcggccgccatcaatggcgccggcgagattaggggagcggtttccaaccgaatccgagggagagagggagggaaaaatggggggaaagagagagggaatcacggggagtgatttccccctctttattgcgcgcggggacggcgggaggcggcgggattcgcggcggcggcggcgctaggtcacgggcgaggcggtgggagcggcgggaggatagggatgacaggtgggccccacccgtcagcgagggtggcgggcgggcccgcccgtcagcggcgcgcgcgcggggagaggccgagtgggccgcggggaggaggagagagagggagggagatgggccgagccggcccaagagggggaaggggggggaaaaagactttttagagcttttctttttataaaaccattttaactttgtttatttcttaataattattatttgtgctctgaaaattccactaaaatttgagggctccttttagaccaaggagaatttaacaaaaattctccgggccacatttgaatttttcttgtacgtattttagtgtttgccaatttcttttcgaattttaattaattctattattccttttagagaatgatttttatttcgggatgaatttatc

SEQ ID NO: 6975 - DNA, 24323 bp, Oryza sativa
gcgagctcgattccggcgaggaggaagggcggcgagaggcggaaacagatggaggaggtgcggggagggattaaatagggttggaagggggagagagcggccggcggggaaggaataagcgcgggaggtccggccgccatcaatggcgccggcgagatttgcgggggcaaatccgcccgtttgaacgcgagagagagagggaaaaatggggggaaagggagaggggatcacggggagtaattccccccactttattgcatgcgggaacggcggaaggcggcggaattccaaccgccggcgcccttaggcccagggaaggcgccggaaccggcggaagaagggaataacaattggccccacccgtcagggagggtggcgggtgggcccacccgtcagcggcgcgcgcgcggggagaggccggatgggccgcggggagaggagagggagggggagggatatgggccgagccagcccaagagggagagggagggaaaagggactttttagagtttttctttttataaaatcattttaactttgtttatttcttaataattattatttgtgctctgaaaattccactaaaatttatttacgcattttaggcttttaggaaatatacaaaaatcctccaagccttatttgacttttaactttgcacattttaattgttggaggctttcacatggattttaattattctaggcatcatttaaaggatatattttagagtcgttttgggacgtggcaaacctaccccccttaaacggaatctcgaccccgagattcggaagaactggcgaagagatcgggataggctgccttcagctcgtcttgacgctcccaagtagcttcttcctcggcgtggttgctccattggaccttgcaaaaacggattacccggttcctagtcctacgctccatggtgtccaggattttcactggcctctcctcgtaggtcaagtcttcgcgaacctcaatctgctctgagtcggcctgctcggacggcactcgaaggcatttcttgagttgcgacacatggaacacatcatgcacgttgcccaaggaggcgggcagctccaactggtaagcgacttccccacgtcgagcaatgatacggaaaggacccacaaaccgaggtgcgagcttccctttcgtctgaaacctgtgtacacctcgcaatggcgtgacccgaaggtacacaaaatcgtccactgcgaattccagattacggcgtcggttgtctgcataactcttctgccgagactgggccacctttagattatcccgaatggttttgactttagcttcagcttctctcaggatatcagtcccgaacacttggctttccccaacttggtcccacaatagcggtgtccggcatttgcgtccatacaacgcttcatagggtgccatttgtatgctggcttggtagctgttattgtaggagaactcggcataggggagactcttatcccaggtcttcccgaaatctaggacacatgcgcgaagcatatcttctaggatctgatttagacctcggtctgtccatctgtctgcgggtgatacgcggtgctgaaatttaatcgggtacccagctcttcttggagcttcttccaaaagtgagaggtgaattggcttcccctatcagatacaattttcttaggaatgccatggagactcacgatcctagcgaagtagagatcggctagtttgttccctccacaggtggtcttcacaggaataaaccgagctaccttggttagtcggtccacaactacccatatagaatcatatccgccttgggtttttggaagtccggtgatgaaatccatcccaatttcatcccatttccattctggtacttggagaggttggagaagtccggccggtcgttggtgctctgccttgacacgctggcacacatcacaaagggccacgaactctgcaatttcccgcttcatactaacccaccagtatttctctttcaagtctaagtacatcttcgtactgccagggtggatggaataagggctttcatgagcttcctgaagtatcaactgtttaagttctctgtcgtctggaacgcatacccgatttccgttccatagggttccgtgttcatcctctgtgaaaccagcggctttaccttgtttcatattcttgaggagtccacgtatatccggatcattcttctgagcctcgcggatttgatcgagcaaggtaggcttggcttccagtgtagccaagaatccacgaccaactatgcttaggttcagggcttccatctgttgattaagttcaggtggaatgccacggacgccaagagtgttgcaatggctttttcgacttagagcgtcggcgaccacgttggccttaccaggatgatagtggattcccacatcataatccttgatgagttctaaccatcttctctgccgaagattcagatccgattgagtgaagatgtatttcaaactcttatgatcagtatatatttcacagctattcccaatgagatagtgccgccagatttttagagcatgaaccacagcggctaactccaaatcatgggtagggtagttgccttcatggggccgtagctggcgtgaggcataggctaccacatgaccttcctgcatgagcacgcaccccaatccttggcgcgaagcgtcacaatacaccatgaagtccttatgagtatccggtaagattaaaaccggcgaggaaaccagcctttccttgagagtttggaacgccttctcgcattgcgggctccacacaaatttctcttctttcttcaacaactgtgtcatgggtcgagcgattttggagaagttctcgatgaacctctggtagtatcctgccaaacctaagaagctgcgaatttgagtgactgtcttgggttgcttccaatcagtgacggcggtcactatttcggggtccacagcgactcctttagcagatatcacgtgccctaagaatttgacttcggacaaccagaactcacacttgctaagcttggcatacaattgatgttcccgcaactttcccaacaccagacggagatggtgctgatggtcatcctctgattgtgagtacaccagaatgtcatcaatgaaaaccacaacaaacttatccaagtattccatgaacactttgttcattaagttcatgaagaaagcacgagcattggttaaaccgaatgacatcaccgtgaaatcatacagtccgtatcgcgtggtgaatgcggtcttagggatatcttcttcacgaatacgtaattggtgatatctggaacgaagatcaatcttggagaatacagtggcacctttaagctgatcgaacagatcatcgatccggggaagagggtacttgttttttatggtaacttcattgagagctctgtagtcaacgcacatcctctttgtcttgtctttcttctccacaaaaatcacaggagcaccccagggggaagtactcggccgtatataccccttttctttcaactcttccaactgtttcttgactttggccagttcattagctgccatacggtagggtcgcttgtacagaggagtggttcctagagcaagatcgatccggaactcaatctctcgcttgggcggcataccgggtagttcttccggaaacacatctccgaactctctgacgatggggatttccgacagtcttatctgatgaagttctgaactaccgacagaggttgggggtgcaaagaaaacgaccggttgttccgtccctcggtacagagtgacagtgcatcttgcacaatccactacacattggaattgagccaaccaattcatcccaaggatcacatccaagttcttggtgtctagaagaatcagatccgagggaaaaggaattccctggatttctataggaacggcagggctataatactttgctgtcataacccctccaggggtggtgatgagcagagggttcctaagcctttctacccccaactgatttctccccacgaatggcacagatataaacgagtgggaagctccagagtcgaacaaaatggtagcagggatggaatgaatgaggaacgtaccaacgatgacgtctggagttgtcagcacgtcctcggccgtcacgtggttcacacgaccccgaatgacatccttaccaccgttgttggagcggggatgcgcttggccttgctggcgcctcggctttgggcatttatccgcaaagtgcccaggcttgaagcagttgaagcacagacgctgctgaccttgaacgtccctgcggccttgaccaggctgcacggctggcataggaggacggggcgcacgagtcccttgctgactctgctgttgctgcggctatgggacgcgcaccacgaattgaggacccggcgcacccgggctcgcaccggccggcgccgtgggccccacgcatcagccgcacccgagggcgcgggcggctgacggccaggccccacgcggcagccgctcggtgcgcccgaaggcggccacggcggcgcggccggcgggaggcggcgcgcgcgcgcccctacggtcgccggcggcggccataggcatggcggagcggcggccgagagaagggagggaaagggggaaacgaggcggcggtccacggctcaccctaggtcgacggcgatgacgaaaaggcggccggagcggaggaaggcggcggcgcggctcgggtcgaccgggacggcggcgctccggtggtcgacgagcgaaacggaggggtggacgaggtcgtcgaggatgtggcgaagccgaaggaggcggcgccgaggtgggaggtggtccggggcgacgacggcggcggaccggagctcggcggcgacggcggagagagagagcgacggcgcgagctcgattccggcgaggaggaagggtggcgagaggcggaaacgaacggaggaggtgcggggagggtttatatagggttggaagggggagagggcggccggaggggaaggaaaccggcgcggcgctctcgggctccatcaatggcgccggcgggattaggggagggtttccaaacgaatccaagggagagagggagggaaaattggggggaaagagggagggaatcacgggactgggccacctttagattatcccaaatggttttgactttagcttcagcttctctcaggatatcagtcccgaacacttggctttccccaacttggtcccacaatagcggtgtccggcatttgcgtccatacaacgcttcatagggtgccatttgtatgctggcttggtagctgttattgtaggagaactcggcataggggagactcttatcccaggtcttcccgaaatctaggacacatgcgcgaagcatatcttctaggatctgatttagacctcggtctgttcatctgtctgcgggtgatacgcggtgctgaaatttaatcgggtacccagctcttcttggagcttcttccaaaagtgagaggtgaattggcttcccctatcagatacaattttcttaggaatgccatggagactcacgatcctagcgaagtagagctcggcggcgcggagcgaggttgctgctgctgttgctgctgcgaggacgatccccctggatagggattggtgtagcggaccctttgattagccccctgttgattgcggaaattcgccaagcgacgcttgtgcgactccagttccttgtgcttggcttccaagcggatgctcttgtcaaccaaacgctggaaatccggatagtccccggagaccagacgcacggatagctcagggtccattcctgccaagaacttctcctgcttttcctcatcttcccgtacatcctccggggcgtaccgggccaggttgttaaactcatgcaaatactccatcacggagcggttgccttgcttcatctcccggaattcccttttcttaagggccatgactccggcgggcacatgggttctccggaaagcgacggtgaagcgggcccaagtaataggttgcccctctggctgcgtagcctggaaatggtccctccatatagatgcgggcccctgcagttggtgggcggcgaagatgactttctcctcatcgctgcactgcacggtgtctaactttttccccacggcatgcaaccaatccaacgcatccacggggttattggagctagagaaggtaggcggacggatgcggaggaactcggcgagtttagaatgttgtgggggtggtggtggagcattatgttgtggcggattttggatgtggtggaggaaaccagtcatcatgttggcctgctgggcgaggatttgggtgaggatggcgttggtgtctggtggtggtggtggaggcggaggaggaggtggaggtgggctgccatggttgttgtggttgctgccttcgaggtgactgccttcaccggtagcagcacttctcctggttgtcaccatctgaaaacccacacagaaccagcaaacagagagagctgacaattaaagctaaccacccacgactaccataattcttgaatttattactgctattaaattggttcattaaggttcaagttgcttaagcaaataaaataaagacatgctccgacatagttataccacacaccggcataaccatgccctatatgactctagcagaaaaacaaacgagaagaacacacgcgcaagcctactaactgctcgtctactgctacgacgggccagggcggaaggtgagcagcaacgcatcctctgtgctgccaacgccggaggctccatcctcctgaggaacaacgggggcgggctcggcacgaggggtctcgacgaagcaggtccacgccagggactgacgaacaagctcgggcctggaggtactcttgcgggcggtgatcttcaggctgcggcagacgcgacgacgcttggggcgatagacctctccctgggcgatcttgagctgatgcagctgcgcctccactgcgtctaggtccttcttcagctgcagattctcctgacgcagctccaggatcttcatgttgttctcgaccaacccgcgacgcaccatctgatggaagtcgatacgggccacgtcgtacgcctccaccatgcgcgccaggtgcatgatggtagcgtcatcctccgagctagcatcccggaaggtggcgtagtcgcgggctcctccgcgacgagggtggtagcggtagggcgagtgctgcaactcgtccgggtagcgctggtgaagagtgccgatggcgaggagtgcggcgttctggcaagcggcggagaaggaatcaccacccgcggtgactgccaacgaagtcctctcgggtgagccagtgaggatcactgcagtaacctcccaagcagcgtggggctctgcatcgtcaccctcttgctccgggagctgcttgccctggtaatccactccatgcggataccctaggacaacgcacatgccccgtagctccaaaacgaagccagtcaggtccagaccacgacggttgatgctgctggccatctacaaacaaaaacaaaagagaaaagcaacattttaaaggttagattttgacgataaatgaagcagcaggacagagagagactagaggattttcacaaataagaaaggatttttattttgaaaatattgctaaggcttgggatctacggctcgtcctagtgtcaagggggctctgataccaacttgtcacgaccggaattaacccaacgggcgttccttacgtgcatgtattattccttgtcccaggaggcaaggtacaccaaaagttgatacatttcagagtttatcaaacggaaccgtaaatagttaatttattacatgggcggcgaaggcccagcacacacaaagacaaacgagaaacagcggaagactagggcgacgaccacaagcgcttgacggcaggcacgagctagacaccaaagccttcatcttccaagggctcctcttctgggtttgggaaaaattgagcaagactgagtacaaccaccgtactcaacaagacacacccacaagtgcaggataaatgcaagggagtacaagggggttataatataaagggttagggtttgcagtaaacagcattaaaagacacttagttgctcaaagctattttgtaaacacgattctagagctatacaatattattaatcaaggtcgtgaacccacacgaacctgccttaacccaaggcctacgatgattcagaccgaactggcaacccgaccctgggtcccagctcgtcccaagccaacccaggccaaccattccacattttagttgttaagcaggttttaagaattaaaacactaacttgggtacattgctcggcttgcccataaccgagggcgcggctattcgaatagattatactctgatcagaggtgtacatctttacctacaagacacatcttcctcacgtgtaaccacgtcccgcataccaccacggtatacggacggaagacgtgacatagtttccaacccatcctagccatagacaagagtaccgacccaatcccacctacggccggaacccccgggacaggtaggcaggactgagccccttgcagcaggacaccggccctgtgccatgacatctcgactaccgggccgcagctcgtgtagccttcatttgtcctagagatgtccatcgacccccgacttcgtccatctccatccgtgtacttttgtttataaccagactaagccacaaactaagccttacccactagacatgtggaagtacggtagtgctttgcaacagaggcccgaagaccggtccttatatggccgaggcgctactatcaaaaccatgcaccccgagcccagcctaaaaccattttgaggattttgaatagagggggaggtgtgaatccaattccacaataatccaaccattccatactgtccaggtgatatgaatattccaaagtctagagttgtaaaaccacctaatgttgcctatttaaccagcgaagcatctatctaaaatcatactagtggtaccgtgagtagagtgtccactagttggggttttgtttattctagggtgaacaaggaaataataacaataacaataataaggtcataacaaaggtaaataggcatggctagataaaacagtgataacgcgggaatttaaataaagcgataatgcagtaatttaaatcaacataaatttataaactgggattcaatatgttcaaggatgatgtgacttgccttgctcgctttcccaaccgtcggcttcaacttccacgaagagcggatcttccgaagctgcaacgtctacacgaccaacggaaaagaaaaggcttttactctaataaactccatataacaagcagcaacaaagcacaaaaatgggttcatgatttcttaaggaaaaattagagacttgaacggtccaattccgagttcaaatggccaagttatggctatttgaagtttatatgctctttaagtgaatatttgcgaatttcttcatttaaattttaatttaaaaaaaaagtttattgcgtcagccgagggagagggggcgcgcggaccgggtccacgggagtggggcccatgcggcagcctcacggtccacggtggaccgggcgcacccgggctcgcaccggccggcgccgtgggccccacgcgtcagccgcacccgagggcgcgggcggctgacgaccgggccccacgcggcagccgctcggtgcactcgaaggcggccacggcggcgcggccggcgggaggcggcgcgcgcgcgcccctatggtcgccggcggcggccataggcacggcggagcggcggccgagagaagggagggaaagggggaaacgaggcggtggtccacggctcaccctaggtcgacggcgacgacgaaaaggcggccggagcggaggaaggcggcggcgcggctcgggtcgacggggacgggggcgctccggcggtcgacgagcgaaacggaggggtggacgaggtcgacgaggatgcggcgaagccgaaggaggcggcgccgaggtgggaggtggtccggggcgacgacggcggcggaccggagctcggcggcgacggcggagagagagagcgacggcgcaagctcgattccggcgaggaggaagggcggcgagaggcggaaacgaacggaggaggtgcggggagggtttatatagggttggaagggggagagggcggccggaggggaaggaaaccggcgcggcgctctcgggctccatcaatggcgccggcgggattaggggagggtttccaaacgaatccaagggagagagggagggaaaattggggggaaagagggagggaatcctggggaataattcccccctattgattgcacgcggggaggacgggggcggcgggagtcgcggcggcggcggcgctagggcgcggcgaggcggcgggagcggcgggaggaaggggatgacgggtgggcccacccgtcagcggcgcgcgcgcggggagaggccggatgggccgcggggagaggagagggagggggagggatatgggccgagccagcccaagagggagagggagggaaaggggactttttagagtttttctttttataaaatcattttaactttgtttatttcttaataattattatttgtgctctgaaaattccactaaaatttatttacgcattttaggcttttaggaaatatacaaaaatcctccgagccttatttgacttttaactttgcacattttaattgttggaggctttcacatggattttaattattctaggcatcatttaaaggatatattttagagtcgttttgggacgtgacaaagcaacacccacgggggaaatcaaggccgacaacaccatcaaattcattaaagggatattttgcagatatgaattgcctcaccgcatcataacagataacggttcccagttcatcagcgccgatttccaggattactgcactggactgggactcaagatctgcttcgcctcggtttctcaccctcagagcaacggacaagtcgagagagcaaacggcatagtactacacgggatcaagacccgtgtctacgacaagctcatgtcacatgacaagaagtgggtcgaagaactcccctcggtactctgggccgtgcgcaccacaccgataacgtccaacaaggagacacccttctttcttgtgtacggctcagaagccatgctccctaccgagctacaacaccagagtacacgagtacagaagtactccggcgaggatcagaaggaacagcaaaacgacgacgtgaacctactcgaggaacctcgagaacgagttgccgtcagggcagctagttaccaacaagcccttcgccggtatcacgagaagcgcatccgagcacgcatactttcgatcggcgactacgtcctccggcgagttcaaagccaagcagggcgaaacaactctcacccaaatgggaaggaccgtacacgatcacacaagtcttgtggccaggcgcattcaagattgcagacggtgatggtcgcgagttagaaaattcttggaacattgaccaattgcgtaaattctatgtataagtcaatagtatccatacttgtaagacatcttacgacttcaataaagcctgtcttcaggtacagatttcaatcaaagtgtcccttcccgatgatccctcacccagatcacacctagtgttgaaactgatcctcatgtctctttacgccgtcttgacaagccctccaaggaacctaaggaacttctgctggagacgcctagagctgataaggccttgtcggatcctttagagacgaaagaccatgtaagatcctggccgcatgcttggaggggatcgcctccatcgccgtcgccagctccgcgagcgaagccgtcagcgagaactcgtcagggttcgccgggatggtggtcttaacaccacactccccgacgagctggtgtaggccggtgtaggtgacccacagcgaaccgcggatttccgacaggttgttctcgagttccgacatgcggttcttgagcccctgccattgccgctcgttgccggccaccagctccttcattttctggaggtcctcacgaacctccgtcaagtcatgcgccagcttgtcggcgcgtttgttcaccgacgacgctgccgccgccctcgcctccgctatctcgcgaactatgccgcgagcgccggcctggaggaggcgccccatctcgacttggagctcctcccaggtgaggacgtcagcaggagggcctcgagcaggcgcaagatcgccgacagggccgctgggcgtcgcctcacggctcctgggcacgaccacgacatctgtcgaggccacggccggagacgcgctagagttccctccagatccatcttgcgctgctttcacccgcgccgccctatgaaaggctgccatcaagacaggatgcgagagttcaacgaaataacaaaacctcgaattcatccacttacttctcaccaagcgtcacaagccgctgccgtcgcggaggtggcggagacgcatccgaggcctagagtaaaacgagcatgatgtgaggtcaaggttttccaactacgcgatgaaggaccatgagagcttaccgagggggtgggcatctttcgacgatttctgagcacggaggagaacatcctccctcttctcggaacgttgctgccactcgttgtgacagcagcggcagcaacatcggatgcctccttggcaatgtcctccttcagcgacgccgccgcctgatggtccacgagcggcccgatgatatcagtcagagggagagcctgcactacatgaagtcacagtgcgatcccggaagaaaaaggcaaaagggtcgctgagtacactcacgttgattacggcttcgcgttcggctgcccccttcttgcaaagagggacagggacgttgctcgccgttgaagggccgctgatcacgacttgaccgacgcggcgctccacggtctcgccgttcaaacctgtagatcgagaaccaaaatcgataagtcaggaggaacacacacttaaggagtggagtccaaaatactagaaaaataccccgaggagaaacccgagtcacatcctccagcccagaatagtcaaaggctggatgggctcgagcttggagcggctagatccgcctaccaatgaagtcggcggcgacttcataccccgacaaccctcgcactcggaggtcatcgatgacatcgataaaagactgaagggaaggggttaaggtgggtttggcggtccaagacgaaatcttgtctggttgttcctcaggaacaacaatgactggatctgaattttctatctgaagatagaaccacctcgcccgccatttactacgagaagaggggcactagaaggggatgtagcgtgacttcaggccatcctgaagtcggaaaccgacgcatccagataccctgttggattccatccaacgcaactcatagtagaagcgaaagaggtcatgaaacggctctaccccaatgtaggcctaacaaagatgagaaaagatgatgaggaaggcgatagaattggggttcaaatggagcaaggaaagaccgtagaaattcaagaccaaaagaagaaactcggagggaggaggaagaaaaccacagagaatatagtcctcaaccgcaaccatgcggcccaggacaggttcaggttcagtacctcctggttccctctccatggtcccgcgaccagggagagcgccttcctcctgcaacttcttcagggacgcgctggtggaagtggacttatcaaggtccattgccgtcggagatcgccggagaagggaccgagatgagcaagctagggtttgtgcgggaatggagaagacgaagagcacttggaggcttgaaagttttttcgcaacaggcagactccaaaatggatccccaaaactcccttaaatagacgcactaccgacgatgcgaattccaaggaaagaagagagatgcccgccgaaaatttctgggtctgttacccacgacagtttttggacttcaatttaaattcactcacgcccattgaatttcacatagcgttgtcgattactccttgtctctacgatcttcacgccgagatcgactagtcgagaatgacaataaccccgacatcggaagtcgcgatcggttatatgagttcatttaagcagaagtcgggggctactgtcagggttacggataaggtataccctctacccttggatatacgctttacatctgcgcgtgtacggacgtccactgtatgttctaatgtcacaccctaaaaatccaaaatatataaattgttgtttaattggaattattagaatttattttaaaaagcctagaagagaagatctaattttaattaataaattccaatataaaatggggccagataaaatttcattaaatactttgcttaattctataattcctagatttttctgggatttatttgagctaaggaagtattttgaataaatggaattgcatttcatgaataatttaaattgaaaaaggtttttaaaagtctctttttgctttgggccgaaagtcggcccaaaacccctctctttttctctctctcctcggcccaagccggcccgcaaccgagctgccgctctcctctctctctctcccgctgacaggtgggccccacctgtcggactcgtcgtcctcctccggccgcccgccgcccgaaccctagcgccgcgccgccgccatctccttccaaattcgctcgcgcctttccttctccggtgaaatcaatagaggggaaatgatcttcggaatcccctctatcttttctcttatggaatcgtcggctaatttcgtttggaaattcgcggattcgagttcgattcagatcgatctctctcctctgaaccctagaccttccttcgccgtcgccggtcaccgtgggcctccgacgctgccttccaacccctttaaaaggacccccaagtccgccgctacccgtcgccacccttgccttcgtctctcgtcgtccgtagcgccctagccccgtgagacctcgcgccgccgtcgtcgccgccgctccagccgtgcgccgccgtcgctccagtcgtcgtcgtcgctcgggaaggtcgccatcgtggtcgccgtcgcgtcgccgtcctcgtccgcccctccgccgttgctgtcgaccgccggaacaccgccgtcgtcgtcaagccgaaggtcgccgccgcttcttcctcgacgccgtcgccgtccgttgatcttccgtcgccgttttggtcaccggtgagtttgccgtgccgtccgctacccgtaggtgctctccgttcgcgccgccacgccgtcgttcgccggtgagcatgcgcgcccgagccgccgccggtggtgacgtcgtcgctgacgtcatcgtcgtcgtctctcgtggtctggccgtggaccgttcgatctcggccgtccgttttggataggatcgatctcggccgttcgtttccgtgagccgccgccgtgcacccggtccaccgcaaaccctagccgctgacgcaataattcctttttcctgttcaaaaataattcattattgcgtcataattcaattaaaatccatataagtgttttaatctgatttaatctttaaaaattcataactaattcatcttagctcggatttagttggttcaagtctctaaatttttctaaaattgagatctacatgttaaaaatatccacatgtactgctcatgcttgttattgtgctgttttggtgattttgctccattctgtttagattccgatgtttccggagagtccgttttcgcaggagaagaatttgaagagttccaaggccagcaaggcaagtcacacagatcccaaacaaccctttgagcatgttgatcccgtttaaagctactgtttctattcaactattgcatttatttttgaatgtcattgggtggaattaacctattgtttgttatagccctttttgttcttgattactttactccttgataccttgggtgattataacttgactagttgggctatatatattggttcagctagatattagatatgattgcttagccatgcctagaaacattagcacactattgggataacttatgattcactattatttaatgatggcttaatgatagttcacgatggtcaatcgtgattggttaattaattatttgccaactaaaacttgataatggtgggttgtgagcacatggttttgagagtcgtgctcatgacaattaaggaccggttcacgagtttcggttgtgaaacattaaccgtgccaaccacaagccagcgtgggcaacggctttaccttttgtatagcatggttcattgcggagcaccagactgagaagtggcggagataagcccacgggggtcgctggggagtccatgccttgtttataagggggtgattatgatccaggaatggtgcgctgtggtggattgtgttgtgcgaggggtactatcacagctcctttccgaggtaccgtggtggtattgaggcacatggtgacatgatgtggggctgtgtcttgtgggtacagtggtacacctctgatcagagtaaaactattcgaatagccgtgcccgcggttatgggcgggtctaacaatgtctttcgtgattagtttcacacttctcatcataataaaagatgctataactgatagtaatttgattagctcctggtttggaatggtatattcctggtttggagatagaactgtgcagccgggatggttgttcagaatggttgggcctatgcaacagggtatgttgtatagcgttggattaatattgtttaattatcacttaactgttttattaaattctgaaatgtttattaaatgctgtttatgcaaatgaaaccctactatgccatcctttgttatcctgagcacttgcatatttgctgcgtggcttgctaagtatgtcatatactcaccttgcaatcattcatcagaggaagagttctacagtgatgctgatggtgtggaggattaggtgtagccttggtcaagctgcctgtggagtggagtcgtctgcgccgtttatcttattttccgctgcttagatctttattgattgagaggaactatctacctctgtaatgacattttattcgcttattaattagagtaataattgtactctattatcaatttgttattgtgtgcctcggctgattcctggacgagggttcacacacatgtaagcgtttggaattttggatagaaattccgggcgtgacagctaaggaaattcatcatggagtccatagatggagagattcctacttggataggactgggttgtcactgtatcgtgtagggtccgatgtctccgagtcctacttggagaccacctgatctgcggtataaaaggtaccccccgggagaacctaaggcatcgaatctcagaactaagaccaccacagcttatgaagacggagcctacaggagccaagtcgccgggtgatttagtcgaaccaactcaactacgatctcgtcggtatcatcgagttctgttattccctttgtaacttgtggtttccattatataatcccataccaactggattagggctattacctataaaggggcctgaatcagtataatctttgtcttctgtttccttgatgtcgtactacgtagatcctcgtaccagcgtaccccagtaccctctatatccggtctacgggtatcccccgtcgacaattgtgccgatgcattatttatcacaaaatttatttttagataaataaataaaaaatatgtatttactttttaaaagaaagttattaaaaatgaggagcattcatacaaagttaggactaccaatgctcacaatatgttttttatgaatgctgctgatcaaaaatatccgttgtcctattaaaatttcaaatataaaatttaatttattacatttgtttatttttcataatttatgtcaaaattttgtacactaattatttagtctcattagtttcataaaatgcacatactatgcacttgaacaaaaatttcaatcgtttttcaagcatatattcaaacctaaagcatcaagagtaaaaatgacatttgcaaccaaacgtaatagtgaaatgatggaaaatgtaacggtaggggcatggaagggatcaagttgaaatttcagggatatagaagggatcaggtaaatttcaggggtatgaaagagattgagtgaatttttaggggtatacagggaatttctcataatatgaatgatatattggagtaggaagatagatacagaatgatctattttggatgactattcagaccaagatatggagtaccgatactctagtgtgtgatatggagggtaaacaaaggaaaatagtataattataaacagtgttccttgttatgaaatctatcttattgtggatgaattaaattatgaatgcgaagcttactacagaagaaagcttacgccagaagccaacttacagaggaagccagcttacggcgcaagccagcttacaggagaagcccgcttacggcgtaagccggcttacaacgcaagccagaaggtccaaggcttacgacgtaagtctccaccctcctccgcctataaatagggcccagaaggtccaaggcgaggacaaccgatcttcggtctcctgcttctcctcttatagcttgtactcaaatccagaagaaataaagcttccactcactcatactttctatgttcaacaactctgtgtttggtttgcttgtgtgctgatcagtagaatagactggtttctcaacacgttatcagcacgagactctaccgagctaaaaaggtaaacaggtgagaaatcagtttctactgatcatcttgctctttatatgcaaatcattcttctgctatagttgaaataagcagaagagcatggtacctgaagtaccatcccccgatattatctcaacgatacacaataacatcatggcggctctgccgccattatcgttgaattgctacagttgatacatcctctcagcaacgcccggtaacatgatggcagctctgccgccattaccgtccaaaggcttgagatggtacatccccttagcactatttgataacacaatggtggctctgccgccgttatcgtccaaatggtaggggcgatgtaggtgcctgaagcaccggcatggcaacttggacggctccgcggccgttgccaccaaatatcggaggcaaacgaaccttctgcacgaccctgaagtgtcgttttggatgtcctttgttttatggacatcacccatatgggcccttgatgccactaaggtcggctctgccaccatgaagcatgggctcatagtggggaagtgctacatggtttatcttactttttacagtctgcacaatatacatgaagttgtgcccatgtatactcttcgttttgttttacatgcttactttgttgtttgcatgtctttcataacatttattttattgttatgaaattgatttcctagcatgattgataatagttaatcaagcaatatgtaatcctgaagattacttaagttaatttgctaggaaagattctatgggaaactgtgtgataatcctaaagattacacacactagtaatcctgaagattacgcatgaccaattcatgtcgaccctgcacatcgtatttaccagtcgtaaataccaaattatgttgcagaacatgtcggacataacaaagaaggaattcgccgagcttgccttggatggtagtaactacctcacttgggcattggacgttgagattaaactcgactccattggtctcgatcatactattgtgctgcccgaacttggcactgtggagtctacgaaggccgagaaagcaaaggcattgcatttcttgcgccaccatctccacccagacctgaagtctgagtatatgaccgagaaaaatccactggtattatggcaatccctgaaggatcgctttgaccagcaagggtcaattgtgctcccacaggtacaacatgactggatcaccctacacttccaagactacaagtctacggcggcgtataactctgccccccataggatcatttctcagttgcgtttttgtggccagaagatcactgacgctgagatgatcgagaaaaccttatctacctttcatcccaacaacatagtgctgcaacagcaatacaggaactcaaagtacccgaagtactctgatcttatctcagtcctgttagttgcagaaaggcagaatgaagttcttctaaagaatcattctgctagacccactgggtctatggcagtgcctgaagcacacgccaatgttgttggaaactcgcgtggccgtaaaagaggccatggtgagaagaaagggaaaggtaagggaagtatcaaattcaagggcaagagcaagggtaaacccagaggtaaaggcgaactcaagaaggttacaggtgaatcatctggggaaaagcaggataactgctatagatgtggaggcagagggcattggtcccgtaactgccatgtccccaagcacctggttgagctctaccaacaaagcatgaatgagaaaaagagccaacatgagtcccacttcaccattgagcctgaagctcagattgaaaagcatgatgacatgcttatcaatgttaaggatggtggggacgtccgtatggacgatgattggaacaaccttcttgaaaaagatgataacatatttggagacctgaagtaatctcctatatgtcagtcatatgcagtgttccgcatgagtagcacatgtagaactttggtcataaataatgctcctgaagagcaagcttagtattttactgggcctgaagtccttgtaatgtttcccttaatagaatcaatttactccatgtttaatttcatttatgtttatgttctataaacagaccttatgggaatcccatggcagaagaggatatatgtctagtagacaatgccaccactaacacaatcttaagggaaactatgtatttccacaccttaactaagaaaactagaaatattatgaccattgccggaagcaatgctcatatagtaggcaccggaagtgctactctagttctccctatgggtacccatatctttgtaaaggatgctctattggatcctgattcaaagcgtaccctcttaagctttaaagatatccgtgcaaacggtttccatatagaaaccgagattgagcaagatgctgaatatctgctcataagaaaaatagatggatatcaaaagcaagtggtggaaaggctcccttcattgccatcgggtttgtactacacgtacataaaacccactgaggaatatgtggcgatgaagaccatatttagaaacccagagtcatttagagtttggtatgacaggctgggtcatcctgggttgggtatgatgaggagaatcatcagcaattctgctggccacaatgttgaaactaatgacttccctaatcctgaagattttatttgccctgcttgtgcaaaagggaagttgatcattaggccatccctcctgaagattagggatgagtcacctgttttcctggtaagaatacaaggtgacatatgtggacctatccagcccctgtcgggcccggttaggtatttcgtggtactgattgatgcttctaccaggtggaccatgtggacctgttgtccacaaggaaccatgcttttcaaagctaattgcccaaatcatcaagctaaaagcttgcttccctgatagccgcgtacaatccattcgaatggataatgctggtgagttcaggtcgaaggcttttgatgattattgtttagccatggccatgggcattaaggtagaatattcagtaccacatgtccacactcaaaatggcctagctgaatccttgatcaagaggatcaagttgattgcacagccactgttgcaggattgtaggttgccaaccagttgttggggccatgctgtgttgcacgcagcaacactaatccaactcaggccaactgcatatcatagtacatccccccttcaactagtgcgtggaaaagaaccaagtatttcccatttgcgtaatcccaccaccacagcgtacttctatgggaccccaccagaagttggggatatacgttggttatgagactttgtccataatcaagtatcttgagcgtatgactggggatcttcatatggctcggtacgctgattgtatctttgatgaggactattttcccagcattagggggagaaaggcatccagaagaatgccgagatataatatggaatgcaactgggatgcagtccttagatccacgcactagtgaagctgaactagaagttcagagaatcataaatttgcaaaatattgtaaataagttgccagatgccttcactgattacaagggagtgacaaggtcgcatatacctacagtaaatgcgccggaaagagtagaggtaacccagaaggttactgactctgctcttaccccccatcctaggaagatggggagacctccagttgaagaagctcaacctgaagttgagaaagccccagaagaggcaactcaacctgaagttgagatggtcccagaaggacaccatcctaaagatggagaacccagtgccttacgcgcgtaccttggctctggaagatcggaacactccaactcggtcgttatgggaaatcacgatgagctggaggaaataaatgaggagatttccactaattgttctgatacaggagagttacatcatagaaagaccactatcgtcgacattcactttgcctcaaagattgttgtcataatggatccagatccagaaccaaagtccatgattgagtgccagaagcgctcagattgggacaaatggaaagcagcaatagaggcaaagatgcggtcgctttataaaagagaggtttttgggcctgcagtcccaacacctccaagaatcatccctgtaggatgcaaatgggtcttcctccggaagaggaatggccaggtggtgaggtataaagcaaggctagtggcacaatggtccatgcagagacccggtattgactatgatgaaacttactctcctgtgatgagtggaatcacgttccgatacttgatctcaatggcaactaatatgaacttagatatgcagttgatggatgtagtgaccgcatacttgtatgggtcactagattcggaaatttatatgagggtccctgaaggactcaagattccgaatccgaaaggaaatcgcaacatgtatagtgttcgcctgcagcgatcattatatggattgaaacaatccggaaggatgtggttcaatcgattaagtaactatctcctgaagagaggttacttaaacaatgatgattgtccctgtgtgtttataaaatccctgagatgaaggacttggggaaaaccaagttctgcttgggcctgcagctcgagcacctccctgaaggagtgttcatgtaccagtctacctataccaagagggtccttggtaagtttaatatggataaatgtcatcctttgaaaacccccatggtggtctgatccctggaagcggataaggacccatttaaacccaagaaagatgatgaggaaatgttgggacctgaagttccctacttaagcgccattggagcactaatgtatctagcctattgcacaagacctgatattgctttcgcacttaatctattggctagatatagtgcaaccccaaccagaagacattgggttggcgttaaaactatcctcaggtaccttcgaggtactcaagatcttgggttgtggttcccgaagaaccaagatccatccatggtgggatatgtggatgctggctatatgtctgatcctcataatgccatatcccagactgggtttatatttctttgtggtaatactgccatttcctggcggtctgtaaagcaaaccctggttgcaacgtcaaccaaccactcagaaataattgctctatatgaggccacacgagaatgtgtgtggcttaggcggatgatcggtcacatccagaagtcatgtggcctaaacattgataacacccccaccattatctatgaggataacgctgcttgtgttgcacaaatacatatgggctatgtgaaaagcaatttcacaaagcatattgttcccaaattcttttatccccacgagctccagaagagcggggaaataaatgtcctgcaaactaagtcatgtgaaaatctcgcagatttatttacgaagtctctgccagcctcaagtttccacagatgtgttcgtggcattggcatgagacgacttagtgaattgcaaggatcagggggagcaaag

SEQ ID NO: 6976 - DNA, 1846 bp, Oryza sativa
tgatcaccctctgatataacaagtccagagaagtcctcatttgcccaatcagtggccattacatcaccttcctcatcggatgatgcgtcgtcgtccgcttcctcattatccgaatcttccctctccatttcatcaacaattatactgactctctccccctcatccgccatgcccatagcctgctcctcccttggttgattttcctcattttgcatcgatggtccaacaacatcccctgcattgataggaccctctacatcttcggtttgcattgaaacatttatatctttctcttgtaccgacacaaatataacgaggggccatgaccgttcaaaagccatttccacataccgtctccaagcatcagtgctgtccatcggcattagttcccaaaaataaccttctgttgcacgactcactacaactgacactgacattgtgtagacttcttggtctattctaaatcctctcaacaaccaactataaattgactgaaatgttctctccgcaggcctatcgatgcccttagatgtcattacaaaatctgacagatcaacaccatctggaccaaatctaatatttccttcaccgtgaactatctgaaatgtgaccttacttgacattgtgcctgatgaaaacaataactgcgttaacctcgcatttctgtactacgccctaagttacattctctacaatattgttctctaaatttctaaaattacgttacattctccagatcaaactaaactacatcttacaattaacactactgtctatgtctcaattcatactattatattctatgctctggatctacacatatgtgttgtgtgctacagatgtgctaaaatatatggaactaaaactaaaacgcaacatatatactcaaacataacatattagtacaaatgcaaaagatgtatgggagcatacctgtgatgaattgagcgaaccagcagggcttcgccgctccccttctgctgccctcccctctctctctttcgtttttttggatttttagtgaatataatgaaatttcacagaggagggactgggctttataggggggaggcaaaaatcgccctcccccagggcggcaagggggccgcctgcaaaattccatgccccctcgccgcccatttgcaggcgccccccccccccacagtacaaaatcgccctagcggagggcggcaagggggccgcctgcaaaattccatgccccccctcgccgcccatttgcaggcggccccccgcacagtataaaatcgccctagcggagggcggcaagggggccgcctgcaaatttcgttgacggccgtcgcccgagagcgaacggccgtctgccacgtcattttcgccgccctctgagagggcgatttttcccagagggcggtaggcgactacttccgtcaattttcaaaatggaaattatttttgtaaaacttttaataaaaaaaattataaataaaaaaaattccatataggactactactcagcacaatgaggcccaggcaggctgacgaattctcgcgggcctcacacgacgtactactactctgcagcattctcatgaaaaaccttgtaaaattatcgtcgaaaccggttcggattcggtctcatttggaatgaaatgctcttatgaaaacttcacaaaaatttcattggaattggttcgattcccgcatatttggtcccatcatctagctatattgctgatgaaaactccttgttttcgaatcaccatctctctaaactagtgtaataatctgtactcatatagtgtagtactagtagtatatagaaggctaagctagaagtggtgatgcttttctaatattttcaagc

SEQ ID NO: 6977 - DNA, 1705 bp, Oryza sativa
attcctgcagcctctgggctgagcagtaccgtgcgaaacaggtgccgtaggtcgaggtcctgctccgacggtaggcgcgcgaggccgtggttgtaccggaccagctggaggtacgacgtccacggcgctgtgacaggagaagacgcgcatgaccgcacgcatcttctcctgcatccggtcgaaggtcaccctctgctcaacgtcagtcaagtgcaaacctctgttcaacctcatttggactgcggtgatatcggcactgatatcccgtgcggcatcagcctatgcaagatggaaataaaaaattcagtagttgtcctatattatgcaagataaatgaaataattgtaagaagtaatacaaattggacgtaccgccacgaagtagtctcggtcacggtgcgtgggatacgcgtccgtgacagcggcaacgtgcggctctggggcgtctggagtgaaggtcacacgcgcatgagtgcgaggaaggtaccagcgaaggtagacacggtagttctcctccgtgtgtgggaagagcttgttgatcacctcctctgtagctaacacccagtcgtcaacgtactgctgtacacgtggagcccaaagtgcgcctgctagctgtccccgtcgagtcaacctgtgaagagaggtaaattatatggctcgatgaagtaatccgcctaaaaatttagaaatgaacaatccgaactcacgagtggtcggcagggaggacggtcggctgcacgttgcccggaaacacctgcctaagtccgaactgtctcatcacacgctgtgggcagtgaggctcaacgaaaatatcgaacaccatcggcaggatggtgagccagtaagcctggtcgcgtgtgcacaaggacgaaagtcctagcggtgctctcgcagcgacggaaggtgccgagctgtgcaccctcgactgctgacaggaacgagcggtggttcctgtcaaaaccacggttcaacagcgccggtgtgtcgtacaccatacctgcatcaaataggttgatcagaaacatataaataattagttcaacataagtaataaatgttcataagcgaattactaacacatattaaacaagagtacaaataaacaaaagtgtttagtccgaacactcatcacgataatattatgatacaacaccgaatagttcgcaatactactagtacaacaatagtcggaggtactcattacaacaacattgaattgaaattacacgatagaagtatttagtccgaacactcattacatcacaacagcattttatttcctaaatcgaaagcattgttacaccatggaatcgcctgctgcgcgacgacgccttggccttgcgcgcctgcttgttgttccttcaccaggtggtcgcctaccatcacttgcctgtccagatggactagcatctgcgccgcttggaacttctgcattcttcgggcatttcttgtaagtatggccgcgcagatcacacttgctgcagcgtaaagtcctcccacctgcttctgactcatccatatcatttctgatgcgtctagtttggcgtcgaccctttttcacccttaacttagatggatctggaatataaaaaacttgggcactcagcgttgtgtaagatcctgagatcccgaacccatatatctcctcactccatgtatgaaagattgcttctttcctgaaataatttgagacgtacacattggga

SEQ ID NO: 6978 - DNA, 1769 bp, Oryza sativa
tatccattgatagtgtggttttgtgaaactacactaccaaaatatatgtacttaagtgtcaagtatcaaagtgtgtgcggttttctgcaacttggaccacaaaacgtgtagttttgtgaaatttactctaaacgttatggagagatttttgaaagttacatacatgttacattatagttacagtgtaattacactacgattgtattataattacatctgtcaaatttttggtggaaaatttgtcgacaaatatatagcaaattcgtaaccttgtatattttgagacgacataatcttccaaggcccaattgcaatttgcaaaagaacacaaggacaggcgggccttcagggaaaggccacatttaattttgcagaggtcttgcaagtccaatgaagaaccagcccatagctgaagcgagtgttactgggccatcaaaaagcccatttatctctgttacattccgacaagaatatgctaaaattgcgtcagttcactcggagctagtatgtaatgtatgtaagcaaatccgttgattagcagattcactgattcagtggttggttttgaggaagggcacttgaagaggtgaaggaaccagtgcatggcattgccaataatatactgtcaactgctctgttttgcaattagaaaaaaaatgtgctaacctaccaaaacaaccacctcttcttagctcccttgcgcttgagaattttggctttctcccttctccatcccacggaccagtgcttccatccttttcctgcaaagacaaaaacagaacagcgaaaacgcaaacttgacacgcaaaaacgaagatgtaagcccatttctgaactcaaacaattgaaattttcatctggagtagccattcaagaagcacttaacgtatcagtgtataatttgttcaatatcctaatgagcatgggtgtaaatatgttgtaacagttcattctgctctatcaatacatacgaggcaaaacttttgccctcttttcaagagagagagagagagagagagagagagagagcatgggtgggataaggccccttaggcctagtcgggatttcttgctgtctcagatgatagctgaatattcttaattgcgaagtaaaagaaattgacaaggcctttattttcagatgtttacatattgcaatacaaaccaatcatctggatgtgaataaagaaactattcaaatgcatatggattatataacacaataattaagcaccattccttcactagtttgtcaatatttgaagtacatgttcacaagttacaagtgagcccattcgactatgacagagatgataaaaacacatgaacaatgcaagatttaatacctcgtatcctcgagctgtccatgcaagctccatctctggcgaaatccctccatgccctcaagcccactagcaagaatcatgcgcctacagaagtacgagactacatacaagcagaactgatgaaatcatgccgatgaattattaacaaaaactcagtacacctgatgatttcttttgtccagtttaatctaatcaatacaattagaaaaaaagtctgtaggcaataggtagtgttcttaaaagcaaaagtctgtaaatcattttatacggtgctgaagagtggtcacaaggcaatttaacgtgtgcttggctttgtccctggtgctactcattgtctcgtatgcctgtagaacagcagaatgcgtagtattggttacaagtgtttcacagagcatcggcttaacttaactaaacagtaaacac

SEQ ID NO: 6979 - DNA, 1379 bp, Oryza sativa
tcctcgcaggacctcgtttgccttcgagcgcccctagcttcggagcagtgcgacctacagcaccggtttcgcacggtacagttcagcccagatattagttcatttttgtttcagcttttgcacgaatatgtcaccatgttttaactgcacgtttcctcatcgcaggacctcgtctgccttcgagcgcgttcgcaggcacgaccggcgcttccgcgagctccgcaggggcgttcgccacctcttcgggcgcgttcgccagctcttcctctcacggagcgtcgatccctcgcccacacggtactttactttttattactactgttaaatacttgtacgaaactgatggtccttgtccagcaggatttgcagccgggatcttcggtactggggcctcttcgtctcacgccggtaggactggtcctactagccagttctacgacgacgacttgcacagtgcacaccaccacgacgtactaggctcctctcagcttggaggagctccagaggcgcacactcaggagcagccagaggtcacacctgtacaggcaggacgggttggccgtgccgtacccccggaccgactcacgtactcccaggggcacattagggcgcagggtaggagggacaggggtaagaggcctcgtcagtagtgttctacctcttcagtccttatgtgaccgtttcttttggcttacaaacttgtaaagcagtactacttttgctattactactgcagtactacttgtgtttgtctcgtctacatagttcttttcattcatatggtgctagaacaacttatgctcacgacaacacactttcggcgcttcacggtagtgtcagatccagtagcgcgcacagtccacaacagcacacatgaaaagcggcagctcgagttatcactatcaactttcggcgctgcctgttgacataaagtgaatcacgcccacgcgtgatcgtcttgtcacatctaatgaataatgtatctcattgagttcacatatattgcagtgaaaacgacgctatataattgacaatctgaaggcaacctcttcatatcttctttcccactagcacaccacacacgaaaatggaagcctattcattggtaatacgtaatctagatttgagattatgtagaacattcttcactacaattttacattttggcagcaaaccaaatatgatcaaatgcaattttaccttaccaaatatttggtagtgccaaaacttgcttatattttggcactaacaaaatatttgtacggtaacaatccaaatatgccctaaaaaataataaaattgtattttaccagtcttggagattttaatcttgtatagttttcaatataaaaagatttgataactattgatatttatac

SEQ ID NO: 6980 - DNA, 4850 bp, Oryza sativa
cgaaggcatatacaattggagtgtgctatcatctcttaattatagcctgaacacttcggtgggttcactgaagcttaatttagaaagtataaataaaaatgagctgctaagcagagaatgatgctacggaaatatataggggggaagcaatcctagttaggttacctttcaagcaatgtgacttccaattggagttgagtagttctttcctttccttcttccaggggcatcgaaatgcgcagtttatattcactgtctaccatcttctctcttatttccttgtcctataaaataggatataaaagcaacatattaaataataaaagggaaaaccacttgcagtttcaaatagttcaacataaccttaccctttttgcagcacattgtcggtaaaacacaatttcatcttggcaaaaaggctcgatgtcattgatttgcaggcctgtgccgtataatatttttgcaataatacttccacacacagagaaagagaaacacgattttaaatgtcacagaaacagttaactcacataagaaaagattcctgagtataccatcacagggctcaacaccttgaaggacatgcgaggcaatttcttttggtatggcaggggatggtggctcacgcatgagatcatcaccagtgagaatggtctcttccattgtttcctgtttatcgactattgggaaacagatatgaaacaatagcatcacgggcacaagcagaagccatacatgatcacaaagttagaatctaaggctggattctcttatctattacgtatgaatacacagcatattgggagattagttatgattgtaatgtcatgtaggtaagtagtatcttgcagatgctttattggttatgcagctagaagaggatttttaccagcattccaccaaacttgatatcatttacatgaatggaggggaaatagagcaaagacaccaactgagctaatcaacaaatctcgggtatcattgtgtgcagcaaatcagcacaacttccagaagttgaaagcccaatggaagattatactagagagaaaaaacttaagaggcacctgagaaaaagatactatacgatgagactgcaatactgaacatgtccggactgactctataagggctttgttcaccgtattttgattacatcctttcttacaatacaaagataacaacacaaattttattaaagttaccatcatattctgtaggatgatatggagttcatttttcaagacaagaaatggactggagagcttagtccttattgtcctccaaacccatataattggcaatctactcaggatgacaatgctgacaataatgaatttcaaagtgattttcacactgcacatcactataattcagatcgcctatcagtgcaaaaaaagagttctttccttgtagttgcagttgttaaatccaaaattaactcggcttaccactaaattgcctgtcatgcaactacaatcaacccaggtccgcactaatcaccaactgcacattctatcagctaagacacaaattatacccctaactaataaaaactgttctttctactccccccagactaacacataataaccagagagcagtaggagaaaggggattacaagagggcaagcgcgtgcataccgtccatgatgccctagtaagctttcacgccggcgagcaatccgacgcggcaaaatcgaatcaactccctccagcaacaagaggaacaaatacaatacaggttagcctccgacttcgggagcagaggcgtgaagcccgaaaagaacgaatcaaatgcagagatggataccaaaaatggatcggagaggagccggacggcggcggccggcgaccaacggcggcgcgccgtttgccggcgaggggatcggaggaggaggacgacgacgacctgagccctgaaccacctgtgggccttctgggcttttgttcgctactataggcccacacgtctgtgcccatgggcctggttttccggcccacgatccatcggccccgatcaacggctgtgattcgacgagggtgagctagggcaggagtccccgccttccgatggaaaacggacggcgcagatcgcgtcccgcggcggccgcgcgctgtataaatccgcggccccgcagcgcgagaaacccttcaccgcagaaaccctagagctcaccctagcgcgccgccgccgcagccatctccgccgccgctcgtcgggctctctccatctcccatccaggtaaacggcacaccccccttggatctctccctctcttaggttgccatttggtagagtttttcttgttgatggaatgatgacgggtgctggaaatgtgcttcgctaatgctagtgctgcgatctgtgatccttttgctgtgagataattggtcttgctgtcgttagtgttagcttctacgcgttggcagtaggttcttggatcgaatgcagcagcgggcgttgggtttacttgaaatgttctgtttttttaatgttacagtttcatgtgtgaatcatagaatatttgtttccgtattgatgaaatggacaaaagtatggttaggatctgaatatgtagttccacgtttacgggatgtgtacaaacttgtatatgttgcattctatctctcctgattggttgttacgctcatttacttgctttgtccttacatgctagtgttatatgttagattcattcttttgctgtgatagtttattttgtggctagttaatgccatttatctgtttagactttgcatcgcagtcttggtcattgtcacctatgttcgtcctttattcttaggagataacatgcttaccgatagttgttagtcaccttggttgtttagatacatgaggagtttctacaaatcatgatccatctgttaagttgaagttacatagtctgaccatatttcgtcctgatttgttcaggatgaagttcatttctgcctatctgatggcctatctggctggcaactccagccccactgcggaggatttgacaacgattctggagtcaggtaatttcatctccctgatttatgtccatatttgaaactgttcagaaaatgtaatctagccaataaatctgcttaactggtgtctacattttcttctgcttaatctggctaattccatggcttcagaaagcagtttttttggtctaaatttcttagcatttaatcgttaaattagaaggtaccattctaaggtttgcattcctttctaaatgttagactatatttagattgattggtttcgttcttatcttcttgggtgctttcattaaatataatattgaagtaatagtcatccacttatagctgtatgtactgtgaaatttgacctcaatctttgtctttgtggcagttggttgtgaaatcgacaatgcaaagatggaactcctgttgtctcaagtgagtggcaaggacatcactgagctcatcgcttgtggcagggagaagtttgcttcagttccatctggtggtggtggtgtagctgttgctgctgctgctcctgctgccggtggtgctggtggtgctcctgcagctgaggcgaagaaagaagataaggtcgaagagaaggaagaaagtgatgatgtaagaccaatgttcttatttgtctcaattagcatattttgctcattcattatgtctatggtagtttgacatgacttctattcaatgtataatatcgtatgatttgcaaaccgttgcttctgctatgcttcttattgccatttaacattcatgtttagtttattagaacaaatacacctaatggtaactaatttaactgtttgcaaatttatttacaggacatgggcttcagtttgtttgactgagtgatgcggtcacctcttctatcatcaataccagactttgcgcaggaaactagagtgatgatgtttgggattttagcttttcttctttagttaagttgaaaacacttgaggaaagactatgcttcctactatgttttgatatgtagtaacgcagccataggttgctggttacttcactggtgaaccatgcttttgctatcaaaattcaatgcttaatggaggatgaattgtgctcggcagtagtttttagctgtgttcaattatgtgtccctatttgttcggtgttatcagctcccaatttgattcatttgagctacgttatctgtctatcgttcatcttccgaagttgttttcctttgattttctgttttagagattacgataagccagaagttacatcagtaataataaaaaactttggcaattttaaacgagaaaaaaggctattttttgcatgcagatgcagtaaaaaatcatgtaaacaatttctggagtctggacatagcaaatgaaagattaaggacatgcgtagtggttaatttcaaagtagtgatagaatcatagaattgccatacaatctaatgatctctctcaaagagcaaaatatgtagatggaaattataggactggcatataatacgaaatgaaccaatcacgaaagagctactaataaatttgccagaattccatatctcaaagagcaaaatatggagatggaaattataggactatggcatataaatacgaaatgaaccaatcacgaaagagctactactaaatttgccagaatttatttttatgattactgcttcagaatgataagaaacagatctcttatatacccctgaaatacccctgaattttgcttactttcttgtataccccaaaaatttgattttgatcccttgcatactcctcccgttagttgaccgtatattttctataaaaatgaccattttacccttggatgaataaagaaattcataaatgggctgcaggaat

SEQ ID NO: 6981 - DNA, 60196 bp, Oryza sativa
ccacccctctttatatggcacagtgtgacgggggcccaccagccattgggctgggcgcccccgatcagggcgcgggtcaaggcccccttgagccgttgggctcaaggggagggagatccatctaacatgtggcattatcttccatgcattaatctggggataacgtgttatgtatcctgattttctatcccgaaacatataaacgtgtcaaatgtcgcattaatttgttcaaaaaaggacaaaatttcctttctttcaaaaaaagaaaaagaaaaattgctactccagttttctacattttcagatatatgtgttgctatgctagaaccccagcatttcacatctgtatagcgtgctctagagacaagttgaatctgtggttatacaaagttcttcagtcaacaatgatcagtagtacataattttgtcatggtacaaaataacaatactgatattgtttaactcgacgcaggacaccacctccttatattttggaaattaactatcaaactctacttataagtcattcgatctccgctcaccatccgtgcacctgattattataaaatattaaatacggaacatgtttgaatccacgataatgtatatagcttaaaccataataagtaattgcgcactaggccccaatcccccctccctgcgccataccatatttaatgcattcctgtcgtgctcattacgtaatctcgcacccacgcaaaaagaatatgcaaatgcgtgggaggatttttactacaaacccatgcatcgtcaacgagaaggggcgcgcgcgccaccacgtagattatcagaaacaaccacgtatacttcaactttattataaaaaaaacatacatatagcgaaatgccaaggtacgtagcagcagattgtggccgtagcaacgtagctcaaacgttggtcaatccatgtgcaattacattacctagtaaaataaaaggtaaaaaaaatgccaatcccaaacggcacaggcgcacagcatttgaatattacggtttagaataatccccaacacggctcatcccaacccgtacggaacagcttgacaacagcagagtacgcgccactcgtgtgtacaacccccgggtgacccaagccacgcacgccaacgacgacagcgccacctgtcacagaagaatctccctaccccctgtcactgccatgtgggcccatgacgcgcggccaccaccaaaccaccaccatcccgaccaatcaaacggagacgaggcgacggcgacgacagcgacagcgccgtggcagtatactccttgccagtagaagcatccgagacgtgacgtcacgtcaccccgcctttactcgctttctccgttctccctagccgcgtgagccgcggtttgcatctcatcttcactcgcttgctctctcttccacccgctttcctcttcctcctcgccgcgcttccgcgtgggcccccatccccgttacctatatatacccccccccttctcaccgtctccttcctccctccaagtccaagtgaccaaccatcatcaatcatcgctaagcccacctcggagatctcgagttcgatcgtcgtcgtcgtagctgtagaggtagttaattatctcgttttagatgagctcactgacggcggcgcagttccggtcgctgtttgagatggcaggaggggaggatatctcgtttctgtttggtgatgatgaggcggcggcggtggcggcgccggtggagttgcaggggaagagggggtgggaggaggtggatcaaggggaggggtctggggcggtggcggcgaagaggcagcggtcgccgacgagctcgagggagaatagtagcgggagtaatgagggtgggcaggaggaggtgtctgaggcggcggcggccatggcggcggcggtggggaggggtggggggaggaggctgtgggtgaaggagagggactcggagtggtgggacatggtgagtagcccggattacccggactcggagttcaggaaggcgttccgcatgtccaaagccacgttcgaggtggtctgcgacgagctcaccgcccccgtcgccaaggaggacaccatgctccgcgccgccatcccggtgcgcaagcgcgtccgccgtctgcgtctggcgcctcgccacgggggagcccctgaggctggtgtccaagcgcttcggcctcgggatctccacctgccacaagctcgtgctcgaggtatgcgccgcgctcaaggccatggtgatgcccaaggtggtgcgctggcccgaggccggagacgcgccggccatcgccgcgcacttcgaggccatctccgggatctccggcgtcgtcggcgcgatctacaccacccacatccccatcatcgcgcccaagtccaacgtcgcctcctactacaaccgccgccacacggagcgcaaccagaagacctcctactccatgaccgtccagtgcgtcgtcgactccaccggcgccttcaccgacgtctgcatcggctggccggggtccaactccgacgaggaggtgctcgagaagtcggcgctgtacctgcaccgcggcgttcccggcctgatccagggccagtgggtggtcggcggcgggagcttcccgctcatggactggatgctcgtgccctacacccaccagaacctgacgtgggcgcagcacatgctcaacgagaaggtcgccgccgtgcgcggcgtggcgcgcgacgcgttcgagcgcctcaagcgccggtggggctgcctccagaagcgcaccgaggtgaagctgctcgacctccccaccgtgctcggcgcctgctgcgtcctccacaacatctgcgagcgcagcggcgacgccgtcgtcgacgccgacgactgcgccttcgacctcttcgacgacgacatggtcgccgagaacgccgtccgctcctccgccgccgcgcaggcccgcgacgccatcgcccacaacctcctccacagcggcggcggcgcatccttcttctgatcaagcatcatcgccgttcttggtccgatcaacagcgataccaaacaaaccaccaaaaataaaaaagaaaaacaagattcagtttttaggtgtataggaggagcttctccattttttgtcggaaatggagcagtgaacagtttttcgctttatcgtcaggagggacaggaaagttcagagtcctagtagtctcaaagtaacattagtttcttggttggattttcgattgatttggttcttttagatcttgagagattgtttttcatggggttgtaattaattgcctgcataatcttgtatcccccagattatcaattaatcaaacctgaaaaagaaaatcatttttttgccaaccaaatgtatcagaatatctttcactctttctgcgtgggctcgtgcttggatcgattgtgctgttgtctgacggatatctttgaattgaccaaagtcagagcaagaataatcatccatctccttctttgtttaatgagaaatcctcaagatgtattaggtggcagcgtgccattcatagccgtactaatgacctctctctacctgataattggggatggattatgaaaagaaacagatggggcatgcccagtcaatgtacaagctggcaatgctgggataactagctttactattttactgaccttgaataattacaacgcagattacaaccactagtttactgccttgaataattacagcccaccttggataaggatgtgttcacagcttgttaccattagagaatggtaattaatgggggatctctacggtgattacacactgctattgtagctatggtaattaatattatttctctgttggttgaaaatggaaaggaggtatacacttatattacaggaaccagaaattcggggctcgaatctgaaatttgaaaaacgcaaaacctgctggcacatatatgctctgggctgtttaattcaagtatcctacaactgttaacaggtattccttccagacgaaattatttaacgtttcggacagtgaaaatggcttacacctagtagtatttagctgtcggaaaagtcagataaattcagggaatagaacaattgaagattaatcgcaggccaccctgatttgctgaatgtacaacctgctctttgcaatttcagtgtaccctgtcaatttcgtcttcaacaaactcgcaaacaaaagctataatcagaattggacttgaagatgttacaatcatggagaaaagaaacagtgcagccaagcatgtctctcatgtgactaaaatccatagatgtggatacacacgctgtaaagccatgtggatgcaatatgtttgagatcctaagaaatccgttgaccggattctataaggttgacctcttgaacacacacacaaacaaatacacaatgagattgtgtcactgtcagtctgtcactgatcactgctgatactgaagatctctcttgaagactagtactccacagtagtggatttcactcgagatttcagatcatggtttggtttggtagggtttgtgcactgttgagatgaaaaggaaagcgtttgctccctggaattaggcactgggaatggcatgccacggctgaggaaaccgtgccgaccaaggtgtgtatgaactcgcaatcaactttcagtgttcccttttggaaaaatgttacactgaagaagacgacgactggaagacggaattatatattagttaaaaattccatatcaatccaaaaggaggctacgtgtaagtgttgacgtttatgccaggtgaaaaagaaacgcgttgaccctacagattattatccagctagtggtcggcgtcctctgtgactctgtgttggcgagagttggtgtctggaattgggcttggtgagctttggaattttgggccggccttgtaatgccagtccaggtgttgtgcagcgagcacgggacatcaaaaaatttgttactgggccattttaaacgaaagataaagtccagtttgaacccctctggatgcatctggttcatatcctcaattcatctcctaccggtagatgaatagttgagggattatcgatggacattttccataatatagtactggaagaggcccaatcctaacgctaactttaataggcctccagtccatcaaggcccataatctctctctacaagtagaagagagtattttcctattttcggcgatttcgagtgcaatcagccaaagtaaaacgaaccctaggtttgctttcccctctcctctcgtgcgcgccttcgtcgtcgtcgtcgtcggcggcggcggcatggcggacgacggagacggcgactgcgtgaacctggagcctttcttctacgacgaggcagcgaccgtggccgaggcggcggcggcggcggagaggcgggagcgggaggagcaggagaaggcgcgggaggcggcggcgaacgccaggagatgggcggcgcacaacgccgccctcgccggcatccgcgagtacgaccccgccgaggagacgtacatctacacccgctaccactacgcggacctgtccgagttcgacctcgacgaggagtcccgcctccctcccatgcgccacaccgccgccacctacgccccgccggcgcgagccctccacttcctctgcgatatgatcaacgtcctcgccgtccgcatcatcctcccctcctccgatcgctctgatggtggtggtgtcggcttccccatcagcgtctacggttctgtcatcgccagagaccagcttgattacaaatgtgtacatctcttccgccgctgcagagacgatcctcagctaatcacctcagaggtacggtacttagcttgttaattcatccattcataaattaatcgcatagtgtacaacacagcatcaatcagtatgataattttaatttgagaaaatttcacatgcgacaaatttgtcgcaaaactatatatttaactcgatgtatcacaaaactatagatttaacatcaaatttatcacaaaactacacatttaaagtggcgcttcacaaaattatatatttagaaccaatttagtcacaaaaccacaatgtttatagcttcaacgtaacaatggtgctagggatttaaactctagaatacgtagttttataataacttcaatattaaatatgtagttttatgatacttggtcttgtatctatagttttataatacgatgacttaaatctgtagttttgtgaaacttactcttttaattaattataggatgaactgtcgttgatattgactgggcctcatcgaggacttgtgctgtatgacgctctgtacattgaggtcgatctcaagatgaaggtgaagggtgatcaacaacaaggctgcaaggacaagcgactcagtaaagggctgatagtgttggatggcgtactgctctcaacaaacttgagcgaccatttgcgtgctgcggttaaaaccgccactcttgataggagaagcaccatgccctgtgccgtgcaggtcacttacgcgtatgtcacgcgtgcagtggaggccaccgtctccgttgagcttctgcatgatcagggaggatgagctcatttctgtggggagatcactgcttgcaccagcactatccgagatagcattgtgctccatgatagcagattactagcagatgatggcattgtggctgatggatctactgtccggctattgcgccgcgtgattggcgtctgtttggatgaggtgctgatagtgacaattgttgctcaagatggtgaccttgcaaaggcaactaactactgcagacaaaccgttgattttacaccttgtgtcaatggtggagacgaagctcgagttgtgggtggtgtcggcagttttcttgtgaaggttatttggtcgttaatggacccagttattgacaagtagtttgttatctttatcatcacgaatgtaggcttttagttgtgtactgattgtctgcaatagttatgtactgttgagaggaaaaagaaaacgtttgctccctggaattaggcactagcaatagcatgccacggctgaggaaaccgtgccggccaaagatgtgtacgaaactacgaactcgcaatcaacgtttagtgttcccttttggaaaaatgttacactgaagacgacgactggaaggtggaactatatattggttaaaaattccatatcatccatatggcaccatttccagcgaagctgatgtgcttagtactccatgcacgacacgtccatgagagtggattctaatccccatagggatatccgctcatgtaatgcacatagctatcccctcatgtaatgcacatagctgtgaaaaagtgttaaatatgtgatccgaattttgggaccacaatatattcggattagttatctaataggactctactttataggattagtttcctattaggactcctagatttctcctatatatattctttataggattagtttcctattaggactcctagatttctcctatatatatcccttgtaagccgcatggggagggtgcgacagcccaatgtatcccctgcgtttgtatccaattcctctatagtgatcattgccggtcggcgcccgtggtttttttccgcaagggtttttccacgtaaaattcgtgttgccattgtgcatctatttttataacaagtggtatcagagcattggaaatcgatctactaccatctcggctgccgacgagttcgtctgcttggagatcccatctgcaagttttagctgccggtacgctcgtcgtaagatctgatcggcagtagtaggcgcgtgtcgtcgcgtcgttccatctatcgctgccgtcagattgatttgtttgccgagataagattagccggtacgaagcggagtcagccgtcgactccgatcgggatttggtgccgccgtgcagcgtgttggagaaaaagcagcaatccatctacttcagcacgttgatcaaggaaagaaaaatcagcagatgcactcagccttgttactgttcacgtgaattgaatttcacgttggttttttgctgcgtgcacatgcctcttcgtaccagggattcaattcaattgcggtgcttcggttctgtttgggtgaatcaaattcaggttcaattttgtgctacattcacaagccatgtttaccaggaggttgtatatggagatcaacttcgttttatacacccagagtgtttcgcgtttctgctagggtttgacaaattgtaccagcagattcaggactttattcccaaggcgagtttgaagtttgatctactgcttctggattgagatacaatattctcattatggcaagtgaagttttgcagcggggtatttacctaggaggagaagtatgctggaaaaaaaaagagaagcacattcaagtcgtcgagagggagcctcgctcctgtctagatcacaaggtgatcaaatttttccggcgaattttgctaccattgtacccaacataccatgaggttatcaggggatctaagtacttcgttttgtgcacaagaatttttcgcgtttctgtttagattccagaaattcatgccagcagattcaggattttattcccatggcgagtttgaagtttgtgcaccagtttcacgtctctgctaggttcagacaagttaatactagcagattcaggatttgttcccaatggcgagtttgaagtatggtctacctcttctggatcaaggatgttatggattatagtccaagtgactatttggcgcacattgatcttatcatcacgaggttgtttagagattgaagatttttatgctacaagggaaattcgtctcaaggtggagatcgttaaatatgtgatccaaattttgggcccacaatatattcggattagttatctaataggactctactttataggattagtttcctattaggactcctagattactcctatatatatcccttgtaagccgcacggggagggtgcgacagcctaatgtatcccctgcgtttgtatccaattcctctatagtgatcattgccggtcgacgcccatggttttttcccgcaagggtttttccacgtaaaattcgtgtctccgttgtgcatatattttcataacaaaaagtctaaaaaaaattaacaatgtagagtatagtaatatctaatagtccatcaaaaatcaagtttaaattcgacctacacagtgagaaaaataagacaaattaaaatgcgaatagtatgctactatttatacgttgaatttgtatgtttatattgttgcgccgccgtcagcaccagtagaggcggcgtcagtgtcgcctatgctaacgatgacgatgtggccaccatcaccgcagcgatcaccgcggtggctagagcgcaatgcggcaaagcacacctacccatctcgcaagcactgtgattgtgtctatgggctacctcttctctcgttttctgttgcgaagcgacgagatatgaattatgaagggtaggtgcgcgacgggcgaaatatgttcgttcctcgtggggagtgagaatgacacgtgggccctattattttttatttttttaagtgatatgtcggctcatggtttttattattttctaaatcaaattgccacgtaaacgcaacatcaatgccacgtgggataaagattagttaaattggtcacgtaggtttcacttcagtcaaaaccggaaacaataccgccgaggggttctcgtttgcactacttttgtaagttagaggatccgttctatctggtttttcggttgaagcaataaaatcggaatcggtttcaagttaaggtatctgaaaagaacttattctattttcttttgagttgatttctgagcaattattagggctggcctttttatgtcagtcaccggtccgtgcgccaattcgtccggccggcctctgggcctccgcttgcaaattgcaatcgcgcgcgaccatctcccatctctccgtcggctactcggctgctgctccgcgcccccgcgacgcaccaaccgagagaccgcgccgcaaacgctacgcctcgtgcacctgtacgcgcgcgcgggcgcggctgccacacgtacgggcgaggagggagcaatcggatcacaccgtaccgcgcgtgtcggccttgctgtcgctctcgctctcgccctcgccgcggcggatgcgcacttgcgcggtacgtacaagcgccgcgcgcgcggccgaacacgtacgtacacgccgtaggctatacgtacaatactacctacctggctgctccaccgcgagaccgtacgtgcacgctacgcccagtgcgcggtgcggcgtgcgtacgcgcgcgcgggggcaattcagctgaccgcgcgtcgcgcgcgttcccctgcgcgcacggtcgccgctgccacgcgcgcgcgacacgctgcattacaattaaacctgatcgatcgattgattacttgatcggatgaaggatgagtagatctatgacgatcgtggctgctgctgtttgagtttaatcgatctactgctccagaacacccagccagcaaagcaactatgcgcatcattggcatatatacatatgctacaattaattaactaaatcaactcacctggacacgtactactactacttgagagtatttgacccgactcttcgactttgtggctgcaagttagggccctttgaatgaaaggatcctttatgtaggaatttcataggattcaaattctatagaaaattttcttatttggccctttaattcaaatgactgaagcttttcaaatcctatgaaatccctatggaatggcacattgcatgtggattttagagaaaatttagcaagagctccaacctcttggaaaatttccttttagtctatctctctcatccgattcctgtgttttttcctacattacaatcaaacgaccattcctgtgtttttcctgtattttgcaatcctctgttttacacttcaattcctgtcagaatcctgtgttcttcctattcctcctttttttctaccctacgattcaaaggggcccaagcaataatgctatttcctccgtttcatattataactcgtttgatttttttttatacaatttattttagtttgatcaaatttatagaaaagaaaagcaacattcacaacactaaattagcttcgttagatttaatattagatatagtttgataatatatttgttttgtattagaaatatttactattatacgaacgatttttctatacgagggctcctctaggttcttaagaggcccacatgtaaaaacatattttgcaaacaaacctcttaaggagttgtatgtaaaaataaacttattttctcaggcggagctcttcgcatgggaaaatatttttttgcaggtggcctcttaaaaatccatcttaaagtctgacttacctcctctttcaccgctcagcacttcaaatttttcaagtaatccttatgtcctttcctctctcttgcatcctctcctcatattactcatccctctctctctcatttcccaccttctctcctctctctccctccctccactccctcaggagcggtttgcggcgagcggtagtgcccgaccctcctccacgcgttgaaggaggtgaggggcactgtggccctcccccgcccagatccggcggcgacggacgccaccccacacgcgctttgaaggaggcgagggggcaaggccgtccccgcgtggatccggtgatggcggtgggagaagctcgacggcaaaggaaccttgctagagttccaattttgggggatttttttcagatttttgcatgcggacaacataagcacccgcacgcgaaactctgatttttcgtgtacgggtgcgttacccacatgaaaaatagcaattttcgcagacaccttcgggcagacgggcaactcaactgcatgaaaaatcggttttgaccatttggaaaaaaaaaacatttttagtagtggttactttatttttctataaagtcaggaaatttaaagaagtttgactaagaaaaattaaaagttaaatgacttattataatataaatcggagggaatcctatgcaacggttagttctaccttatttcgtccaaatatataaaaaatgttaaatggctagctagctatatatatatgcgctcccgaccaaaatctcacttatgctagctaggagctagtagcaagtttaaacactgtactgactgagcaaggcatgtggcaatttgtgggaatatttgtccggccgtgcatgagatcaatcgatcgatacgcatcacctagccagacatgcatgtacatccatccaactagatggaacttcacacttttcacttaacctaatctatagactgaaataggctagctaggtatgagttgtctttagccaaaatggggcaggcattgcctgctgataaggatgttagccgtccatttctgatcattttttttcctcggttactctctctctctctctctctctctctctaaaaaatagactacgttattaatttttgaatatgtatttgagcattctacttattaaaaaaattatgtaaaaacatatgatataaatcatatttaaagtatttttagtgaaaaaacaactcatagaaaataataattacacagtttttttttaaatagaacgaatgatccgtatttaacaaagttaacggtgtcatctattataaagtaaaggtagctttaccatcaacgctgtctatttaaacgcttgtcgaaaaacgagcatttcatatatacacacttatgaaaacaccaaaatacttatttaaagaaaaggaagatagtacttaatttaatatattatagtactcctgtgtatatacatccatagttatatatcctccttatcaatcagctcgcaattgatcatatatatatatatatatatatatacctaatatattttaatttgatgtgacacattctagctagtcgtatctttgtaatggccgtgtttagttcagcgtaaagtttggattttagttgaaattgaagatgatgtgactgaaaagttgtgtgtgtatgacaggttgatgtgatggaaaagaactgaagtttagatctaaacacaaccaatgttaggatttgttaagtgtagtagcagatcactctcggcacatgcagtgaagctagtgaagtcggcggtgacaagatataagtcggcggaaaaagaagcatattcgagctaaataggctattgctagctcgtagctcctccacacgtatgttcactgaggatgcacattcttgtcttcgtcttctttcgcccgtcagctcgctgcaataattcaactcttcggttaatcaatttaattaattaatcgccgaagaatcatatcgccaggaataagatgcatattgcatgcgtgctagctatatatccatctctcttattagctaaagcacatacgcgattgttcaattcgttcaaatcagcccaactagcacagtagctagcagcttagctagcgccgatggagagatcagcactgcaaagagagagattccaaattctccaacttttgcaaaagccgatccatctaatctatctatagagctgcaaatattttatgtaagcatactgtacacaagagagctgcattatttccatccacataataaacaatgggaaagaaattagggaaagggctacctctccctatgggaagacgacacaccgtgtggatatcgtatttgcctttagctggtgttcatctagaaatatggtgcatgcatggtcccctatgcacgcgcatttcgttaatttatctcatgattattagctgatcatgcaactacaagatctagaattcgtattatttttttttggcggccaactgatttcttaactgatcatgcatgcatctactgtgtagtgatgctgacattacctcttaagtagagcatgtttgtttgagctgtgccttagtgtaagacacaaccaattttgaattaacataattatttagggtttctaattcgttttcatcatgtttgtttgagctgtgccttactataagacaaccattttgaattaacacaattatttagggtttttaaatcgttttcatcattgtatttatgttgggaaaatatgtagtacacaaacctgaaaactagttttcactggatacatagatgatcgtcttaaaatttgtccacatcctctaaacaaaaaagataactcatagattaatataggagtgaaaaaattactcacagttaaatctgaggtaaaatggtgatgtggacgtacacatctcatctatccatttgtatatctaacgatagtttctagatctgcactacatgttttcccttgattttgcaccactaagggcctctttgaatcgcagggttgaaaaaaatgaagaaataggaaaaacacatgattctggtaggaattgaagtgtaaaacagaggattgcaaaatacagaaaaaacacaggaatgatcgtttgattggagcgcagaaaaaacgcatgaatcgaatgaaagagatagactcaaaggaaatttttcaagagattggagctcttgctatattttctccaaaatccacatgcaatgtgccattccataggaatttcataggatttgaaaagcttcaatcctttgaatcaaaggaccaaataggaaaattttctataggatttgaatcctatgaaattcctacataaatcctttgattcaaaggggccttaagagtataactgtgtagaagtcttattatatagggaaaagtccattttacaccctcaaaatcttatgcttgtgtaatatacaccctcaaacttcaaaaccggatataatatacccctcacctgtaaataccggacattttacctccagagctgttttgcagtggtttttgtacatgtggatgacacttcagatgccacatcagtccttcgccaggtcggatgaaatagagtaatatatcctacgttctctcttatacattcgttctttctctctccctgttcattgttctttgaaacaacaaggaagcaggcacgtcatgcatctttgaagcaataaagaaggcatggggcggcggtggcggctggggttctcaccgccggctcaggtggtggctgagaccggctgaaaggaggcctccctgttgtgtctgacgaaagtactaacatgcatggattaacagaacatgcatgaattaacaggcttaattatactgaagaaccaactgaacttttatctttttgcactttgtcagtaattagagattcagaattcagaaatcatctgttgtgtttgcccatcctacactgaattttctactccaatgatgagcagggatttttgttggcaccagcacgatcccttcgccggagaactcatcgtcagtgttcgccaagattgttcagtctaagtagaccaagcatgtgcgcgtgttcagcagcggcacggaccatcagctgctacgatcgttggtgaaccccggagaggaggtcatcctcaccgtcccgaacgaacaactggagcatgtcgtgcggttcctcctggtgactaggatcacgcgcatcatgaccagcgacgacgtcctggttaggtccctcgggaatgcgtatttcctcgtccccacgatggttaacctccaccccacgctcgcggcggcgcgcctggacggccgcgtgaaggtgtcgagcgcgtgcggtgccgccaaagcttgttccgtcggccgactcagccgcaaatagcacctacttgctgtggcttcctccccgcgcggagctgcttccctactcagccatctccgctggcgcgcagacctcctccgccgatgaccacagcagcttgtcggagatgctccttcctcgcgccgctgccatcgcagctcatgagaaagttggtcaaaacatcctgtgcgctgatgtggcatccaaagtgtcatccacgtgtgcaaaaaccatcgcaaaaacaactctagggggtaaagtgtccggtattgacagttgagaggtatattatatccggttttggagtttgggggtgtattttagacaaacataagagttcgagggtgtaaaatgaacttttccctattatatatatactacctctggtctgtttttaatagataattacactgttgatttattaacaagcatttaaccattcatcttatttaaatatataatcattatttattttttaacgtagtttatcactaaaaagtactttaagtatgacttatgtattttcacaaaagttttgaataatacaaattgtcacacacacatatatgtatgtatgtatgtatgtatgtatgtatgtatgtatgtatgtatgtgtatgtgtatgtgtgtttaaaaatcaacggtatcatgagagagtaatttttatttgtatgagtcatgtgtcttccgtttataaaatatagtccataaataccttgcaaattaagtagacccttaatttgtgttccgtctatatatgtttgttaatttcttgctagtttcgtacctttagttcatctcactacaaggatcacgatttttctaagtggcacaaaccgtcaagggaagcatcaaaaccgccatgtaaatttgattttgtgggacaatcttttaggaatacctgtcaaatctacgggaaaactatcttaattggcggtttgcccgacaaaaaaaactatggccatatcaaactttccagtgtgacaagaaatcaacaaatactcgtcgacagacaacaccaactacatcgccaaggtaattaatttccattgcaccctttagcaataattcgtcttttctggattctagtagtgtctctccagtataatcaacaatatatgggagtggggatggttgctctttctggaaaagggaggccgccacaaaaggaaatctagatgcgaagcacgtgccttttccaattattcatccatttcttgatttttgtttagcattatgtcgctgttacaatttgttctgtggcacacacgaaacaaagccagccatcagtagatagcaacactatatataattaccaaaaacttttattaggcatatatgcagatgatttaaatatgctgaaaacacaacactcatatataatattgtgatacattcatgaatttgctttcgatcgaataattcatttgcataacttacagcaagctgttcggacacagctactgtaaaagtaattgttgcaagaatccagattgtttaacaaatgctactcaaatcttgtagttgaaatttgcaggcaataacaagatgattatattgtaaaagtggattcttgggatgcactacacgtatgatagataatttaatcgatcatcatatcgctatcggtgacatgatcaaccacatggttaatctagctgggaaaaaagagtttacaaagttaaccatatatatgttcgatcgaattgaagaaaattccgcagctttgcatccgcaacccactaaaaacatattgtaatgaagtaattaatcagcagccagcagcatatcgaatggcaagaggatgggaataatagttagtccttgtatatattaataatcctttatataggattatgtatagaatgatggtgattaattttgctgaggattcccaccaacggcgtcgttggtgatgcaagccactggcgtaagttagtttgtgtgaatctgacaattaaactcgatctctccacatgtcattacctaagaagaagtcgtcaaattgctgacagtgtggctaaatttgggaggggtgtgaaaaggcatgtggtctagtggttattttttttagataatggaaatgggttacatctccggtctctgcccataggcacatagccaaaaagtccagaagtgaatagaaaagaggttaaaaaaggcgagatgggacaaacccccaacttctgccgataatatgatatactaaaatcatgtttttttaaaaaaatcacgtagagtctatcacgaaattctgtaggtaccacgccatccaaactggagtaaaagttccttggctaccaatttcaagcgtgtagcaccattgctcatagtatcctgttgttcctgtaaaagcatcatacaccaagagtggagccaattggaacacatgaagataacctgcatgatgttaggtattttttatggttaaaaaccatatcattacggcaacgccaaattgaccaacatatagcactagctccaaataaaatcattttttatgggtctaggcactccccttagccagttaccaaaaatatcttatgcattgtggggagggggaatattgaaggcaaagaagacacatcgccaagaaaaacgtgcaacatgacagtcaaagaaaaaatgttggatggtctcttgtgtattacaaaaacagcattgcttgtttcccctccattttctctttatgaggttatctttcgtcaagattacttttttgtgaagaaaccacataaatactttgatttttagtggtacctttaccttccataagatcctcttgtggattattacattggaattgatgatcgcattatacatggatttgaccgaaaaatgaccatttttatatagcgaccaaataaagcaatccttttcatttgacagggttatgttagctagtcgagaaatcaaatcattccactcaactaactttggtcctacaattgatcgtcggaatgaaacattcaacggtgttgtgctcataacctctaccaaagtagaatgtctctttcgaaccacattgtacaaagaaggatattgatatttgagtggttgcaagcccaaccatgtgtcttcccaaaatcttatttccattccattaccaggtttaaaagatccatactgaaaaaattgatcttttactttcattaggccagcccaaaattgggatgttcctggtttgtgtgacatgtgggagaggggtttaccttttaagtacttgttgcgcaaaaggttttgccataggccttcaccattaagaagcttgaatagccatttgctcaacaaacatctattcatgatatcaagatttaggacacccagtccaccttgatcttttagccggtatatataatcccattttgttaacctatatttctttttctggctatcactgctccagaaaaagctcgatcggtagtaatccagtctttgaagtacacctcgaggtatttcaaaaaataataacatgaacatgggaaggctcgaaagaaccgagttaagaagaaccaatctcccaccataggagttatttttgcccttccatgtgctaagttttctttgaaacatatcctccacacatttccaatcagaatttctgagttttcgatagtgtatggggattcctaggtatctgaatggaaaggaaccagaattacaaccaaacagttgtctatattggtcctccatttccttagctcccccaaagcagaaaatttcacttttatgaaagtttattttcagccccgagagatgttcaaacacacaaagaatggccttcatgttttttgcttgttcaaaataccgcatatattcggttggatttagaggccaggtaaaaaaaaacctctctaaaaacaattttgggaggggtatattaaattgatttggttgtcaaaatatgttcctcggtctgtcctgctacaatatattaaccatgctaatgaagaactgaatgacttgtgaaatatgttcctcggtctgtcctataatatattaaccgtgctaatgaactgaatgacttgtgattattattggagggcacaaatgaattaattgaatactagtataaagctgaaaaatggaattgaaaatattagttcatccacaccgttctattcattggaaaagaacaaattgaatcctgaaaatttccgatggggagggagatctagataagaacaatagagaggtcagagaggaatggcgcatgacatggggtgattggatagaatcggcggtggggcagatatgcacatgtgtgttaggttaaatttggtttagaattacaaggcgcattgggagaagctactgcttgcaattgcaccgccgtttacatggcttttgatcagagattcagagcgtgcagctagcagagtactccatgcaggagtagtcatgactcatgactcatgagtagtcaagccttcagcaatggaccatgcatgtcccatatagctggaaagaagaaagattcttgcatataatgtcgacacagatagtgctatatgcgaattcatgatcaacttttgatcagtagttcattttatgtatatatataattatactccctccgtctcataattaatataagggattttaaagggatgtaacattttctagtactatgaatctggataaagagcttatctagatttatagtactaataaatattatatcccttcaaaattccttatattttaggacagatggagtatattgtatacacttttcttttttgctatatattaatcctatgtaatagtcgaaagattatattttagctgtgaattaacagaaagaagtttattttctgtaaagttgtggactgtatgatcgatgcatgcatatatatggtccatccaagctgtagtaggctccaaagcaagcttatctcgttcatgtgtcaagcttgtcccacataggagaagagatgtcgagatggaagagagaagctaggctataggcagctactacggtcgataccagtagctaggttggtgacaagaaaattaattaattaattattaattaattaattcgtcttctctgttgttacatcaatcggccaatggcggcatctccccgtttattccattcaaacggaaactgcccaagtaacccatcctttccatctcctataaataccgtaccatctcctccacagctcaccatccaaatcaacagtaatgttctacagttagtgagatgtagagagagatatggctagctaatccatgagagaggtctagatagagagagggagagatgatcagttcttcagaagaggctactactagctatctagcttcatgtttaactcttcttggtttgtgtttttgtgtgcttgttggagttgttaggaggaagagaggggtgagaggtgaggctgacagaagagagtgagcacacatggtgactttcttgcatgctgaatggactcatgcttgaagctatgtgtgctcacttctctctctgtcagccatttgatctctctttctctctttctccctcatgtgttatactgttctctcatatctatcttctttgaggtagtaatatacttgagcaaattaagctgcttaattatttgtgtatgatgatcagctgctgatccggcctcatttcttgcatatatgaccacaaccacatacatgcttgttcattttttttcacaaagaaagagaacagtttaatttaatttcttggggtttttggatcagttaatttgtcttgagaggggaagagatctctatgggttttggaggtctgacagaagagagtgagcacacacggtgctttcttagcatgcaagagccatgctgggagctgtgcgtgctcactctctatctgtcagccgttcaccatgcccaatatgattaatctccttctctcagttgacagtaatttctttgccagatctcctgttaaattttctgcctagctagctattatgcacatgcttattatgatgagcctgccaatatcatctccacggcaaaacacaaactagctatgatttgattcattatatttcttttcgctgtttaattaattatatgcaggcatacactagctagtttccagctagtacaaagacgagacgaggtcgttctgacgattttcatagtcgtcagaagaaggtgtgcattggtttaatttttgttcttggctgtcagactagatcatctctgaatgatcaagagccggatcaaataattattgtgagcaccgaaatcgatcatgcgtactctctctgtgaagtatttctgagaaataatatgagtgtagctagtatatatactcttgaagggtgtctaattaattggggtctctagctagctccttctctgaatctgtccatgaattgaatctactatgtatgtgctggtgcttactgttatttcatgtactacatataattgataaatcaatttaggctttcagtttctttaatttgtgagcacaagtttacattatattgtaattggaatctgttgcaagtactatatactgtttttttatgcatagcagttgagaaatagaatccaatatacttgtgcaatttattctatgccaccttaattaattacttcttcctagtaatgaagtgctagcttcgatctttcaatattacctgtcaatcttaatttatacttgtttaatttgactgtaatttgccagctagaattaaatgtacattaaattgaattcttcagtgttgttcttgtgaagttaaaataatttctgaacattcacccctctataatcatttgtctatatagaaaaagcatgaagcaattctaatcacaaaaatacatggagttgtctagatcaaacaattaattaatcaatcatcaatcaaaccaaagacgtgtaaggtcatataatacaaatttaacttgacaagttaatgagtagaagatgtatgcaacgatattttccccgtagcttatactactgtcgatatatgcgtgtgaccatagttcacaagccctgtattttatgatttcaaatgttcgttcatacatatacactactacaaaagcccttattgacaccgattgagaaccgaccataaataccgatcgattttccagccggtgtcaatttaacggtactaagggcacccacaatggttatctataggctctctataagatatccatgtcagcatattttcctacttgaaagagattaaatgaagagagagagagcaaagctatctactaacctggagatagtctatagagaaaaacgagacaatgtattagaaagctatagatacccatgtagacatactattgagatggtttactattaatctagtctattgctgagatgtacatgttttatagatagcaccttactttaccattgcgggtgctctaatgcacaaccatataggtaccgattttagaatcaacgcctatagagattatctgctatttgtgactatgtgctatttgctatttttgaaacatggagcaattaatctgttataataatcggatcggatgaacaagttgaaacaaaaagggtccaaattaagccatgcaggtttttgctatatagtcgagctgtgttgatagttgtaaaaaaaaaactgtgttgaaatcgtgaaagtacccaagtttgatctgaaaaaaaatcgaaaaagaagcccaagttggggcaatgcaggcacacgcacggcggatggatggtccggtccacatgtgtgagaagggaagctccacgttcctccggccaattcaggtaattgggccgtggtaattcatttcgcatgacagtaagtctattttgtctccctcttcttgcttctggttgaaccacatccctcaacagcaaaaccgggtacaacgtctcccccatcttcgaaatatggtggaaaggtgttacacccggttttgcagttgagagatgcaattcgatcagcagcaatagttcagagatgtataatggacttattcgtttctcaggaaaatatttcttctacttagcttcatctgggcttcatccttttggggcaatctctgtttgagccagcatctcagctatgcatgggccagcagcagctcagcataaaattggtccctgaaaagtgtaaaagttacaagtggttaaccggttacttgtccagcagaaatggtttggtttggtttgccatcatgtcgaatgtacttctggttcttaaatagtactctctccgtttttttaaattataagtcattttgttttttaattttttatttgataaatttatagaaaatattagcaatattcacaacgttaaattagcttcgtcattacatgtaactttgataacatttttgttttgtgtagaaaatgttgctttgtttgattaagaaaaaagtcaaatcaacttattatgatataaaatagagagagtgttcaccctcttaagtacaacactacgtaccaaagttataatcatggaattgcgtgctttttatggttgcgaatcacctaacatgtatcaaacacttttttcccctcctcgccaaatgatctttttaaaaactttttggtagacttttctggcctcggataaaagcgtgtaccttttacttgaagaaaaataatagctcagcatatttaaaacactatctaccttggccacgccctccatcattgtcatttcgatcccccgtcattcatgtagaattcgggttgaaaaaactacaagctccattttttatatatatgtttatcataatttgcatacgtccctttcatagatcatccttttgtcatcctagccgaaagggcggctgggctgacctccttggcaaggaaaatcaatcggatggaaaagaacattggatttgacctattgaaaatgagatcagaagaagcactcctaatggtgtcaatgtgatgttagtaccccttttctgcctaatctccaccccagattctctcccaggttgagaaaaagaagaaaacctagaaaaaaaaaagtggctttctgtgatggacggttttgtttggcgtgtttggctgtggccctctatatcactgctgctctatctatctatcattctatctctgcactgtgccactgtgctactgtgctcctgctttagccttaggggctaataaaaccttgtcaagttgcaatttgtgtggtgattatgctctgaaaatcttaacagtgcctggggtggcagggtcatgacaaggcacttttgctgtgtatcttggtgtggggttttcatgtccactcgtaatcagaaatatttccacatgtttctgcataaaaagcatgtgcttcattaattcttgagaaatgtcgagctaaaccaggctaataatttgtaacaacgcaatgttatttaacatgtgtccattgatgtatgatgcttatcagtcccaacgtttcatctacaattggttatcacaacattagtgacaaaaaataatttttgataaaaattttatatatgattttttgacgatttaaaagctaatattaaaaaaagctatgaaaaaaataaaaccaactctaaaattaagattttaaatcaaaattttggttgcagctaacaagctgcataggaaatgatgaagcaatatgtatatagtaatagtactatatatgctattgcaattaacactaatatccagttagcaagctattaactagtgtggaacatatgtgaatttatgatataccatgacgtcgaagtggaaataatacgatgacgttagagccattgtaacttatctaataatttacaaaatacatcaaaatgtacaagtacaacctaaatttcaacttgtttatggttgaccgacaacgttggatttgttaatcttgcctaaagccgaccttaactgcttcttgtaaatccagacaaactagtattccttggactgtgacatcttgagtcatccttgaaagctcaatgtatgacaagatgaacgacaaagtgcaaagcataatttccattttattctgtaatcaccttttctgcacgttggtgaaatcttaacttcgaattatcacaatttccatttctccctccatggatgaacataaaattggtggtccacaccacacgagtcatcaaagccatccaacatctaaaatttcgtctgaattctcacaatcctttgtagtgtttttttatacaaatcatagctaaatacacaatcatgcacagtacacaccatgcatctcttaataaaatttggccggggaacatttgttggctcagcaaaaaatcttgtttcattttccttttttttttctaaataccatggcctcctgaaacagatcttatcccaacattttctgatgtggtcttcttttagaacaacaaaaccatgagtaaatcacaatctccaaaaaggtgaaccgagcaatgtcaatataaaagcagccgtgcacaaactaaaaactgaaggaaaagaacaaattaaaagtgggaaaaatctatacgtactaactttttcttactaaatttttactaacattgacatgtcgtattatgagtgcatttagattttttatatcttccatctacttgaatcaaacagttgagatgattgttagtgcaaatttagtaagaaaattttagtacgtgtaacagtgctcttaaaagtgcatctatctgtcgtgtgcctgcatcactagatcactgctggtacacatatataggctgcccaattttttttcctgcatatattagcagaaaaaagaaaggagataaagcaccgtttacttctttcggccaccgatttctccaaaaacgcacgcttctttctgtctgaacttccttcagcatcaagccctttcttttcagaatatcttcagtctcactcttcaggcatctgtatatatcacaacaccacctggtgcttaggtttgttagagagaaaaaaaagtgtatttaattagtgttaattgcaagttatgatgcaatgttatatccttttggttttggaggcagcattaagttgatttgtgtaaatgatttgttttcttccaagaaaacttcatctgaaagtgttcttttcttcagagcagcagagcatgtgtgcagtgttcctgatcagtacttgtgtactattacctgtcaattgctaagagcctttaccaaaaagtttcaattatttggagagacaacacacttattgacaaagggaaataaagcattttttggcactagaaacaaaaagcaaattatatccagtttataataaggcaaagaaatggtgaaaaaagaaggtaataatacatgaatgtatctgcaaaaaacgtgatgactttctagatgtcttcctcttcaggcatcaaaccaccacctggtgcttaagtttgttagagaaaaaagtgtatttaattagcgttaattgcaagttatgatgcaatattccacccatttgatttgtaggcagcattaaggcccgttcttttctgattttgagatgctcattttcatttgcacgcttcgcctctaaacggtgtgtttttaaataaattatatataatttttttcttgaaataccttttaaaaacaacctttctgctctttagtggttaatttattttttataccctcaaacagctatcataaaatcaaattatccatcaatcaataaattttaggcatttttaaactggtttagtttccaactttttttttcaaacttctaacttttcaaacacatcaaaactttcctacacacacaaacttccaattttttcatcacatcgttccaatttcaatcaaacttctaattttgacgtgaactaaacacacccttagttaatttgtgtaaataattgttttctttccagaaaacttcatctggaagtatgcttttcttcagagcatgtgtgcagtgttccccagtgctacttgccaaatagtattgccaagagcctttacaaaaagtttaatttatttggacataacacgcttatttataagggaaataaagcatattttgcactagaaacaaaaagcaaatatacccagtttatactacaaggcaaagaaacggtgcaaaaaaataaaaacaacacaaacaaaaaagtagtactaatacaggaatggataagctggtgacctcattgcaaaaatagaggggcgtatttgcaaaacgtgaagactttctagatgtcttcctcgataaggttccagataagtccaataacttccatctttttatttttttcttttgaaaaagctcacctatgcactttcatcaagctaacatgtcattttaaactaaccaccaaactgttttgtgagctctgggcaaaagaaaaaaaaagacataaacaaaaacaaaatgtcaaccaaacatctacaggtactgtagatgataataattataggttttttactagacaacatatctgtctgaaatgagttaattaatgtaatagcagagcataaatgcaaaaaaacctctacaattctagatttatagagggataaataaaacagaataatccaacaataaatgtgctttttaaagctaaataaatctaatttaacacacttaagcaaagcagctgagaagaaaaaggtaggaaaaaaaaaaaccccggcgtcttctccagttctgctccacttgtccgtagtctctccactacagtccacacacaacgccgaaccctgcagtgcctacctacccgcacgaatctcaaagcaccatccgacgcctcccccagcttctccctccccctccccctcccccatcgagaagaagaggagaaaaagaagaggagagagaaagagaagagactagtagtagaggagagagaaactaaacccaacccaaatagggggaggaggaggaggaggcgcaaccaaacccaaccccgccgcctccgccgccgccgccgaggaggatctccgtcgaaggcccaccggagctcagcttgcggggaactcttctagcggctggagtctgatgcgtcccagcccatggcaccccacctccacctccggttgctgctggtcgtcggcgtggccctcgggagcgcggggctgggctgggggggaggaggaggggagggggaggcgacagatcgggaggcgccggacccgtactcgatcctgacgtggcacgactactcgccgccgtcgccgccgccgccgccgccgccgccggtggcgcccgcggccacctgcgagggggacctgcacgggaaggggaacttcagcacccgctgcgaggtctccgaggaggtggagctcggcggggacgtctacatcaccggggagggcagcctcgtgctcctcgccggcgccgccctcacctgccagaggcccggctgcgtcatctccgccaacctctccggcgaggtccgcctcggccgcggcgtccgcgtcatcgccgggagggtctccctcgccgcggccaacgtcacaatcgccgacacggtcgttgtcaacaccaccgcgctcgccggcgatccgcccgagcggaccagcggggtgcccacggggacgcacggcgacggcggcggccacggtggccgtggcgccagctgctacgtcaaggatgggcagacgcaggaggactcgtggggcggtgacgcctacgcgtggtccgacctcgagcacccgtttagctatggaagcaaagggggctctaccagcgttgagaaggactacggcggaagcggcggcggtatcgtgtggctgtatgccgatgacctgataatgaatggcacagtgctcgccgatggaggggatagcagcgagaagggcggtggtggttctgggggaagcatctatatcaagtctaagactatgtaagtgttcttagaattgcttcaaattccttcctgcttcctacatgtgctaattgaaatgatgcatgggcatttaaactgcctaacaaacttgcagattagaaacagtttccaaagctgaggtcacatatgaatatattggttcagtaggatttatttcgtatttatacctgtttttcattttgttattaatgagtcatggatgcggggaggtagtactaaacatattagggatttacagaggcttgctcggtctaatagatatgagaacaagatttcctgtcatgctgtttatatttttgttaataaacgattagccgccacaatggaattgcagcttcttcaacgaacaaaaagaacatgaagttattaaatgttcagtctggttgtaatttttcttaacacttgagaagttaaggactaatgtgataggaatgtatgagtttagcatatttagtatgtagtcatgagctcaagcttgactatggtactagacaattggatttgaggatttttttttgcactaggtgttaataagagaaattaatgtcacagtccagattagttcagtggttaaattatgcatataattgattgactaataaatgaatataggaatagtttcattttattgttaccaactttcacaattgcacatatttggtagttcaaaccaatccagctaaacactagaccaccaatgcagtaatgagtggcatttgagttgaggaatgctttcattagcttgaactagctgttattttggtttgttataaatctgttgactatgcgctctagtatattcaataagcccatgcagaattgcaaactttccccttctgatcttctgtttgcaacaggcatggtgctggcaagataagtgcttcaggagggaatggtctggctgggggtggtggaggacgcgtttctattaatgttttcagtagacatgatgacacccaagtttttgctcatggtattgtgcttggtcttatgcacactgtgacactgatcctttcttatatccctgaaatgcagattatcaaatagcaactatatatttgcaggcagcatgatcgtactgtattgtttgtcgcaaaatattctgagactcctttttattactgttaggcctcagtatgttattagtcttttgtttaatgagatgaagctcatattctgagtaactttctaatgatatatagaatatggatggagctatagtgtagacaattttattgttttgtttatgtttgaattaacgtttatacctttttcaggggggaagagttcgggctgtccagataatgcaggagctgccggaactctttatgaggctgtacctaagagtcttgttgttagcaacaacaacttgagtacacaaactgacactcttcttttagagttcccaaatcaaccactatggaccaatgtttttgtcaagaatcatgctaaagttgctgttcccttgctatggagtcgtgttcaggtatgaatctgtatctttcagatgttcattaattctctctctacagatcatggtttctttactctttagtatgatatttgccattttgctgtcataaattcattggtttctataatacttacatgcatatgcacttcaaattgtaagactgttaatctatacttactcttgttcctctttttgcatcagtggtagcacgttgaacaagtgtggataaatttgtactgttagtggtggatccacccattcggtaggttgggtcggctggcccagctatggtccatgtcaccccacactccccagaacccccttttagtactgggccgcccatattagccattatccaccagaccataagaagcccataaaattaattaagtactccagtccagtcatgagacaatcaatcgttgttccatctttcaatttcgtgatgatgtacctctttgccagagcacctgactattcatctttattgctcttgtcctcttcgctgtgccggttactatgctagctgccagagtcagtctgtgctaacactgtgccgtgcgcgggcccgtgggcacacgaccgcgcctctgccggtctgcccgatgccctagccagcagccagctatggagaggcgactctagaattatactctattgtgtatctttgatgttcttttgtgccttagtttattgactgtaatatgtttttttaatacaattacaatataaatatggtacagtatatgttgcgttttattatctttatcgagaatttttgcccccatttttattttatagctgcgtctgccactggtacagtatgataatttacactcaatcagtaaggtctatacatgttctttttctgagtttgaggctgtctctgcattttggcaagtcacatatttcttacagtttccattattttgcactgcacttccttcacgtacattatgcaaatgtgggagttgccattacctgataattaggaaaatgcttgtcaatattgctttgcgcaatatttaacgatagtccgcaactttttatttatactttcaggtccaagggcaacttagtcttctatccggtgctattctaacttttggtttgacccgttatccatactcggagtttgaattgatggctgaggagcttcttatgagtgactcaacaatcaaggtgttattttactatttgttcttgccatgtattgtgttgttttatggtattcaccttactatatgtgctaaacgcatgccaatttctatgcaccaatatgaattgttttcaggtgtttggtgccttgagaatgtctgtaaagatgcttcttatgtggaactccaaaatgttaattgatggtggtggagattcaatagttgcaacatcgttacttgatgctagcaatttgatagttctaaaggtaatgttcactgtcaatgactctttttctcttctctgccttaacacttcgcataaaagttctgctcatatatttgtcaggaatcatctgtaatacactctaatgctaatcttggagttcgtggtcaaggtctgttgaatttatctggagaaggagacataattgaagcacaacgacttattttatctctattctacagtataaaagtatgataaccctttgttctactgcattttgctttaattctccacagcttttctgtagttatttatttttatctaccacatggttgttgcaccttcaaaggaaaggcttttgactttaacatggtgggtctggattagcttctttgccttagttcccataaaggaaagaaagtaaagactacatttgctccttgaactctgctcggagtccactttccaccttgtaactaaaaaaatggttactttttactcccataacaaaactggacaactgtcactgacagacaggttttagttttagtggtggttttgccacatcactcttttgtgccatggtgctgacatgtttagggggtgtacgttgttctgactgtctcagtaaagagtggcagtgggggcgtgcacctgcgcatatttagagcagctcttgctggtgctggagtggtgaaatgtaaggtgatgttcttccaatgacagctggacaccattcataagtgtggtccacctcaatggaaaccaccattaaaactagtattgggtgatatttgccggatttggaagttacttttgtattttttgggggtgggtgggttgaaaatggctggattttggcttagattgaatattagactcctgccagagttagggggccaaaaaagtactttattttaaaaaggaaagacatgacagtgagacagacagccagctttctaaagaaacctgtctgtgatgtgatttgcttatgtatattggattattggataaaattttcttcacctgctgtgtgctattgcagaattaattatgacgtgatcacttctgcatactttctttgttttggtgtattattttgtattttccctgtacttgtagttttaggatctgtacttgtactattattaagaagaggttgtgataagcatttcttttgtaggttggacctggctccattttacggggtccacttgtaaatggaagtagcggtgacgtgtaaatactgccaccttcaacattgaattgaaattatcttttcttatgttttatatgccaaaagattcatctcatttattcttgtgtgcatctattagggcaccaaagctgaactgtgatgatgacatctgtcctgtggaaataatacacccaccagaagattgcaatctgaactcatcactgtcatttactcttcaggtgcattcagtttttgaaccttaccttgtgatgtgtcatggatgggttcctttgctagtgtaatgcaaaatttgaccacttctctttcaggtatgtcgtgttgaagatattgacatctggggtctcgtacaaggaactgtaattcatttcaatagagctagaagtgtcagtgtgcacacatctggtaccatcagtgcaacaggcttgggtaatttttgtaccttccttttgtttaccattctgtatcattggcttgttccctgcacttctggatcaatgctgcagaaatttgtagagttgctgggtttctaagcttaagagagtttaagcttctggatatggtgcacatgtactacgatgttgaaactcagagggctttgtcatctcaagttgcagtatactgtttacataccttgcagcttcttcagtggctaattcataaataatgatgagaggagctatatatttgttttattttctattttccttcataattcaaaaaaaatgctttagtatacttaactacatctggttgtaactatttcaccacaggatgatcttttgtttgatggtatgctgttggcaactgatcccagaattaattttcgtatcttctaatttcaggctgccgaagtggagtaggacaaggaaagatattaaacagtggtgtaagtggtggtggtggtcatggtggtagagggggggatggcttttataatgaaagccatgctgagggtggatctatgtacggtagtgctgatttaccatgtgaacttggcagtggcagtggtaatgacaccacaaagctttccaccgctggtggtggtataataggtaacacaattgttcaattagcttacctacgtttattattaagttcatagattttaggactcatgctattgctgtaactgcactccagtgatgggctcatgggagtattctctaccaagtctttccctctatggttcagtagaatcaaatggtcaaagttccactgatgtggtaacaaatgcttctattggaggacccggtggtggttctgggggcacaattcttctttttgtacgtgctttgtccctagcggagagctccatcctttcaagtgttggtggtcttggaaactttggcagtggtggaggtggagggggaaggattcacttccactggtcaaacattccaactggagatgagtatgttcctgttgcagctgttaaaggatcaatacgtacaaggtcggtctgattctttctcctatacatgttctagtattctagttctccaggggaatgttcaacactgtgatacaagtcgaatatggtttgtctcatacaatttgcttagttttagtatggacccttgtgatggctacgtattgtgacttgttcactacattgaagctttttctttataacattatcactcagttatcagggtatgaaacaccttaagcaataattactggtctgagggcaatgtaagatatgaaaaagcatcattacaggaaaatgtttgctttgataatttttttgacttttgaccctaatccgtaatgaccaaattgaaaatgttaagacggtatttatatgtagaaatactttgatcttatggaattctggcgtagaaacaagtcactgaattctgattgattatactattataaacgtgctgtgattgaaatttgaatctgtagctttcagcaaattccatgatgcagtgtaatttgaattctgtcctttcattgccagttgtttgtgcaaacaatagacatgtggcatgcctggaatttttatgtgttcctctcgtgcactgaccaaatatccttatacagtggaggaatcagcaaagggaaaggatttcctggcgagaacggaacagttacaggaaaagcttgcccaaagggtctctatggtacattttgcaaggtaacttgctaatatttcatagttccatctgccccttgtcttattatttagttgtaacttgcattgtaaaagttgattcaaatacaccaaacaacctactcaattgttctgtcattataatatttgatatattaccccatctagtggcattctgttgcttacatctgctgtaatgctgttgctacctaatgtggttgtaattatttctgtggaaaatgcaggaatgccccttgggaacgtataagaacgttactggatcttctaaatctctgtgcgttcaatgccctccagatgaactccctcatcgtgcgatttacacaagtgtccgaggtaattctttctctatgcagtttttgatgtgatatagcggaaatgcagccaaggacaaaattttaacttgtttatctaatttctaaatcaattaggtatcataaatctactgtttttagatttatcttttgtttttctcctttgtaacatgcagcttcatctatattactttgctattggccttgcatttacttaagtttcaatactgttgtgcaagcttcagaagatgctttaactttgcttgaacattctaatctctaacctagcttatgtttgacaggaggtgcttatgaaaccccatgcccatacaaatgtgtatcagatagatatcgtatgcctcactgttatactgctctggaagagttgatatacacttttgggggaccttggttatttggcctattactttcaggtcttcttgttttgttagctcttgttttaagtgttgccaggatgaaatttgttggtactgatgagttacctgggcccgcaccaactcaacaaggatcccaaattgatcattcttttcctttcctagaatctctaaatgaggtattttatacaccgcttccgtcatgttgtgtgccatatgaccatcatgggttctcatagaagttttttttgtttgttgcaggtcttggaaactaatagggctgaggaatcgcatgggcatgtacacaggatgtatttcatgggccccaacaccttcagtgaaccttggcatctcccacacaccccaccagaacagatttctgagattgtgtatgtgtacatgccctcacatagatctaactactacctgaacaaattcaatgtatcttctattttggtaattgcatatgttttatccgtgttacttttgcatgcaggtatgaggatgcatttaaccgatttgtcgatgagataaacactcttgcagcttaccagtggtgggaaggatcgattcacagtatcctctgtgtacttgcataccccttggcctggtcatggcaacagttccgtaggagaaagaaattgcaaagacttcgtgaatttgttcgctctgagtatgaccattcgtgcttacgttcttgccgttcacgtgcgctttatgaagggctcaaggtttgtagttctgttttaactatttctagattgctaccacatgcttatctctgaggtcatccttccctagcctaagaactgaaatcctttgatgtttcactctatgattttttttttttacacttcaatagcagagtacctactgcatgcttctataactgaatgctatcagaggattggagtgcaaagttaccagtcatagaagttgtatatcttaaatatgccatattgcatgaataagagttgtgttgaatgtataattagaaaataatatctataattagaaaatatcatgcatggttggttgaaccatttgtgagtgactctgctataaatctttcatgctcttttccattttggttctttggacaattatgaactcattacatgtttttaccttcccagaattgattatatcttggaataaaattattaaatgaatgtcatgtttgatagtgttgtgatgcttggaattaacatctgcctacttcataaatctttaggtgactgcaactcctgatcttatgctgggctatttagatttcttccttgggggagatgaaaaaaggcctgatcttccacctcgtcttcgccaaaggtttccaatgtgcttgatctttggaggtgatggaagttacatggctccattttcactccatagtgatagtgtactcactagccttatgagtcaggtatgattttaagatctttctaactgcattagttatgttctgaagctttttcttatacttctataacactattttaaacattacaggctgttccctcatcgatatggcaccgtcttgtagctggattgaatgcccagttgcgtttggttcgacgtggaagtctcagaggaacatttcttcctgtcctcgactggcttgaaacccatgctaatccctctctgggtgtgaatggtgttcgtgttgatcttgcctggttccaagctacagcattagggtattgccaacttggtcttgtcgtttatgctgttgaagaaccaatgagtgcagagcttgatggtagccctagaattaaaatagagcaacattcactgtgagttactatttttattcgtcctgatcatttgttttctttccctttttcattactatttattcctaatgacttgttgcatcatacagaacacagaacatgcatgctgatactcaactaggccattctagaattaaggaagctcttatgcgcaaaaggatcacaggcggaattcttgatagtaatagcttaaggacgcttaaagacaggagagatttgttttacccgttttctctcatcttgcacaacactaaaccagttggccatcaggtttttctctgccattattacataagactcttatgataaaattcctggcatttgcacttaccataattctcttgttcttaaatgcaggatcttgttggcttagtaatctcaatattgcttctcgcagattttagcttagtgttactgacttttctccagctatattcatactctatggccgatgttctcttagttttatttgttcttccacttgggatactatcaccttttcctgctggaataaatgctctttttagtcatggaccacggcgatcagcaggccttgctcgtgtgtatgcattatggaacattacttcactggtcaatgttgtaagtatgctatgtccatctgcatttcattgttgcatgcttatttgtctatattgtattttgagatcctaagacggctgtagttagtgtctgccattattcactggttttagctttccccgattttgttcttattgttgatttatcttcataatcctcttcccatgatattcaggttgtggcttttgcttgcggccttgtacactacaagtcatcaaccaaaagacatcctagtacgcagccatggaaccttggaacgtaagtgccatttccctttgcagttatatacaatacaactaaatgcaattaggatatggatgcatttttttcccctttgccttgtcttgatcctcctttcatctcatcggcgcattttcaattctatcacagggatgaaagtggctggtggctcttccctactggactcatgttgctgaaatgcatccaagctaggcttgtcgattggcatgtggctaatttagagattcaagaccgcgcagtatatagcaatgacccaagcatattttggcagtcatgacacttggcattactactactaaaggttcttttgggagctttttacaactcaattttttgggagttgataaaaggaagggtgggggtactcaaagcacggcctttctttattgacctttggccgaagaagaagcaactactacagtgggttatagatgcaatttccgcgtccctctgctaatcatatgtgcagtcacaaccaacctgtattttggtgttgtatatataaaaaaggtgtacttgatccattatttgtaggatttagacaccatagagtttataaacagttcccaagctaactgaagagatgtgattttgttgttgttgctactgctcttgttgtcggtgctatgtactttgcctctagatgttgagctgggcaaggcaggcattgactgtgaaacttgtactacctgattggataacacaagtgctaacttggctgatggttttcatccctcatcattaacccaatgcaatgctgataccaccgagttgtgacaatgtgttcgctcttggatgtgcaatgcgcgtggatgtgctatgtgtggttagtgtgttaatcttgttataaacgtgtgttctgacttgtgagtgtggtatatcaatctcttataagatgttattgttggaaatttggtcacaattcagcatattttaatccaaaatattaagataataaacatgacgcttataggatatgatctagtgcaattgataaattggagcatcatgaacatgtttaatactccctccgtttcaaaatgtttgacaccgttgattttttagtacgtgtttgaccattcgtcttattcaaaaaattaagtaattatttattcttttcatatcatttgatttattgttaaatatacttttatgtacacatatagttttacatatttcacaaatttttctaataagacgaacggttaaacatgtgctaaaaagtcaacggcgtcaaacattttaaaacggagggagtataaaataagcatcaccatacacaagacaatgcaataacattgcgactgatagtagcagaaaatggagaaccaacagtaacggtaaaaggttatacccaagaatggccaaaatggagaatcaacggtaacagtaaaataaaatgttatactccgagaatggctctccgctggagtttgagaaagtattgcatccccgagaatggccaaaatggataaccaatggtaatagtaaaaggttatactccgagaatggccctccgttggagtttgccaaagtattgcatctgttgatgttgttagagtttgagaaagtattgtaccagttggtgttgtcgttcccattcacctccttgtctccggtgttctccgtggacatgttggtgaaggcgcagatgaacaggagcagtcgcatgttggtgaaggtgcagatgaataggagcagtcgcgcgtagtgctcccaaaaacttgagcgcccgcctacccgtgcaagaacgtaagcggacgcagttccggaggtatgcgaaggtagcacaggaacagaagaacatccggaaagaaagtgcgagagttggaggaagaacagaagtgcaagctccctctgttcgtcccgttagcgaaagatttgtagcgcatgcgagagttcattcagagaattcaatcaacgcgattaacttgagccgttagcgaaggatttgtagcgcatgcgagagttacattcagagaattcaatccacgcgattaacccgagttaaagcgattaatcaccaatccgttacgtgagttaatacgcgcgattaatcaccgatccacgacttaatacaccggatttaatcaccgtccgttacaaaacgagagagagagagcagccgccttgcccagcccgctcggcgcgcgtgcgtgtggctgactgcccaccatctcaaccggtcacacagagactctctgctagcttcatttttaagttgaggcctctacgcttagttttccaatgtggtattaatacccatagcactaaatgtaggcaatggaatttattaggatttaattgggcctagcctattaatctaacagttatggcatatcaatctctcgtctagattcacttatgtacatatgaattttaacacatcaaatacacataaatccgcatgaacctatccaagacccaaaacttcttataagtaaaacagaggaagtaaaaattaaggcatgctaaaaacggatgaagcctcgattgatagcgatcagtatacatatattctacaatttccttcatttcaaattataagacatttcagattttgaatagattcatgcgcggatcaatatatgtgctccatatatatgtaaattcatatgtatgttaatgaatgtagacaaggattaagaggctaaaacgttttataatatgaaattgaggctgcatttttatttgttctagtcccatattttggttttgtggtttaagtaaaaaaaattatacttaatcatcaaattttaattttaaaaatttatatagtgtaacattgtaagatttaggtttttggattaaaaaaaaacttctatactagcagtaattgctagcataggatttttttgacacaagtagtaatactgccatttttaagtgtaactgtgccttttttttttccaaagtttgaccgtctatcttatttaaaattttttatgtttagtattttttactattattagatgataaaatatgaataaaactttatacgtgacttattattttttatttttataatttttagataagaggaacaatcaaacattatatatagaaacccacacacttaaaataggacggagaaagccgtactaattcactacatcggcggtttgtttagcaatttgaggaaaggggattgagagtttacacgagggaggaattccctcccaattccacccttacctcaatttcccatcccaattccacccttacctcaatttcccatccccatccctgttccaccaaaattctgatgtctccaaaccaaataaaacaattaatatctcacccctcacccaatccctcctaaggctgtgttcgctagagcctattcccaaccagaacagtgcacacagaaaacggaacggtctattaacgcgtgattaattaagtattagctattttttttttcaaaaatagattaatataattttttaagcaactttcatatggaaacattttgaaaaaacgcactatttaactgtttgaaaagcgtgcgcgcagaaaacgaggaagatgagtattccctctggtttcattttaattgacgttttggacaatgacacggtctacaagatacatttttgaccttatttttctattataatatatataataaataaatgcatgtttacttttattatagtattttaaaagacaaatctatatatgttgttctagttcctttaaactaaatatttttaaaagttattgatagtctaagttataaaagtttgacctcaaccttattcaaaacgttaattaatatgaaaccggagggagtaggtaactaggctggctgtgtccctagcacgcaaaacaagcagtgtttagcgcatgcttaatcaagtactctagctaaaacaaattttaaaaataaattaatgtgattttttagagtaatattcctataaaaaaacttttgtaaaaaatacatcatttattagtttaaaaaatatacgcgtgaaaaacgagaaaggtgagttgagaaagtgaagataataagaactcagtctaaaactccctcaaaactaactggccgcggctgtaaagaaaaaagaaaggaaaaattactacacctagtccgaccccgaccgcgtctcgtcggttccccgccacaagcccacaaatattatgcgagagagagagcacccgttaccgcctccctcacctcacgctgacgatcgccaccgcctcccccgcaaaaccgtcgcgccgactcactctcgccgccgccgccgccgccgccgcgagatccgatcgccatgacgatctcctagtccctcgcctcccgcctcggccccggcggccccacgaggtggagcccctacgcccgggcccccgatcccggccacggggcggggaggagctccgttcctcccggtggtggtggtaactcccgccctcccctccgcgtcgcccccgccacggcgaggctcctcggccaccccgcgcggaagggggccgcggcgccgcccggatcgaggtgccgcgcggaggcggaggcggaggccacagccgcctccgatgctgcctgccctaacccgccgcggcgtgggtgcgaagagacgaacccgaacccgaaccctaagagaaaccctaagccggcggagagaggggaggagccgcccgtccgcgccgtcggctgcggcggattcgccttcctctgcgccctcgctggccacaccgaggtgattattgtctccccccactcaactattttctgcgatgaatttgcgtcgattctataacctaatcatatgatgagtgaggattttgctatattctatataacctaatcatctgacgagtgaggaatttggtcgattctataacctaatcatctgatgagtgaggaatttgctcgattctataacctaatcatctgatgagtgaggaatttgctcgattctataacctaatcatctgattgagaggaatttgcgtcgattctataacctaatcttctgatgagtaattgtccaacgctgcaggctatcagtgggatctctctgcctgtgggttccgacaagctttactccggcagcgctgacggctccgtccgcgtctgggactgcaactctggcaaggtagctgggctctccgctctcggcactcccttcaggctctttacgcacgattcaagttgagtaaattcaagttgggggttgcatctgcgtcgattcctccgttgattgtggcggtctttgaagtgcttccatgagatcaattggggagtactatctgattgcttcctgtggtcagacatattggtaccaaatcagttttttctttgcaagattggggttatcggcatgccggaccgaattgttacgggaatcttttcgcctgcttgtgtactgttgatcagtatatcagggtcagtttgcgagcaaggcaatgaggctggtttggctgataagcaaggggctctctggaattacattacagttctctctggctgatggtccatacatggttttgtcaaaaaaaaagtagtgaaaaaaagaaagagaaagtaaaaaaaaaagaaaaaaaaagatgtgagatgattgatgattatattttcttggaaagagaagactgaacaaggaggaaaagataggtgtctggctgataaaaaaattctaatatttattacattgcattgttttcttaatgtttctgtcatagtgcgttgatgccatcaagatgggaggcaagattggttgcatgattacccatggcccatggatatttgttggaatcacgaagtccgtggaggtaatattttaatttcgttgatttttttttgtgggagtagtccattttgtgttacatattgcgatgttactattgtgcattgaactgttgatattgatccctacaatgaattgtaggcatggaacacacaaacagggatgaagtccagtctccgtgaaccttctggtctggtttgttccatgactatcaaggatgagatgttgtttgctggtaccggagatggtcgcatcatggcttggaaaattcctgacaagaagggtgactctggaccagtggcaatcctcagtggccatgagcgccaagtgatttcgctcggtgtctcagtaacaaggctttactctggctcacttgacaagaccatcaaagtatggtaatgctgcaaaacttgtgcaaacttgtgcttctgtgttggctactaaggagtattatgttagtactagtatttgaccataaaactctattcatcaggtatgggaccttaaaactctgcagtgtgtccaaacactctctgagcacaaagctgctgtaacatctgtgctttgttgggatgaaaaactattatcttgctctctggacaagactgtaaagatctgggctgcttcaaagtctggagaccttcaagtgatatatacccattctgaggagcatgtaagttctactctggcctgcatcctctgtagcaatggttgcacaagttttatagcattgaaatttcaggcacaaatttatttagctacttaaccagttaaaatagtcaataagatgacatttttgtgtatctaaactgcatattaggttgacatgttttttgaccggagggagtactattgtgcgtattttcttgtgttgaacattactattctccaacactcaaatagtttctggctgctaaatcacttagggcatttttatttcagatgatgtagtaactaaattaaacttagtttaagagttaagtcacattactttctgtttttaaactgcatttcaatgctaatgcagttatactatgttgaatgggagcactacgtagcttttgcacaattaaaaaaaagacactatgttgaaaccttctttttttggggtggtcgtgcctagcaccaaatatggtatataaactgcactgtttactatctactttacttttctatcttttatttatataaagtttttcttggcgtgttctatgcattgagcagctccttcctgttgtcgaatggcagcaaaatcccttcataagcacaattagttctcttaattgacttggaagatctttgctcaagagtagttttgttgccgcaattggtcttgtgttatttatgtctattaatgagtccatcttcattcagtcaagcaagggtaccttcaatatgtaggatttcagtgttctagacttattctgtactgtatgtaggggtggaaacgagccgagccggctcggcttgcagtggctcgcaaaaaactaggcttggcttggctcggcttggttagggaaacaagctaaaacttaagctcggctcggctcgtttcctggctcgagccagctcgagctggcttgcaagccttcctgttgaaacacctcttcatatatattttgtaattattaaaaaaagtaaaaacaaatcatcaacatgtaaaatttaaataagtttttatattcaattcttcaaaatcttgatgataaatttcaagttgacaaataataacactatataaagtaaaataatcaatataaacacacgatggcctaggctcgcgagctaaaacaagcggctcgcgagctagctcggctcagctcatttcagcaacgagctaaaaaggaggcttgggcttggcttgtttggcttacgagctgagccaagccaaccaagctcgagccaagcccgagctgagctcacgagcccgagctttttttccacccctaactgtatgggtggttcagtgttcttggttagctggtagtgaagagtgaacttataatgatcagcatatttcattgtggcatcaagaccaaggagagaccctctacccgttttctatttaatccttgtaattaatctccatattaatcggcttggagaaacgaaacgacgttactgccgctgcatgattgcacaggcaaggaatgttccatgctgcatgcagctcgaaaatcgcatggcctactcgatctccgtgataactagttaatccatccaacatgcacatgctaccagcgttaatatgctgatcaaatcggaatatctccactttcgttatgcgctgatcattatggaatggagggagtaataatttggttggctggtagtgaagagtgaacttaaagtaataaggactaaacatccgcttgggaaactttagaaggctgctcagttcatctggttcccttgaaagagtatcaataagggagtatgatgtaattgaggaagctattgatggaagtgtctcaggctctcagcaacaattgaatgatttgtacaatctgcatcaaagcatgaacaaatggggtcgtgaattgtcaattcttagttctggatattcttcttgcttttctgcccagtattgctaccaaccctctatatccaagtattctttaatccttttcaagatactgctctagaatctgttgatcgctttgggtgtttttgttgtggtgcttgttgtggagaaacattctgtatttattgtggtgcatggttatggaaaccatgtaagttcaatgctagtgtccagtttgcaagttcagttttctttggatgagaatgctctgcttctgaaccttactcctttcaacagtcttcagttgttcccctgttgctaaacatgcacttctgttgcagggagtacgcacgctctttggcatgcaccgtgttggaaagacgccagttctgttctgctccctccacaacagcaactgcatacgtctgttcgacctgccatcgtaagtgcataaaaaatctgtaggccatcgaagaacgtactgctcccttactggaagtctcaaaaatggtttggtcttggtctttcaggttcgacgagatgggcaagcttttctccaagaaggaagtgaggaccatcgagctcgcagccggcggcctcctcttcaccggcgacggcgccggcgagctgaaggtgtggaggtgggcgcccgaggaggagcctgcaaccccggcgctcgtgaaatcatcaatgtagaagcactgtagcgtcgttgagtaaagatagcagctcctgcgaattgtcgtgagctccatctcagaatccatgtagtaataacttatgacaatgctgatgtaaatatatttgcccaatcctgaggcctgattagcaatattatgttccattctcccatgcactgtctccattaattgatgcttgagttgcgtgccataccaagcctctacttcgaatgtccacaaatactctgaatgtacgacgacgaccattcattttactttagaaaaatatatataaatatgatttttttaaggtataaatattatttattttattgtgcctggtggttttatcataaaaaactataatattaacttacaccttcacatatttatagttttatactaaatttttaaataagataaattattaaacgttatatgataaatcacggtatcatatattcattacaggggagtatatataaatatgattattttaaggtataaatattatttattttattgtgactggttttatcataaaaaaatatagtattaacttacaccttcacatatttacaatatttacagttttatactaaatttttaaataagataaattattaaacgttgtatgataaatcatggtatcatatattcattacggaggtaatccatccgtttcaggttataagacgttttgactttggttaaagtcaaactactctgagcttgactaattatgtagaaaaaaatagtaatatttacaacactagcatagttttattataaatatataattgaataaatttttataatatactataaaaaatgtctgtgcgttgcaacgggtgaagtctattttaatcctattattgttatatggtttagttaagatgaaattcactgtgggagttcgcttggatatatatattttaagaaaatcagttaggagtccgatcgtctcaagttagcatgcacgttttttttaaacatatttcttatatgattccttctgaattatcaaaagtgaacgatagaactgactcaaatatggatatgtattttcaaaagcaaacgaacttaaaaaccgactcatacacggatgacgtaaaaaaatactggcaaaaacatcttcaatttttataattgtagagatttgtcttaggttaaaaatattactacttttttctataaaattaatcaaacctagagtagtttgactttgaccaaagtcaaaaacgtcatataacctgaaatggagggactagtatgtcattttcaacatttgaagtttgtacacaaatataagcatttcttatccaacttcatcttatgattttttgtatttactagcttattgcacttacgttgcaaccgggttttaatttaagaaaattattatcatatcttaattgttgtaaacatttgttacttacatgtgaaccttgttagctccacagttttttcctcccacaaaagtagttggtgggagtagttgacatgtgggtaaggcctggtttagttcccaaaacaaaaacttttcacccatcacatcgaatgtttgaacacatgcatagagtattaaatgtggacgaaaaaaaacaaattacacagttcgtcaggaaattgcgagactaatcttttaaacgtaatcgcgccatgatttgacaatgtggtgttatagtaaacatttactaatgacggattaattagtcttaataaattcgtctcgcagtttcttagcggaatctataatttgttttgttattagactacgtttaatactttaaatgtatatccgtatatttgatgtgacaaccaaacctaaaaattttccccaactaaacaaagcctaaacctcacatgtcgttttttttttaaaaaaaagaagatgggagttggcactaacactactctcttttataaggagtatggattgctacattgccgatgtatcaaaatagttttacctcagtcttaatctcttctaaaattgctataaatgattacatttgaactactagaaatgattgtgtttgtagatgaagggattgctctaccgatgcatacaaatctctgactgctagaaatgattatattaatttgctaaaaatgattgtatttgtagatgaagggagtacgctaccattataccaatacatacaaatctccactaaaactgctagaaatgattatatatttgtagatgaaggaatactctacctatgcacgcaagaaatggcatgctttggcaatgtggaccgtacactttgcaggtgcagtagcagcaacaccaaccgtgtggagctctcaaaatggctagacaaactaaagagcctctaattaatacaaccaatgttgtgtaacatcgctagctgctgcgttgctgccgaactcccattgaccccagccacatattaatctgacgctatgaaacaaacacgcccacagatcacacccacaaagcgatgtctttatctgttaatgacgcaaaggatcgattaattgtcgccgacatgatccatctcgtcgctgttcttgtaaacaaatgcaattaagtagcaagagtttgcatgttttcttgctcttgcttgtacggtcaaaatgttagtggtagtttattgcttgaaaaagaaagaatatttggatgttaactcgtacaatcaaacgataggctctagcctgggattgcgtataatcatggtaactaagtaataatctatgaccactggtatcttttatcgaggtcaactatatacggggctagcttatcacgtctggagaaaagaaaaacccaatgttgcttagctttgctggagtaaatctctctatatttgtgctcgaaaagtcaacgagcaaatggatgcatgtggtaaatgctgagcaaataagcaaaaagtcttgggtcaactattattttcttaattgcacagcacacaccactatacacgtaacaccacactcacaccccgcgaatgcatcccctaacacatactttaagagacggaaaccattaatacatcgttaatttcaaagtcagcgttgaaagctacttgcatgtgcgtaatatttgcggacattaagatttaaaccctggtgtatggagtcatatatccacgactccagcgccgccacaccacttatgcttccccttggggtcaactattatggttagcagccgacttgcaaatgatcattgccgatttagttacgtaacagccatgtagtttaatgagattcccagtaacatctacaagaatctcgtccatgctcatcatagatagagatgcatttttcaacccgtgtgaaacaaaggtctttgtttggaaggtgaaagtttcaaacataaaaatgtagaattgttttttctaacatgcacagtcctgcttataagaaacatatgcgctgctctcattaaatatgtgatcctcactaaatacgtggccacttattggatttgacaataagccccgtgcaaaggtttgaacacaaagataggatgcaacatgcatgtcatgagtttgaaaacaacggtcatgcaaatttttatcgactatgattaaagtttaacaataggatatgtggcgaaacaatgtgtctctatctattggtgtctggttttattttctcatatctattttttaatatataacaccgttgatttttaattgaccattcatcttatttattttttttgcaaatataaaaatatttgataataaattaagtcacaataaaataaataataattacattttttgaataagacgaatagtcaaatataatgtatttaaaaaatcaacgacgtcacacattaaaaaacagagtgaatactttaaaactacatactttgtaataatttattagctctttaaagtaaaggatggatttctcattatattttaaaaagtattctaccgcaataatgcacccacaaatttaccactatcaagtgtgttgtttctaaaatgtaatatttttttaatcaccaatcaatttagtctttgtactatgaattagggaaaaggagacccgaagtgcgggaaaaagtacattaacatgttacagcgatacgtctactataagtggcagttgtacatttttacaaacaaaggaacatgcgttaagttgtattactagtttcatcatcttcttttttattgcttgtaacccccatctcatccttccatcatacaagatgcgaggaggagctacacacttttgttttcaagtcacagtaactacttatcaacagtaagttctcgacaacattatgtttatttcattttttgactaaagttaaccgctgtaactaattaattaattaattaattaattaggcaacaattaattaattaattaatcaatcagttgaagatgtcctggccaggggagagcagcttcttggggtcgtacttgtccttcctctgcacgaagcgatcccatttggcgccaaaatgcctcacccagtcgccgcggctgtcgtagtgcgccaggtacgccttgtacccgatcccggcgaggtcgcagaacctcagtatcctcctgttctgcgcctccagcgccgccacgtcgttcgccaccgccgagaacagcagcgacaccacgtagaacacctcctcctccccctccggcgtcaccgccgacatcgccgcatcccacctacacccacccacatattgtacagtgcatcgtgacgatgatgatcttcgagaaaagtgacaatgtcggcgataatgtcaatgtgttgtgtttacttggatttgttgacggggtagatgatgagaggtccggcgatgtcggtggccgtctggaggatgcccttgaagacgccgcggtcgaagtcggcgatgcgggagcccgggacgaacaggttgagccacgggtgcgggacgcgccatagcccggccttctcgagggcctcctcctcgccgtacacccggtcgaggaactcctcgtaggtgacgtcgcgggagaaggagaacccctcctcgaagtggagatcgccgagcgccgccgccaccgccgcgtccacggacgacggcgtcgcgttcgcggcgtagttgagcgtcgcctcgatgctgtacacggcggtggcgttcctcgccgcggcgagcgcgacgacgcgcgcggcgtcggcgtcggagaagaacccgccggagctcttgagcgccacggcgaggccgcggccggcaaggtacaccgcgccctccacgtagctccatggcccgtgcgacccgtcgggccgcgccgcgacgaggcgctcctggtcggcggagaaggcggcgaagtcggcgtacacgaggcgcacccaccgcgcccgcgccggcgccggctcgacggcgacgcgcgcgcgcgtgatcacgccgaactggcccagcccgcccaggacggcgtcgaacaggtccgagttgaccgccttggagcacgtcaccgtctcgccatgccctgcatgcgccccgagtcaacgtcgtccatgtaaactttcaattaatcgcggaaattatttcaaagtcaaccccccttgttgcgagccgccaaatgtacttatcaaagacgtcgccggccaaccagccagccatggccggcgcagctagcattgagtgctggacactaacttgtacccactaattataagtaacctttaattatcatttaagaacaccgtattaaaaacacgaatattagggaatgacctaatatcaaattattagaaggggcaaggcttcaaaccaaaatcgtctagcccaccatcttgtggagctagccggaaggccctgggaggaaaaaatatgtatgtgggtaacaagattaaaattagttagttaacaatatgtaaaaaaaattctaattatgcatgtggacacattatttttgaacagattttttaaaaataatgaaaataatttacatctcctacctctattaatagatgtgtaggtaataaattagataaacataaaactcgaggttatgagacaaatgcatgtatcccttttgatcacagcatcctacttaaataccgaatagaaaacacgtagaataattctataggaatatcacatttcactctgatgtagtatagtatatttaaattttataaatgttgattgcacggttagttcttgatcacgaggtttgtatgtgtgaggattaattagctagcaaaaggagttgcagtgaggtgtacgtaattagctagctagaggcaggcggttgcttgctgtgattaccggtgatgacgtcgagctcgagcacgttggagatctgtggcccgtgccggtaagtctgcccgctgacgccggcgttggagagggtgccgccgacggtgaggtggaggtagtccgtccacgaccgcggcgccacgccgcgcgccagcgcggcgcggagcacgtcgacccacagctgctcgccgccggcgtccacgtacgcgccgtccgccgacacgttgatccgcggcgcgccgccgccgcccatggactgcatgtggacgacgacgccgccggcggcgagggcctggcccatggtggagtggccgcggccgcggaacgagacggtgaacggccgccccggggcggcgtaggcggcgcgcaggagctccgccacgtcgccgggggagcccgggaacagcacggccgccggcagcgccgccgtgatgttgccgaagtccatcgacgccggcacggtggcgttcgggtcggtccggagcttgccggacgcggcgaggtcgccggggaacgggagaggcgccgccgccgccaacggaacgccgccgccggcgccatgcgcggcgagtgcatgggaggaggcgatcagcgcggcgatcagcaggtaaatcgccgccattagcggcgcgtttaagctcgctaataccactttaattaatccgcgagatcgatcgatgagagtgtttggtaattagggattaataagggtgttgtgctcttgcacttgaacttgcacacctatatatatagatagatgatctatctaattatgcgtgtacatttatatccaggagattgttgccaaaattaaagcattaaatcacaatgggattctttgacgtataggtgatcttcagtttctatttctactgttgaccagagaaaaaaaaagtaatatgtatacgtgttgattgccgtagaatactggtatatataccacgtatttttacgttacatgtacatatttttaggtgtacacaattaatatttagctagatgtggatttggcagtatatgtacgtgtagttaatgtagtaaatatgtgcaataatgcactgaatatgatcgatgatcacattaatttaattttgtggtcttgtattaataggtatatatgactgaacattaattaattatttgtagaccagatacatcaaagtccttgtattaattgaaggtgccatatatactgcacaaataatttttctttgaaaaagcaaggagatagaataatatggtactaaaatttaattgcactgactttttttaagctttcatgtcactttaagtcatcttaacattcataagcaacgctacagaaaaggacacaaaattaacaacaattccatacctgattgtgacatatcctagtcaacaagtgatcatttattagatttaattacctgaggcaagaaaatgtgctcaaaatattccagaattgcagtcagttgggccgcctgttggatgacattttttttcagagactaatgatctggggtgttaacaagcaaatctgagtaaacattaattatatatagccattgctattaacgtttagttcatatacttgcctctggttttgcaaatgtactaagatgtatgactgcgtgtgcatgacacactcttttttgtccatttcagtaaaattaagaaaagaacatgttgatgactaggtgtggaattaaattgctagctgtttgactcttctgctgttttctcctagtaaatacttaacctacggtagatgtaaagaaaacacatattactttagcagagacgacatggatgtcaatttaattgatcaacactacataacaacatgtaatcgtaaaaagaacatcggttcttcggaagaatttcctacttggaattttggtgagcactcgatgacttaactattaagtgttactgatctgaaaaggacaaaataatatataggtcccagatcccttctgtaattctatatatatctagcatttttatgactttacatcactatcttttatagaatttattatattatcctcacaaaatttcgcaatatcataaacataaacaaaatcgtcaaatctagagtggtgtagttttaatatgtccaacttgggtaatttttacaaatataactagcacaaattaagtttatataactgttggtttgtactgatcaagcgttaaagataaaaggaaaaatatgtttagtgtgaaaatatatcttctagatgatgtgtgaagtgacatgaccaggttacacgatacacacgcgtgcgtgacgttttcataatattggaaacttctgaaccatgcatgtgaaaatttggtttaatttgcactaatttgacactttttaaagacattgctcccttgggtcgacagatgtatatgcaagtccccatcgatcagctaattagaacacatgcatgccaaagtacacgacaagggtttaattagatcaacatccacacgctgcaagttgcaacacgtcgtatctaatcaagttatttttagttatgccttacgttgcagtctgatcgatcgtgttttgttgaatgttgacccatattattccccttttgaatgtatgacatggttaatttttaatatacgtttgatgatttgtgttgttaaaataattagtgtaaatatatatgaatataagacaaaattaaattaccaataaaacaaatcataataaaaatagctatataattttttagtaagataaaatagtttgtcaaaaatcgacaatgttatatatgaaaaaacttacagaatactccctccgtccctaaatatttgacgccgttgattttttaaaacatgtttgaccgttcatcttatttaaaattttttaagtaattattaattctttttctatcatttgattcattgttaaatgtactactactactcaagtttttaaataatactcatagaagtttttgaataagacaaacgcttaaacatgtttaaaaaaattaacggcgtcaaatatttagaaaataagggagtataattaattatatactccatgaatacctgatcgatcgatgcacactgatcgatcgactggcgtatacgtgctgcctgcgtgtgtatgatgatcttggaaacatacctctcatcacgcgcaccgaagcaaattaagcagaagcagtagcgtgtcaggctatatagcttcctctgaatttctccatgatatgtacatgcatgtatgcatctgccaatgtaagctagctacatacaatgctaggtaaccaaccgtacgtgtgtcacccatgaagtttttttaggtcatcttctgccgtatttcagtcatctcttgtgcctgaagttttcagtcatcttctgcctaacgtgcgtgtcctcctagccgagatggtggattgattctgtggtcatagatcttagttgtttctcatgttggtgggatcagcatcctccaacatggcaacatatatatgcagtaggtttgtgcatcgaaagattttgtttctcgaaggttatattaaagatcttggttgaccatgaagggaaatgtagtaactttgatgaattaatggtacgattcgattatgatatatttgtagtatatttgtgcaatcgactttgtctttttacaaagactagtaatttttttttgcacattacaatggatcggaggtgtgatggtggagttgtgggtgtatgcatgactttatccatcataatttaaattctgctatccacgaatactatgcacacgtaaagtacgttttcaataggaattcaatgggactatggatatgtgagtgtgtgttagagggtgcactcgtggatgtgtgagtgtggtctgtgtgcgtgtacgttaatacactacccgtgtaataaaaaaagaaaagtgttgatgtaaaatccagcctagttggcttaggtgagaaaatggaggatcgattttcatgtgggaatacctaggtttaggcctgttttcacgtgggagtgggttagtttttttataggggtggttgcacgctatggttgatggttaggaggggttaacatgtgaaattcccttttatcgtagcagaggtttatgattgattttctattatttaatatatcgttataattactatttaattagttaggtcatcaatttatcggatacagggagcaactttgatgcgtacgttacttgactagtggagttgagcattactatgtgtatgtgtccatgatggtgtgtgcatctttcatataattgaaaaaaaaattaatatgatcctacggaatatgatagctatatatctaagctaggcaaacgccgggttagataaacgtccctaagcttggtcatgttatactatagttatatacctagtctagtttaattacttcctccatcgtaaaataagtgaatttctagttttttctttaagtcaaactatcataaagttgaattatagcaatcttatactagataagagtattaagtatttaccattctaattaaatgagtaaactataaaattatatttcggatttaatgatgctcattcttttttttcggggaagagggaatatatcactcaatcataatgttctcccgcactaaatgcgagataaaattacaactttcccccaaccaaaatccagagaaggattcagctctagccttatttgccaaataatggctgataatattcttacttcggcatattttattaacagagataaccctctccccaaccaagagcaactttgctcattcgatatcctattttttttttaaatgtgacaaaaccaggatatacacatatttgggactgagggagtatatatgtcatagaactcaaaaaggaaaaaaaaatacatatatcgatacatcgagtttataaagtgtgttattttttcatgacaagtttgcaaacactggtactagttgtattaattaattaatcaaatttgcattatcttacaacggggattgagtcgatcgaaggcagttacgtaacgaaatgttgaaaacagtgtgtggcgtatacgtacggcgcctacaagtgtacactagctagaagggcacagtgtcctagatcctctcttctcccaacttaaacagatcttgcagtatctttgcaagatattgatgaggacgataagagcaagtttaatagtatagccatctactaactccaattcatctatagccagtctaatagctcattcgtataataggtacatactacactattaatatctgatcccacctgttatacacacactgcgtcttggagttcgtgctacagctggctacaaatctatagcccgatgctcttctctctccttatttatcttcttaaaatcctgctattgtacctgctctaagcatgcatggcgatgaatcggagaccaggaatgcaagcaagctagctagacttcgatcagctcaattatattggccgtacatatatgcagacatcatcgtcgatatggtggttacattaatttgtgctgttctgcagtttgatcaagacttggttgaccccgttttaaatgtgaaattttgtacgtctgtgccgaatttttttagataatttgcgcctcaatgtacacttgcttcacaaattcgagttagtctctgtactttggtggccaaatccagggaatagtggctgactaataagtgtctcttcttgagttctttcctagcatatactccagatgacttaattaggtttagctcatgtttttttaacttttagtctatgttgcgatgcgcttcaaatctttttttatacacatctaatcagtggcggagccaagataaaattatagtgagggcttctcagccttttaggccttctaataatctcagacaaaatctattttagccctcttccaatagatatatggatttaaattttaggggggtgttaatagaggctctaatgattcattagggggtaggggg

SEQ ID NO: 6982 - DNA, 12115 bp, Oryza sativa
gaaaagggtttaggaagatctcgccgatggattattgctgggagtggtacaccggttattcaggtatattatttctcggtataatcgacgagaaccaatgaaacacggacaacctttgcaaaagaaaaaaaaaactgctcggagtactttattcgttttttggttttaactggtttactgagcggtttcttggctcaaagatggttgattagcaccatataaccaaagcgcagtggcttatctacaattttatataggtgatccaacttatatattttttaaatatataaaattatcgtggattattttctcgattacatggacaaattaattgttttttttaaagactgtctatgtaaaattgcagtggtaagcattgcagcgaaagaaagtacggagaaaatgatttttagcaataatccggggtactatataaaattaatttattttctaagtatgtaataattgaaatttaattaatcatgcactgacaattttattatttttcgtgtcctaacttaatcttgattttcgatagaaacgatcagtaaatttatcacacctatacggagtgcaagggcagaactagatatgagagggggtgcctaggaaccgttcaagaaatttgtttagctatagtttatctatttttaacatatttgcaccttcactcaattcaaattcagacatatgtatcagtctaaacttgatttaaagtaaatgatacccctctctatttgacagcgtgtatatgtcagctttatggataccacatatctaatagtagttgactaaatcttggcaggacctaccacatactatgtcctatatggaaacaacctacggatataggaggagttccggataaggaaagacaaccagagttctacatggaaacaacaaagactactcggattgtatccatattgttttccctagttctacttggacgaggggacacctataggtataaatacaagccccccaggaggagaggggacacgagacgatcaacacccaacacaatcgacatagaagccacaacatagaagcctaaatacgccaaaacacgccgccggatatcgacttcagggataagcacggctagtaccctgcggtgtctccggatactgtcaggagagacgaaagcgctatctctgatctcgccgggcacggattcgaggaggaaggctaccctgttgtcgactacgagtcagatcttcagaccgccaggttgacaacagttagagaggctaccccaaatattgtactggtgtgattatcatgaataagagcaatatcggcttcgactaacaggatgtagggttattacctgacaattcaggggcccaaacctgtataaaaatcctcgtctttgtctcttttacttcagtctcgcgtataccctagtaccaacgatccccataccatacaaataccagaattgcgacatcaaacgtcgacagtatatactcctcatcgtagagcaggtacaatagcatgctataaccagccgcaaacatatttcaaggagacaaatgagaaggaaaaagagcagcgggctatagatttatagccagctgtagcacggactccaagacacagtgtgtgtatgacaggtaggaccagatattaatagtgtagtatgtaactatcgtataaatgagctattagattgactataaattaattgaagctagtagttgactatactatttaaacttgctcttacaagcttacttgaagtacgagttacagtacgttaaacgttttacagcccgggatatgagaaatctgatggcagagtgcatgggaagagaggctgtaccagcagagagcagtttgtgtgatggcggccaacgaggaggcgaaacgtgtcgcatgattttgtgtcatcgtcggcgtcgtagggaccacatggctggagatggacgtactacggggcagtggccactgggtggctcctatgctagctgctgctgctgctgctttggcgtttgaggatggatggatggatgggtggctgcgtcgtcgtgacttgactttggtccacacggccccgaccaccccaaatctagcatcatcatttccccctcctgcaacaagcaattaccactagccggaggagtagtagccatctatgctacacattgcaccacagccatagccctcatctctcatcgatggggagaaagaaattttagagatcgtttttctccttttgacgtcatctatggtacgagcaaagccctaatataacagcaggtataagccaattataaatatattttaaggagataaaaataagagagaagagcagcggactataaatttatagctaactgcagtatagactccaagaagcaacatgtgtgatatgtgggaccagatattaatagtgtagtatatgtttgtaggtaactattgtataaattggctattaaattgattatagatgatttagagctagtaattggctatactattaaacttcctttaaccaactcttctctttgaggccattcacagcgctcctatgtagcgtgtggactcgctcagccacgtaggacactcgctgtggtggacaaaaaagtagatggggcccatgaccttagtttgcttcccctatctcgttttggcttcgagagcctcgcctgcaactgcatgcatctaacgcagggcccacaaagcggcgggaaggggagaaggggaagcggcggcgctgcacgtcatggttgtcgtcgccgagagccatcgtggtcgtcgtcaggccaccaacagatcagccgccaactctaccgcccaagaagattcagcggtgatgccgctgttgcgagtagatcggctagcgagaggaagacgaggcggccatcttcatggagcgtgggacaccgcgagtagccatcgttgccggctccaagaagatgagcgcgagctcaatccactgcgcggcagcaccatcggagctcgattcgcagagagaaagagggccttgtcaccgtcgcctccggccgccctttccgcttcatttattgggccaccggcgaggaggaggagtggcggtggtggataggagagacggcaacagaggggagaagcggctggcgccggcggagcgagaacgagatgcggcgattccggcagagaagaggatcatgtgagagagagagggggagggaggagaaaaggtataggaaggggctgacatgcgggtctgaaataaaaaaaacaactaggctgacctttactgcggggtgtgtggcctaaatgtgttgtgcttatgtgacatctagggctcctcaaatgagcaaaccgcattatgaatggcctgagtataacctttcaaatcttgcacaaatagtatttcctcagtctaaacttcaaaagaaaaactaatatgagtacgatacattctaactacgaatctgaccaatgctaaaattatgaggttgttcggctggctgggctacgactgcgttacagtagtagctagcacggacagttcctcaattgtcaaggcagttgtcgcgggtgttgtggcccggctttgccgaatagactgactaccccatactccatatgtggatgagttttcagtcaagtttatgttatacccgattcacctctacatcctttaatatccatcttttaattaaaaagggtgttgtttttacaggaatggaacaattccattcaacggcatgcttcccgagctttcaaatggtgcactttataaagaattctcaatacattagtttcttataatactatcttgaatttattttcagcatcataacaattaattcatttgtttataccatatgataatatcacaaatcattaaactaatattcaatattccattccatttagtaaaagtacatatgcttcaattcccttttttaaagttgtctaaacacaagtactcccttcgtcccatcttaattgatgaaaagtgaaactcaaaatgaaacgaggatgagtcacatcattctataaatattaaccgttggattcattacaagacgaaagaggataaatgaatcttggctgttgaatttgatggatgtgaaaataataattcaagaggtttccggagatgaaactactagaagacaaaagaaagcaaggaagggggaaagctaaagaataaatataaggttatgcatataatttacgatttgcatctattgagtaaactactttacaaataaaccctcatcataaccaaagattcaccggtcaagattgagcaatttagggcaaatacaaaatgcaggttcatttgattaattttatttctaacagttaattttaatatatttgagaaaaaaatgcaataaggacatgcagagtcatggtcgcccgaatataggtttaataattttcacatgaatttgaaatgaaatcaaactcattccttaaaaacctaaaaacaatatttgtgcataggctataaagagcacgcaccaataaaaaatatgaggtcatgcaaccatgaagacctataagacaaaacttataaaatttgtgataaatattaagctatttattgttattatcataatattaattagcatgaccaatgttttttttacaagcaacgagaaacccataaaaaaggattgtcactctcacatatcacataccatataatagaaggtatagagtcacgcgaatacgcgacatcagatgcgggttttaagtgtagttgtgggtttttgcgtccaacgtttcaccgtccgtcttatttgaaacttttttataattagtatttttattgttattagatgataaaacatgaatattaatttatgcatgatttttattttttcataaatttttcaaataagacgaactgtcaaacgttagatacagaaactcacaactgcatttaaaataggacagagaaagtattattactaatacatactccatccgtaaaaaaaaaacagctttctgactacatgtatctggacatatggagtacgttatatccaaatatatatagccagaagtgtttttagagacggagggagtataaagtgtatagctgtcttccttggaaaaggaagagaatcaacaaacaagtataccctgactctgatggtgccatggatggaggctgctgtgcagaaatagtgcaatactacatggaatctttggagcaaggcggcttcctcatccagggtctacaaacaacacttgggctatttcatgggcccatcactatcaaacgggatttatttgtttctttggtcctgaacgccgggcccactttctttcggctctggcctttgttcacattcacataccactgctccactacagcaaaccacagttgcgaaccaggctatgctacagtgaatccaactgaaaggagaaaaaaaaagggaaaagtacaccgaaggtccctcaacttgtcatcgagttacaaaatcgtcccctaaccgcaaaaccagatatcggagatccctcaactaacaaaacagttcgcttgaggtcctctggtggttttggacccggttttgtctgacgtggcgggtgagtcagcgtgggccccacgtgtcaggctgccacatcatctccctcccctctctctcactcttctctctctgccacatctctctctctcactcttttctcctctcactcgctctagggcgggcgcggccgctggggggcgctggcgaggtgggcggtggcggcgacgggggtggggatgagaacggcgggggaaggggaggggagcgagtcaagggtggtgggggagacctcgtcggcggcgaggcggcggaggagcaacggcgaggagaggagggcgtcggcggcccccacacccgcaaccacccagcacgtgctgccgatgcccggcggtccctcgcgcgcctcgacccgccgcggcggaggggcgacggcgaggagaggagggccggcgccgtgggcgcgtccggcagccagcaggggaggagggccggcgtggcgggcgcggtcggcggtcgacaggagggagtgcggcggagaggagggccagcgtgacgggcggcggtcggcagccgacgaggaggagcacagctgagaggacgcctctctgctccgcccgcgcccggagccgtcgccgacgattagggcgagtggcgcggccgtcggcgccactgctccctatccgccaccgccgctccctatccgccgccgcctctcagccaccgcgctcgcccgccgacgccgcttctccgcagccacactcgcccaccgaagccgccgctccgccattgtgctcgcccgccgacaccgccgttccgcttgctctggccgcctttctggtgcggcggcggctccttcggggacgaggccggcaggttcagatcgaacggcagcagcgagcaacgcgggacgggggcctcgtcgccggcgcccgaggtgctgtcctcgtagagcacggaggaacatgagctacgacggggagagcgaggaggccgccgttgtcatccacgacagcaggtggagaggtgacggaggccggcggagtgggagggcgggcgcaggaggacgaggcggaggcggacggcgccgatagggagcgcgacgggagagcgaggaggccgccgccatggttgcacatctgtcgcccgcgccgtcggcggctgcggtggcagcgtggggggcggccctcctactcccatgtcgttgctgccgctgcgtcgcccgtcgcccatcgccggccgcccaacctcctctcccgcctcgccccgccggccagtttgccgagacagctcgagaacggcgagggcggcgcggagatggggcgggggtcgttggctgcgaccccggcgaggcggcctgctcacgcgttgcagctgccgtcgctgcctcgtcggccgccaccctcagccctgtcacgccgctcgtggccgaccccttcaaccggtcaccggcgtcggcatcaacggaggaggaggccgtggccatcgcactcgcgcaaagaagagaagagtgagagagagagaggaggaagggagagatgatgtggcagcctgacacgtgggacccacgtggggcccacgctgactcacccgccacgtcagacaaaaccgggtccaaaaccaccggaggacctcaagcgaacggttttgttagttgagggacctccgatatctggttttgcggttgggggacgattttgtaactcgatgacaagttgagggaccttcggtgtacttttcccaaaaaaaaaaaagccatatctagatgaagtcgcgcagattaacacttgtttttcttcctcatgacaatggagaaagttctcggcctttggataatgaaaatgcacacagcagctaaccttgatctttgggtgtttcctttttaagggggatttcctgtctgtctgttgatagaaatttgatgtgtgcatattttttttttttgcggggagatgtgtgcatattgcacgttttgactgatagatgtttgagattagtgctggccgttcaatactccatatgtcccaaaaaaaaaagtcaaattctagggatgaatctgacatgtgtgtctagaattggactttttctttatggagggagtacgtgcgatattagttgcacttcttttaccgtgagatatctgtcgagattcgtgctggttgttcgataagtactcgatcccgtgatcttagaattgcaagcactaagctacgatggtttatttagttacacccaaattaaattgcaactattctgtacatgctaactagcatcatacttaaactataattataatatagctacattttacgtgtttttagagaattttccgtcgaattttaaatagcttttttatatcatgttcttttttccgatgagggtggaacagacatctcatccgctacatcacaaaatgcacacagataacgaaacctccctcttttatgctccttttctacaaacacatgtactaagaaagtataaataaaagctaaggaatgatcaaagaaacagctgctaaatgatgatcaactcattcatccgttcatccatcgtactctctccgtccccaaaaaaaaaaaaagacaaaccctgggtttccatgtccaacgtttaattatccgtcttatatgaaatttttttataattagtatttttattattgttagatgataaaacatgattaatactttatgcgtgacttatctttttagtttttttcataattttttcaaataagacgagcggtcaaacgttgaatacggaaacctatgatttgtcttttttttttggatggagggccccggaggaaaaactgacacatctggcccgatcgaatccccatatccatctaacaattcatcatagcctcttttacgaacccatggagatcagccggccagagccatgtgcccaaaacaccatatattcgtatcctcccgtggaataacctaaagcggaagctgccgcgcgcgcgacgcatgcatgcgcgcggctggcgcggtggtgaccactggagaacgcgtgcgtgcggttgtcgtggttgcgtggccggtggattggggctcgctgtctcgacgacgtcgcgcgcgccccgtggttttctctccgatcccccgcgcgcgcgacgcgactggggagatgacctgatatgtcgcacgtttttggaccacgcgcgagagccaccaccaccacaaccacacgcgccgcgccgcaatccagggctgcgcgctcgaacttttttttttttttccaatcgatcaaaagctagtggtggtggtggcggcacagccatatgtccacatcttatcacgacatcgatcgatcatgttcttttttaccggcacggccggacacctccggcgcctcgccgccgccgccggcggctgtcaggttcataccacttactagaacatctgtccgtgccgggaaaacacgggcaggttcgtacacacgtactgtgtaaaacacactgtttaccactacgaggttaatttcattggttgccgccgctacactaccggagaaaccatctttgatcggtcgaccaaattccacaatagtctcggttccaataaaaactgtgactaaaaattctggtcagtcgaccaaattccacaataatcccggttccaataaaatcaggactaaaaagtatctcgttttataagcgcaacgggactataggggttgcaaaccggaccagtccgtgctagaacgcatcatttgtgtgatggcgttgcgtgcgcgtgctatcaccacagtgagcgggcatcgtgattgatcaatcgcaagactttcacttttacgaatcagtacgtgacagcgtgtgatgtggtaccccatgatatttttctccatcaaatataaaaagtgaagctaccaagataggagtatatacgagctgatgatggattaactaccaataaagcgtgtttagttggggaaaaaaaaatttttaggtgtcacatcggatgtttgaccggatgtcggaagggattttcagacacgaatgaaaaaactaatttcagaactcgccgggaaaccgcgagacgaatcttttgagcctaattaagccgtcattagcacatgtggttactgtagcacttatggctaatcacggactaattaggctcaaaagattcgtctcgttatttcctccataactgtgtaattagtttttctttttatttttatttaatacttcatccatgtgtctaaagattcgatatgatatttttgcgaaaaactttttgggaaataaacgggccagcttcgacgatcgacccactgaaagcctgtcacgcatctgcaccaactaggcatggcattggatactggaatagcttagctagtaactctctctgttagcattttctacattcatatcgatgttaatggtctagattagttaacatcaatataaatgtagaaaatgctaaaatgatttacattgtgaaacggaggaagtagtaccggtttgaagaacaaaacctggaaaattaccacgtcaaaattggtctatacggagtactccgtacgcataagtgcataacgtcaattgctttctaggtagaagtgacagtggtactattcacattcacattctttgcacatttaggagtatgtccatttgatttaaacctgaacatatatactcctaggaagtgataacatgatgatgtgatactagtctctgatgccatctttagcatccagctttattatagataagcacaatctcttgttacctttcctgttttggactatgcagaactcttcagaaaaatgcgtcataggctgtgtttagttgagggggaagtttagattttggttgaaattgaagatgatgtgactgaaaagttgtgtgtgtatgacaggttgatgtgatggaaaagtactaaagtttggatccaaattttggatctaaacacagccataacactactactctctagagtctagattattttattcttggtctgaatctttgtctatagacgggattacgtcaactttcctagacggctagacttggatgacaggaaccaattaacgtttactaccacttaatctctacaagctcaacgattaaacaaaggctaatgacggtgtgtttgcactactagctggtagtactatactactacttacatgattagcaataatgagtacaagtgaaaacttaacatagtgcatgcatcagacgagtccaaatctgaagtctcgtcagtctcaacaaccctgaaactaatcggctcttgaagcaaaggacaaagaataccttactagtagtaattactccctccatcctattataagtgcaaccataagttttcgcgtctaactttgatcgttcgtcttatttgaaatttttttataattagtattttcgttgttatgagatgataaaacatgaataatactttactcgtgacttatgtttttaatttttttcaaaaatttttcaaataagacggacggtcaaagttggacgcggaaaacaatagctgcacttataatgggacggaggtggtactattccctccgtcctatgcagtactgcaagattactatattttaggacggtggaagtactagtactattaccattgttgctgttgctttctgtctcttagcgtccttgcatcgatcgatcgatcgaaactgttattggggttgcttttgcacggacagatcagtttctttcggtttggcgcatctatatatatccatccatccatccatccatccgcgatatgaaatgcaaaagttgtaggagatcagatgccctcgcgcacttggtgttgttcagttagtgcgactgaatcatcaatcagtcgcgtgccgacaacgagctatagctaaaaaccttaccattatggagtgctactgtcctaccactgcatctcgaagagactgctcgaagaaaagattaccgtggaggaggccatgttgttgcattgttgttgttgttgttacctgatgacactgacgtcttctctagctaagcctgaaccaaccggctcggcatggaacacgagatcttctcgatcatcaagtggaattactattcagagtgcaaacgcgaacaggggagaaattatagccggagaccttggccttccttttgctgtttccgatcgagccgcccagttttcaagcaatcagccggagatgtgggagcagagttcaatctttcgttttttggcttttgtagtggagggtgccgatatactgaaatttcgaaaattttgatccaaaattttgaacagaatttggtcaaatctgaacaaaatattgtcaaattcataaaaaaatggaaattttgacaaaaaaatatcatatctggagggggggggggcgataggaccgaaatttcgttcctaaattttgaaccttgtatgggagatcacgtatggcgagtaagcgccgaggtgtgctcgccaactgtgacctcatcgacactgaggactgtggtcggagttcgccgcttacgtacactcgggaccgaaccctgatagaaatgcatggccctatcgtttcgcttatccttatatttatttgtattgcttattaggaaaaaatgagtaaagattatatatatatatatatatatgggctgcaggaat

SEQ ID NO: 6983 - DNA, 20688 bp, Oryza sativa
ctcctgataaaaaaaatccattgtcctattaaaatttcaaataaaaattttaattttttacatttattttattttcaaaatttatgtcaaaattttctgcactaattatttagtctcattagttttataaaatgcacacgatgtgcactcaaacaaaattttcaattgtttttgaagcttatatttaaacctaaagcatcaagggcaaaaaggacatttgcaaccaaacgtaacactgaaatgatggaaaatgtaacggtaggggcatggaagggatcaatttgaaatttcacggtaggggcatggaagggatcaaattgaaatttcaggggtatagaagggatcgggtaaattttaagggtaggggcatgggagggatcaaattgaaatttcaggggtatagaagggatcgggtaaattttaggggtatgaaagggattgagtgagttttcaggggtacacagggaatttactcttttagatgagaatgatactcccttcgttttttaatagatgacgccgttaattttttttctcacatgtttgaccattcgtcttattcaaaaattttatgcaaatgtataagatataaatcacactttgtcggtgatatgggaccgggagtatcatgaccagaggcttgaggcagacgcaatcgcccacgtggcctggcaccttcggggacgtcgggcccgagggtgaggtgtccgccctcctcctgatttcccccgaggggggggggtcgggttacgcttgccccggccccgagggccgaggcaccccgaccccttaaagaagtctgcgccacatatatgggataagtgagcacagctgtgctcacctaacagcatttattacagtctggtcaagcgtgtcacgctgcatgtaacgcagtacagcacgctcttttatccggtctgtgaccagtcacagaccggtcagatcaagggttaggtggcgactggcggtctgacgcacgccttgccccatcccgtcaagacgaaagcctctaggcaactcgtctcaagccggagctagcgtgttatctcttagagatggcacgttagccctggtcagatttataccaggcttcatcctaaccattacaggcaagatgttgtgtgaagaagggcaaacatgcacgttgctaagctgacacgcggtggacaagaatgaccgatttgtgaccggtctgacactgctcaggtcgtcagctcacagccacgttcccgcgacgcgcctgcccccggcagaagtggaggtaggtatgtgccgtcccatcagaaggacgtttggagggcaaccgtgcaaatctccgtccatttacgtaaagaagaaaaagtccagtttggaaagggaagggtgcatgtggtatccccttgaagtataaaaggaggaccttgcccatagagaggtgggtggattcttgccagatttagagcctagagcggaggagaagtggacacactttgtagctcattcatacacaaatccacaaaaacacaggagtagggtattacgcttcggagcggcccgaacctgtatacatcgctgtgtctcgtgtgtcttgcgggcgagtaatctttccacacacagcgagagcttgagatctcaccctaagcccccggccgaaccggcaaaggggggcctgcgcggtctcccggtgaggagccacgagctccgtcatctggcgcgccaggtagggggctcagcgtgtgttttctgagctctcagactcttccgtgggcgccaagtttcccttgttcagcctaatggccgagcaagcaaaggcgcacgacctctctccgagtgtgagcggcgacgacggggagccgaatccacgccgtcgagctcgtactcccccacctcctccgcgccaaagccctaagcagggggaggcgcttgagaaggtcgacaagtccatggcatcaccagtcgcgggtggtgcaggaggacggcaagatggggagcgccgcctcctcgtatacggcgacggcagcacgcctcagggtgcgcttcaggctgctggcgcgctcttacgacacccgcctgtcgtccatgacccggagtctccagcccaacgatggctggaagatgtggccaacttggtcatgacggctcagcagcgcctgggtgctggtggacggtccaccaccaccaagacctccggcgccgccaccaccggttccgtgtcatcaaggcggagggcgcggcgagcggcggcggctgcacgtcattcggctgccactccctcgtcgacaccgtcgactcgggaggatcagcatgagaagccggatgcccgcctcaacagcgagcgccggcgtaacagccggcgtactccccgtgcaacggagggcgcctcctcgtccagagtgtcacctcgacatggacgtgaggatcagccctccgtgcccccggctggtggtgtcggctgtagagcctttgtggcgagtcttcggaatgtccgttggcccccaaggttccggcccaccatcaccgagaagtacgatgggagcgtcaaccccaccgagtttctccaggtctatacgaccgggatcgaggccgctgggggtgacgacagggtcatggcgaacttctttcccatggccctaaaaggacaggcgcggggttggctaatgaacctgccacccgcgtcggtccactcctgggaagatctgtgccaacagttcaccatgaacttccaaggcacatatccgcgcccaggcgaagaagcggacttgcatgcagtacagcgaggcgatgatgagtcgcttcgctcgtacattcagcggttttgccaagtccgcaatactataccatgcatccctgcacacgcggtgatctacgcgttcagggggggcgtgcggcacaaccgcatgctcgaaaagatcgcttccaaagagccccagactaccgcggagctttttcagctcgcggaccgagtggctcgtaaagaggaagcgtggacatggaactcctccggttccggagtggcagcttcggccgcccccggatctgccgctcagacagggcggcgtgacaggaggaggaagaagaggtcggaccgttccggcgacgagggtcatgtcctcgccgtcgagggcgctccgcgggccacccgaaaggggaggcctgcgagcgacaaaaagaaagaggctggtactcccagcagggagcgccccgccggcaggtggtgctccgtgcacaacacctccctccacgatctcgcggactgtcgtgcagtcaaaaacctggctgagcgaacgaggaagtgggaggaggacaggagacaggaacgccgtgagggcaagtccccggcggttccttccggcaaacggcgaagtgaggccaagcagatggcccccgctgttgacatcgatgatggtgacgatgacctaggtttccaagaacctggggccaccattgccaccgtcgatggaggagcgtgtgctcacgtctctcgccggagcttcaaggctatgaagcgagagcttctggccatggcccctactcatgaggcgatgcgtcgggcgcggtggtcagaggttgctctcactttcgaccagaccgaccacccaccgtgcattgcccggggagggcaggttgcgatggtagtttcccccaccatctgcaacgtgaagttgggacgtgtcctcatagatggaggagcggctctcaacatcctttcccccgcggcctttgatgctatcaaggccccggggatggtgctccgaccgtcccagccgatcatcggtgtgacgccggggcacacgtggccattgggtcacatcgacctaccggtcaccttcggtggacccgccaacttccgcacggagcgggtgagcttcgatgtggcggacctcagtctgccctacaacgcggtcctaggaaggcccgcgttggtgaagttcatggcggctgtccactacgcctacctccagatgaagatgccgggccccggtggccccatctctgtccatggcgaccttaaagtcgcgctcgcttgcatggagcagcgcgccgaccgcctcgctgctgcgtccaagcccgagggtggtgacgagaggcttggcccctctgcccccaccgccccgaggcagcggatggccacatgcgacgaggtcccggtcaaggaggttgccttgggcgacggcccatccatgaccacacggatcggtggtcttctggatggcaaataggaagacgcgctcgtctccttcctgcgggcaaacgctgatgtcttcgcatggagaccagcggacatgcccggggtccccagggaggtgattgagcaccgtctcgctgtgcggccgggcgcaaggccggtccggcagaaagtgcggcggcaggccccggaacgtaaagccttcatccgcgaggaggtggcgagacttctggaggccggattcgtccgtgaagtcatccatccggagtggctggcgaacccggtggtcgttcccaaggcgaacggcaagcttcggatgtgcatcgactacaccgaccttaacaaggcatgtcctaaggatccttaccccctgcctcgcatagatcagattgtcgactccactgcggggtgcgaccttttgtgttttctagatgcatattctggttaccatcagattcgcatggctagggaggatgaggaaaaaaactgcgttcattacccccgtaggaacctattgttatacatcaatgcccttcgggttaaagaatgcaggtcccacttttcagcgtactactcgaatttctttgggtagccaaataggacgtaatgttgaggcgtatgtcgatgacttggttgtaaaaacgcgcaaccaagaaactttactttcagatctagcggaaacttttgaaaacctccgctccgcccgcataaaactgaaccccgataagtgcgtgtttggtgtacccgcgggcaagcttctcgggtttttggtctctgcccgaggcattgaggccaaccccgagaagatacgagctatagaacggatgcgcccccccagcaaacttagggatgtgcagtgcgtcactggttgcatggctgccctaagtcgttttatatcgaggctgggagagaaggcgctacccttatttaagctcctcaagcgctcggggccgtttacttggacggaggaagctgaacatgcccttactcagttaaaggtgtatctcagctctcccccggttctagtcgccccagagccaaatgagcccctgctactttacttagcggcgaccccccaagtagttagtgcagcgttggttgtggagcgcgatgaggacaatcctcattctgcgcacccccactctgtgccgacttggcccgggagcaggcagggaggagaggcccccgagtcgaacggtggcctaaggcccccgacgaccggagtcggccctctgcccgctcgtcagacggtgccgggtgcccccgaccctcaggaaggccccgaggccactgcgggaaggccgcatctaccaccctttgaccccgaggctaaccctgtgcagattcgacccgggagagagcagggagaagaggcccccgagccgaacggaggcctgaggcccctgacgaccggagctggccctttgcccgcttgtctgacaacgccaggagcccccgacccccgggacggccccgaggccactgtgggaaggccgcacctgtcatcttcggaccccgaggtcatcagcgcaggagacgagtgtgccccaagaggccacttggacgaagagcaccccggggatacggcccctagcgaagaggatcggccccgccgaaaggtgcagaggcctgtctactttgttagtgaggccctccgggacgccaagacccgatacccacaggcccagaagatgctttacgctattctgatggcctcgaggaaactgcgccattatttccaggcgcatcgggtcaccgtggttacgtcttaccccctcggtcaaatcttgcataatcgagagggtacaggacgagtggtaaaatgggcaatcgagctttctgagttcgatctgcactttgaaccacgccacgctatcaagagccaggccctcgccgattttgtggcagagtggaccccggctccagagactgtctcaatgcccgaggccagcacgaacccctcacagctgcctcaaaccgcccactgggtgatgcagttcgacggttctctgtctctccagggcgccggtgcaggggtcacgttgacctctccgaacggagacatcctcagatacttggtccgtctcgactttcgagcgactaataatatggcagagtacgagggactccttgccggactcagagtggcagctggactggggatccgccgcctcttggtattaggcgactcccagctagtcgttaaccaggtctgtaaggagtaccggtgctctgacccacagatggacgcctacatacgccaagtgcggcgtatggagcgccatttcgatggaatagagcttcggcatgtgcccagacgggataacatgatagccgacgaactctcacggctcgcgtcctcgcgagcccagaccccaccgggcgcctttgaagaaaggcttacccagccatcggcgcgacccgatcccttaggggagacggatgcgcctaaccggcccccgaggcccgtcggagtccaggcctcgggacccgaagggagcgctccaagctcccttagattgattgcttggatctctgagatccaaacatacctcacagataagactctacctgaggaccgcgaagggagtgaacgcgtacaacgcatttccaaacgctatgtgctggtagaagggaccctctatcggcgcgcggctaacggaatcctcctgaagtgcattcctcaggaacaaggcgttgagcttcttgttgacatccatgagggcgagtgcggagcccattccgcctcgcgtaccttggttggcaaggcctttcgtcaaggattttattggccgacagctcttaatgacgcagtcgatctggtccggcgatgcagagcgtgtcagttccacgccaagcaaatccatcagccggcccaggccctgcagatcataccattgtcatggccatttgctgtctgggggcttgatatcctgggaccgttcaaacgggccccgggcgggtttgagtatctgtatgttgcgatcgacaagttcactaagtggcccgaggcttatccggttgtcaagatcgataagcactctgctcttaaattcattaagggcatcacggcccgttttggagtgcctaatcgtattattacggataatggcacccaattcactagtgaactcttcggcgactactgtgaagacatgggcatcaagctctgcttcgcctcacctgcccaccccagaagcaatggccaagtggagcgcgccaatgcagaaatccttaaaggcctcaaaaccaagaccttcaacattctcaagaagcacggcgattcatggatcgaggagttgccagcggtgctctgggcgaaccgaaccacaccaagccgagcgaccggggaaacgcctttcttcctcgtctacggcgcagaagcggttctcccatctgagctcaccctgaggtctcctcgggccaccatgtactgcgaggctgatcaagatcagcttcgtagagatgacctcgactacttggaagagcgaaggcggcgcgcggccctccgagctgcgcgctaccagcagagcctgcggcgctaccatcagcgccacgtccgggcccgatcactctgcgtcgacgacctcgtcctacgccgcgtccaaacgcgtgctggattgagcaagctctcaccaatgtgggagggaccgtatcgagtgatcggtgtcccccggccgggctcggtacggctggccacgggcgacggcacggagctgccaaacccgtggaacatcgaacaccttcgccgcttctacccctgaaagggggggtcgggtgtcaggtttctatctcgggccaaccccgcacccccctcgggtgtgcagggttggccgggggctaccacacatgcacatatattccttttcttatttcagcttttcaataaaagcagtttcaatttcctaaaggttgtgtctgtgccgtttttccttctaaagaatcttaacttgaaataaggtcactcgtgctcaaccttgccctcgggggttcggttcggtcagcaaaaatcgccaaacggggcccagaaccgagccgtgccccggggtgtggtgaactccgggggggaatcggcaaaagcccacgatcgggttacccatacccctcggtcaccacgttcccggcctggccagtctcgacatgtggatctccccaggcactagccccgacccgagccattcgaggaccgggacttgggcgcgagcccttatttcaagctaaggcgcaaaaggaccatggcacagatcatcctcaacttatatatatagcaaaataaagttaacatagaaattgtttcatcatttttgattgcagagtaatttgatctatacaaaagaggcatgaaggccttagaagaaagaaaaagaaaaaagtaaagattgacgggggctcgggggctcattctgacgcgcccgggtcgccggcctcgtcgccatcgtcgtcctcaccgctggcatcgccctcctcgtcggagctgggggcgaacgcgagccgaggggctgagccctcgaagccgttgacgatgtggtcggcggcatcccggacgcgcgcgcgcgcgtcgtcctcggtcccgggagggaactcctccagcgccatccatggagagaagttggggtcccgggcctggtaactcgccagcacgagttcgaccgctccccgcgcgaggtcccttgaggatgacttgatggtcttctcaagctcctcggggagttgctcgagaacccaagccatcctgttgaggtgcggagcgaggccttccagattggtggggggcaccgacgactggcctccccagaggcccgcttgccgaccggcgcgcttcatgcgggagaccgcatcccaaagcatgtcgggcccaatctcgcccgccaagcgaagggcctcggcctccccggtggaggagtccagcgctcgctgcatttccgcgacggtgtgttcggcagccgcgaggcgggcggccaggtcgctttcgcctgcggccgccccgccgataggcgccctcgcggccagctctttctcccgtgcctcgaggttggcagcccgctgctccagcgcggctctctcggcacggacacattcaaggttgcggcgcgcctgctcctcttgcgccgcctcgcggagggagaggctgttcgccagccgttgcgtcgtggcctcggcctcctcgagagctcgctcccgctcagcgagtgcatcctcgcgaaggcggagcgcggactcctcctcggcgcaggcggcctcatgcgccaccagcgtcgcctctcggagaccagcggcggcctcgcggcctgtcaagcccctctccacggcgccggcgtgttcttccagcgccatggcacgggcctcaagggcctcttcgcgccgccgcaacgccgcttcagcctctgttgctcgctgctctcgggcggcggcggcgtcgaggaccccctgggcggcgtcgagcttgttattcagatccgcctcccagctcccgtgttgaaggcggagggagtcctgcgcctcgatcatcgcggtggtggcgacgagggcggcctctcgctcctcctccacctctcgggcgatctccgccagcgccgccttgcgggcttcgagctccgagatgtggcgccggtgggccttacggccctacctccaaccatggtgtccaccgagcgccgcccctcctcgacgcgcgcccatgcggcctcgagctccgctcgttccgctcgcaaggcctccacctgggcgctaaatccatctagcaccgcggtgtttgcggcggccaaggcctgcataatgggctcggcgctcaccggggcaacggaagacgaggagaaaagtcgccttggagaaaaggcgacgcggcttggccccccggaggatgcgctgggctcggggatgtcccccgggcccgtttgatcctgggcgtcgcccggtgaggtaggcccaggcgatgcgcccgcggcctcgtcgcgagccgcctcggaggatgtcacctgaggaccgcccgagggagtgggcccaagtgacgcgccagcagcagctgtcgcctcagcctggcgagcccgggcggcctcctcccgggcagcttcttcggcttggcgagcccgggcggcctcctcccgagcagcttcctccgcttggcgaacccgggcggcctcccgggcggcatcttcagcttcccgaaggcgggctgcggcttcacgccggtcagactctcgcctccgctcctctgcggccgccggatcttcggcctcggactggccggatttggggtggcgggaggaatgcgacgggacatcgctgaagcagaagaaaaaaccgaaagacgaacaaaatgagtaagaaaaaacttcttttttgggaggaaaatggttgcaatgagagtgagacgaacctgcgagggggtcggttgaatgaccactttggaggggaaatcaggtttccccggcatggttccgtctcccccgtcttacggagccgcttcttcttgcgcaccccctcgggctgcgacgtcggcgcggccccctccgggcgccgactgctggcacgcgccgccccgccccctcggggaggagatgggggaggtgtacctcccagcttcctcttcccctgggcgtcggcagggcggctgctccccgagcccccgacgcggggcccagaagcacgaccccctcctggggcaggttgttccccccggcggcgcacgcccgcgccgtcgtggcccttaggggctctctcctctgaggccccgacccccatcataatggttagaatggagacgcggtcgggatcgctgcagagggggaggatctcctgaggaaggcgagacgcctccgcggagctaagattcagcaccctttggactacgatcttgaagtcctcaggagcccaatcccatctggctccctggtgggtccgcatatagtcttcaggcccagtatactcccaggcgctccgggcgcgccgttggagcggcgcaatccggcgatggaggtaatcgccgtacaccatggccccggtgagcccttgggatcgcaggcccgccaggcggtcgaggacggcgtcgtactcctcccccagatctaccggcgcccgccagctggagacctgcgccgggggctggcttggaagacggaggcgcgcttcgttggcgaggggggtgtagaaccagtcgctcttccagtcgtcccacttcttgcggaggacgcaggggatgtagcggttcagcaccggcccccgcggctggaagtagcagccgccaactaccgacggcggcgacaccgactgcacggtgaagaaccaccggaacaactgaagagaggggcgcaccccaatgaacatctcgcacaggtgtgcgaagatggccaatgtcatcaccgcattgggggtgagatgcgccatctggagatcgtagaactccaggacatccatgaagaaatgagaaaatggcgggaccagcccagccattgcgaaggggaggaagaagatggaccgccccgggtagtctggtgccgggcgcccctcgcccagcatcactatctcccgaccggtggcggactccggcatgaagcggcgcggcagtccggcgtgcctctcgttcacgatgcgggaaggcggcagtacactgccgtcgagcagagcagagccccgtgccatggcggtggaggaagagatgattgggaacgagcgcgtgtggcgaaagtagggcgtagcagagaaagagttagagctcaggcggcgaaggcaagaggaacaatggcgaaaggaagggagcaaatcctttcctcgatgcttttatacccttgccatcgctggtcctggctcctcgtttctcgcgcccactacctcgctccctcgtatctcgctatctcgctccctcgtttcccgtgcccacgcttccactaatcccattcgcccgcttacggcgcatgaagtggatatgcggttgtggcaatcgaaacggattgtatcgtgcgcgcattaagtacgctcgccgaccgaagcggcgttaccgtatctccgagcgagacaaatctgctcacccagattcgcgcgctgctcaagtgatgtggcagtcttgagtagaccgcccattatggacaaccaaagtcaccaataccaatgtgcatggattgagaccgttgggtgttttgcccaactacggagaccggtcccacctgtcaccaggctttaggggtggcgtcacacctgaccgcttcccttcggaagggaaattgctctggcataacgccgggggctactgtcggtgatatgggaccgggagtatcatgaccagaggcttgaggcagacgcaatcgcccacgtggcctggcaccttcggggacgtcgggcccgagggtgaggtgtccgccctcctcctgatttcccccgagggggggggtcgggttacgcttgccccggccccgagggccgaggcaccccgaccccttaaagaagtctgcgccacatatatgggataagtgagcacagctgtgctcacctaacagcatttattacagtctggtcaagcgtgtcacgctgcatgtaacgcagtacagcacgctcttttatccggtctgtgaccagtcacagaccggtcagatcaagggttaggtggcgactggcggtctgacgcacgccttgccccatcccgtcaagacgaaagcctctaggcaactcgtctcaagccggagctagcgtgttatctcttagagatggcacgttagccctggtcagatttataccaggcttcatcctaaccattacaggcaagatgttgtgtgaagaagggcaaacatgcacgttgctaagctgacacgcggtggacaagaatgaccgatttgtgaccggtctgacactgctcaggtcgtcagctcacagccacgttcccgcgacgcgcctgcccccggcagaagtggaggtaggtatgtgccgtcccatcagaaggacgtttggagggcaaccgtgcaaatctccgtccatttacgtaaagaagaaaaagtccagtttggaaagggaagggtgcatgtggtatccccttgaagtataaaaggaggaccttgcccatagagaggtgggtggattcttgccagatttagagcctagagcggaggagaagtggacacactttgtagctcattcatacacaaatccacaaaaacacaggagtagggtattacgcttcggagcggcccgaacctgtatacatcgctgtgtctcgtgtgtcttgcgggcgagtaatctttccacacacagcgagagcttgagatctcaccctaagcccccggccgaaccggcaaaggggggcctgcgcggtctcccggtgaggagccacgagctccgtcacacttaaagtactatgagtgataaaacaactcgtaacaaaataaattattattacgtaaatattttgaataagacaaatggtcaaacatgtgagaaaaagtcaacgacgtcatctattaaaaaacggaggcagtagcagataacaaacaatacggtgcagcgcaaagtagcaatggagagaatttccttgcttttaagcagaaattggataatcacattgaagagaaactggataatcttcaaaaacatcacagccaccatggttaaacaattacatgcatgatttatgacacatgtcatgtactcaacaattccaacataatgacgaactgacttttaaacagatacccaaattttgtgctgattatttatgggattaatgacagattcttgtatacatatacccagttgccctcttactgcagattctgagttcagaaaccctgttcaacaaggtaatcgccaagcctctccacaaccatgttgcactggccaggagtcatcggttcctcatagattccaatgatgatggatagataaggtcttcttgacagtaacccctccagttccctgagaaaatgtaacaaaaatgcgatacatgaaattagcatgtctctacagagaccagcaatagcttgtagcaaatcaattttcgggtaaaatttgtaagtttgttaaacataaaatacttctgcggttgagatagtgtctgaacaattaaaggtctggtcaatctgctttccgagataaaacggtttgatgagagaacggagatagtagcagggatgaaaacggtcggaaaaaccttagtgtgattcaattctaggaaactttatcaatgtgctagtgatatttatggtccatattgtggcgttcctagtgatttctgaaagaaaggggaatcttgcagcactattctagacccttagcttcgaaaaatgatgtaattgctttcagctgatttgctggaagggaagtatattttgtaggtcaaaagttgaaatttgaatcggcgaactcggtaaagttgctctcatagctttcacatatttgtgcgccctatgggtagatataagaaggaagccaacatagtctacctttctgtgagatagaagctaaagaagtttattcccatgtaactggaaaattcgaataaaatgctcataagatactgggctacatggtcattcgaatttcagaagatgaagtctatacagaggtgtgtttggagggccattcacatgaaacagtccttgcaaggttgcaagaatcaggaaccaaaatttctctcatttttctagaaatttttgcgataataacaacttgccaaatataccaagtataaaacgcaatcgctggacacacaggaagccttttgtgttcagcaatataatttcccttcatcacattgttctaaacttctaatcagttgtgtttagtttaccactgattcaccattcaccaacaacgatgtcagtcctccttttggcacagaatgactgactgataacatcgaatgctgactaaaaattagcaacggaaaacacatgacagggaaaaaaaatagagcctggttttgctgctagatcaaaattctcttctcttccaggactggaacaagcaaagcaatcgcaaacgtctctactggtaatggcagggttagagttacgcatctgaatatctctcatctcatgagagtgaagcagagagcgagagagaaaattgctctgctccgctcgtcctgtgctcccagagatttgattcgattcgattcgattcttgcccctgacttgccttgcccaaatcttggcaagcgtcgtctctgctcaccgtatgtttgattgatcgcacgtaaatcagtagtattatgggccttgaaggcccgtaatggaaaatcagcctgttgcccgggtgttgatccttgcatcatcatgctgtcttttaatagatttttttttggtggggtggggggttatagtaggcccaataccttttttttttacattggctgaataaatgattactcctacattcttggtttaacgagtctaggatttgggcggggagcatacagtctccagtcagcactagacctagcactcattgccattcgagcaagatcatgagccaccctatttctcctccttttattttgtgcacttgcacctgttggagacattgcatcacacttatttccaagctttaatggatgaatggctgaactgcaacggattatctgatgatttgggatgtgataatatttgaggtacaaccaaatggattagctgttataaatttaaaagaagtattgtagggaacttacatacgtagaaagctattattataaagcttgaaggctgaagcttccaaccataacttaggctgtgttcggaaacccctcccccccggcaagcaaaacgaaatacatattattgcatgattaattaagtattaactattttttaaaagaaaatgattaatatgattttttttaaaacaactttcatataaaattttttttaaaaaaaaacacaccgtttagcagtttgaaaaccatacacgcgaaaaacgagagaagtgagaacacaatcttagggtgtgttcgtttttcttttttgcttttgcaactcccttgtttaccgtaagcacacttttcaaactgttaaacgatatattttaaaaataattgtatataaaagtttattttaaaaaaatcaaataaacatgtttttcaagtttgtcgtacttaataactaattaattatacactaatatcatttattgtttcgcacatggtaagaaaaagaaaaaggtaaacgagcttttcaaacagagagtatattgcaaaagttcaatattcaagccatagcatcacaaatagtaatagtgaaaaatagttaacacaataaaagtcaactattttagactaataaaattaattaatttgagatgtaaaaacctgctatagaaacaaaatggttcgacgtatggcaacaaatcaaccaaccgtaagtagattagatttgatttatcattaaatgttctttaaacgtgatataaatatttttatatttacataaatattattgaataagataaatcattaaatattgataaaaagttatcggcttttattattaagaaacggaggtagtagatgttgatatgccggccaaacaagagcccatccaagatcggatgcccccacgtagcgtattcatcaggataaggttgtgcatctgcaatcgcctacgccaacagccgatgcacacgcgtgcgacaccggaggcaggatatagaccagcagagagaaatatctcctcagaaatttgtcattagcagcaagcctaattaattcacggtaaaaccaattataaaagataaacccaaagatatttcaatcgtctcaccaaaaagatacaacagtgcacagcacggcaggtacgtacacgaccgattattaactgaacttatgtgtctgaaaaaaaaatgcaattcaaagttgagtactatagctagctaggcatcgtttgcttcacgacgacgacgacgaggaggaggctgtaatggctacggcggcgcggacggcggcgccggcgcgcttgtagttgtcgatgtagtaggcagggttgggcagcttgaaggtccggcggccctccggcgagcccagcaggtcgctccactggtcgccgatgttgccgatgatcaccatccccttctcctcctccagcttcttcctctcccccgacttgtactccaccaccgatcccgtcgccgtcgagttctccgacctgttcgttcatttcatcaattttatactcgcaccgtctcaaaatgtaagcatttttagactcttatacacggtctgcgagatgctactttaaccaacaatatctatataagtaagatgttttaaataaaaagagttacatatcatgatagtttgtttaatgataaatctagtaacatcaattttacatgattgatctttttttactattaatggttaaagtttaaaatatttgatttgtcactatgctaaaaatatttatattttaggacggagggagtacacgcaggaattcagagattaattagtttgtaacgtgaccttaatatgagctcgtcccagcagtcgaagccttccttgatgagattggtggcggtggcgttcctcagctccggcgtgtccggcctgtccgacaggaagacgatcttgacgccgaggaggagcagcttcttgtacagcgtcaccgtgttcggcaacgccgacgctctgccggcgatcagccactccatgaacgccggctcgtcggttctgtggtacccgaagccgtgcttcttgtagaacttgacgtgggagagggcggtctcgtcgacgtcgaacacccaggtggcgttggcgtcggcggcggggtcgccggagaggacggcggcctcggcgtaggcggcggcctcgtcgacgacgaccttgctgtcgcggcggtagtggtggccgcgcatgtagttctcgacgtagttgtcgcacttgcgcggcgccgccgtccacccccgcacgttgttcgcctccacgccgacgcgccagctgtcgcagtagtcgccgtcgcccacggccgccgggatcatcatctgcctcagcctgtccacgaacgagagcgccgccgccgacgacgacacgacatcgccggcgccggcgccccacccgtggcaggtggtggctagcgcggcggccacggccaagaagcagacaagtcgcttgggcgccatcgccgtcgtctactgatgtttatgcttcactctgcagctggcagctggatatatatacacacactgacacacagcaatggcacagtgcagagttagttactcctaacattctatccaagatttatggaggtaattgtatggcggccccggtggcgaggtgaagagacaagaagagtttttgtctattgcaatcaatcaatcgagcaagcatgaaccatgtcgcatttgtcacgttatccgggaccaagcagcaacagcagctagctatagcctatagctggggctcaggaatcatgtggattctggtgtcaagataaggcgccgcgggcgcgtagcgcgacgtacatgtgtgtggacgcggcgcagatgacgccgcctcgcctcgcctcgcctcgcctcgccggccgcttcacctgtcgccacgccacgccacggcgcgccgcgcgacgcttcacccgcgcgcgcgagagagaagcgggccggtgtgatgtgatggggacggcgtggcgtgggccggcccatgcggttccgggccgagatggcggatggcaatgggctaagagctattgggccgcggtgcgttgtgaggcccattggaagaaaagggaaattgattgaagcgtagtagttcaccgtacttggatttgctgatgtgatgacgccacgagttccatgacgcatcggatgatcggatttgtcatattcttgggaggaattctgctgctattttctaagcggagcgcgcatctgcaaacaacaggcgacaattgcaaagccaacagaatctaagatatacccgcaccagcatatattttatttcccacaaaatattattacaaaattagtccactcttctgttcccatccactactatagcccaaagttgttttacttacttgggaaggcgggaaacacatggctattttaggagaggcttccgacaatcaaaagctactcaaatagtttagtttttttatttaggtttggagaagttatatagttttaaaattcaggaaaataataagaagcagacgcctgcaaaaatgttttttttttcagttgtgtgtttttttttcacatggtttttctattctctcaagctgcttatctgaatctaaaactctcctaaatagaccgacagatcgaggtacagttgagaagttgggtgcatatgattattcatcatggttctaaaatccgaattccccacaaatatcgcacacatgggtacctttcaagaaaataaagttgttttacttacttccattactagctaggtttaattacttacacagcactaaaaccacaaatgtgggtaaggaaacagcgtcgcattggaggcaggaatagataggcatactcctttgagataattaaatatgattagggaacaattgcttaaaaaaaagaagaaactaaagctagatcaatatcacatttgggagagaataatccggaaaggaaagataggctagcttagctaggccatgttgtgttattctcaatcccactatctaacagtacaattcgccttgcaacttctttttgggaccgaatcaacgacacatgggagagcttaacaagaggttaactcacctacacacatgtgcacttttagtttctttttcttttctatagtatcgtctccaagtaatataattaaggtgtattaattcttattgtatatatgcttgtgcgcgtgagagagaatatatccccagatcgatctcttttcaatttctttgttaacaaaatagttgttttgttttgttgcatggccataaaagaaatagatgagagtgaagaagacagacatgagacatggccgaactctctctttttcactctttcttttatcctttctatctcctgtggaaagggacatgtgagcatctggtttgttctatgatgttccatgaacctgaaactgtctgaacctaaccattattttttattaatctctgaggctctgagcatatcataggcaacaaaacacatgatcagtagcttggatcatatcatactatcatatcggctgagagatctagcagtaaatattaactagtgttaaattgcccaaaacagattgtacaagaactatatatttcagtcttaatttagagatgaaacgaataatgttcataatttagctaggttacaaacacagacgcacaaatgggcaagttacttctttggttagctgctctgaaaggtagaattataaagatagagatagtttattatgattcgctaaaagacaaatgcgagaacaaataataggggacattaactgcaaaacaaacaaggaggaacctttcctttacctaactcgttcatcatcaagttttttatgaggaaaggcgatgcatatgttctctccttagcactgagattctcagcagcaattatagaagtagcattatgcccta

SEQ ID NO: 6984 - DNA, 18797 bp, Oryza sativa
atctctctcccttcccctataaaagcctcactattcccccccttctccccgtctccaccacccactccttcacgccgtcgcgccgccatcgtagtgccgccgcgccgccatcgtagtgccgccgcaccgccgccgtcgtgctgccgcgccgaccgtttccgtgcccgcaccgccgttctcgcgccaccgtgcgccgccgtcgctgccgccgtcatcgccgctgccgccgccggtgagtcgccctccgtttccctcgagtccgccgccgccaccgctcgggtgggaaagagagagagccgagagaaagagagggagagccgagaaagagaaggagaggaagggaggaggaagccaggagagaaaagaaaagaaagggagagaaagaaaaagaaaagaaaagagaggagaggaaaaagggaaagaaagagagaaagaaaaattaagagggaaatttaaaatatttacaaatattagaatttaattatagggttaataaaagtatagttagatgaaattttactaattaaatacctaaaatactaactcttaagtataggattaatgaaaatataaatggatgaatttctatagattatagattatttttagtactctccataagaaatcaattcacagtattaatttagatgtaattaataattgaacaaatgtatgaattcccgtaaattattgtggattatttttgggtaatctctataaataatcgattcacggtagaaattcggacttaatcgctaggaatttttagacgtacattatatttaattgtttagtcataaactaaattaaaacgtgtaatattataagataattttaggattccgtccgacatttagctcgcgatagaaatttctaacctattaaatgatatgttgctcgggtaggttaaattaaaaactcatgacaacaaaataattcttctcgcaacatagtttaaattgaagtggagtttgccctagttcgcgaatagtaaagttaatataaaagaatcgactttcgcgttcgactttcatttggatttatttggattcttatttgaattctaaccgaaattcaaatcaattttcgcacgtaactatagagaccgagggagccgtggatccaagcgaaggccaagacccgcaagactttgagcaaggcaagtcatcactattccttgaacatgttgatcctaattgtgaaattgttttgtttataaataaaattgcatgcaatgatgaatatcctacttgtgattatgccatgccttgattattgtttacccttaaatctttgtaaccatgtttacgtatgagtccttagtcaactatgacaattgcttagaaatgctattctagaatcaggcatactactcatatttatcaaatgctatatgcttgggcaattacctgtgggaaggtaattgaaatgcggcttgtggtgacatgagcgccacattgccatgatattgatgacatgatttgtgaaaggagaaataaaattaaacaactgttttcgactgaggcggacggaggatctgggtggtatctggaaaaggctagtaccgtccccagtcagttaaggaccgagccatgaagttaagcatgaaacgacccccgtacaaccgtacttctcgaatgggtatagacctagcggattagatagctgagcggaggcagtatccatgcatagtggtttcttgatgtgtgaggcaggggctctacggtggggcagccattggtaggaccgcgaggcgggtgtctacagtggtgtcgccatcggtaggactgccatgtgagaatctaaaacataattataacttaatgcatgtgtgagtattcccttcccgggtgcgccaaaactcctctcactgctagaaaccgtgtacgcctagagtgcatgaggatgaaaagttcatggagcgggtactgccaatgcgaggttatcgaaaagctttgccgtgacgcgtctcatgtgttgggacgaggctcatgtgttgggcagtcgcggagtgcgggtaaagtgtacatccactgcagtgtgagtaaaccaaatctattcgaatagccgtgctcgcggttattgagcaccgggacatgtattacacttggctagactctaaattctttaacttgtgtgggatgggatattgcatgatgatttttatgctgatggagccacttcctgagaggcgggaatgtggacgtcctcagaaaaccataacgaatcaatggcgggaagctatccttgggatcacaatggatggtggacagaaccgtcattgtttaatatgaacactggtattaaaacttggtcagtttatgctaggtcttaggcttgtgaaaagaattacaaaacttgctttgggcaaaagaaccatagccatcctttgaattcccctgtcatgtgcatcattgatgtggtggcttgctgagtacggttggtactcacccttgcaattataaaattaatcagaagcgggagatgaagccttggaagatccttatgcctactatcaggagggggacgaagacgatggcgtccagtaggtcttagtacggtcgttgcctgtggcaatggcatgccgctgcctaaaattccgctgccttatctaaactctgcttttggttgtattccagaccgctcggtctgatgatttaaacaatgcccgcgggcttatgttgtaataattcgtactagactctcgtgtatgagcatttggtattccagctatgaattcgtgtgtaccagactacttgatccagggaaatggtacggtttacacgattgattcctgttataaaaacgggggtccacaccgcccctccacccgcgtccgcctcgccgtcggccgccgaccaccgaccgccctccgcgcgcagcagctggcggcggcggaggtggtggagcagtcggtgaacaccatccggttcctcgccgtggatgccgtggaaatggccaagtccggccacccgggacttcccatagggtgcgcgccgctcacgccagccgcagccgatgccctgcttcgctccgtcggccgccgtcctcgtcatctccgccgcgaccgacaccgccccgtgcgcctctgagagagaatatatatagagagagagagagatgagaagagagataagagatagagctgatatgtgggcacaattgcatttttgacattttacgcgatttttctctcctcttcaaagggcccaagggtatttttgacatttcacgcgatttctctctccacttcaaccagaaagcattattttaatcgcgcggtgtccactggcaaattaccacgttttatgaagtgttttcccccaaaagtgagtttgggtagtatcttaggattaaaacaacacataagcatggtcctgtagcaattttttttggttttttttcgactatacgaaaaacaaaaacaacgaaaaataggaagcctcttactaatataatcttgagtgaatttgaggagaggtgagagagagcaagagcaagcaagagtggcattcagacttgggcaagaagggagcccccgagggacggggcgagggggggtgcactagagaggttggcgtgctccccctgccatgtcaatatcggccgccacggtggtaggggggcggcgacagcgactcagtagccaaaaagaccatatatagaataagtttgttcaaaattctatttatgagataagtttttcaaaaaaatcgtgaaaaatccatgtccgtgggccactacatgtcattgactatctaattgcgagagtgagcgtgagcgtagccggccttgtctctccaactggcaaacggctccctccatgcaccgggtcttggtacacccaggtccccacgacacgagcacgagctctgcgcaccgggtccagtagaccgcaaaacccacaccccatcgtattcgtcgtggacgggggggggggggggcaaaagcaagagggaggccaaaacccccctccacccatttcgctctccttctcctgcaagcttcctcctccccacccacccctcgctcctcgccgcgaggggcgagccatggcgccgccgctcgtctacctcagccccaccgaagacggcaccggtacgtccagatcccgcacctccgctaacctcttggttggctctcttcaattcttctaacggcgatctctctcgctctcgctctcgctttgtacgcgcgcaggtgcgagcactctcatgaaggcggccttctgcgggaacctgggaagcctcaaaggttgcttcctcttctcctctcttctccgccgcgtcgatcccactcgatcgatgtctgtatacatgccccccttttgcatgctcctgtgtgtttcttttcctccgataggtttaatttgtgtgtcgacgcttgtgtactcgttgttgcgcttgcgatggtcgtatgatggattttgcatgagctgcgttgttgttcttgggaatttgccgcattttattttccgtgatgctatggctgcttggattttatcgtgcgtgaaggccgtaaccctctgggcatgtggattagcggatattgcacacttatattatctagaaattgcaagatatgaggcttttattgtagcaagcacttgtgtcggataaatgtggcagcgcgttcgcgttgttatcatcttctattatattacctctccaagtgtggatatatgatgtatagtcaggtactctaaacaaatgttaatttgcaagtcgcaaagtacaggttataggtgcacattgtaggaataagtcttggctggttggtcttggtcttgtggtgcctttttcctgcttttcagctttctaggacagcatctctactttcagtttggatgctctaggacagttaggacagcagtttgttgagatgctctaggacagtttgttgggatgctctgctctaggacagtttgttgggatgctgacagcaccctcttagactagcatggctgcatggctgctacaagcagctataaatatgtatccaatcctctttgggaggacatggcttttgtatttagtgaatgaagaaaaccagaaaattgccccatctcgagtgccatcctcttctcaatgagagtaaccattgaaattctaacatctggtatcagagccacaccttcctgtaggctaaacatctcttgttccaccccttcccaagctcggttgagctctcagccagcagcagcagcagcagcaccggttgcccctccttcccctttcccttccccctctccacacagcagccccccggaggtgcgccatgtccgacgctcggtctcggcgttcggtcgcctcgagcactcggcgtcagcaggacgccgagctcgccgcagcagaagagcgcaggcgagcaacggctcagaccgctgcagcagcagcgagggcggccagactggcggcagcggagttggcagcagccagggcggaggcggaggcggaggcggcggaagatgcggcacgtgcggcggaggtagaggttgagaccttgcgcagcagcatcaacgggtccatcgccggcgacatcaccgctgacagggagcttgaggagctggcaagaggaaagggcacgggagcgagcagagcggtgggcagcagcccacctccacggcggcggcggcggcccaagggaccgtgcgcccgccgacgggaacccagacgggcgcgggcgtgccggcggcagcccggagcccgcacgcggccctcgcaggcggcacggctccctctcccctgaccggcgccatggtcaccacggcgtccagacggtggtcagggattttggtcccggcggtgggtggcctaccctcaccaaaaccaactacatcgagtgggccgcggtgatgagggtgaggctccaggtgcggcacatgtgggaggcagtccggtacggtgacgtcgactacgacgaggatcggcgggcactggatgccctcatcgctgcagttccgcccgagatgcagttctcgctttcccagaagcggactgccaaggaggcctgggacgccatcgctgcggcacgcatcggcagcgaccgcgcccgcaagtccacactgcaggcactccgcaaggagtgggagaacctggccttcaagccaggtgaggatgttgatgactttgctctccgtctcaacactctcttgcagaaaatggtgcagtacggcgacgacacctacgacgaggagagagctgtcgagaagctcttccgctgcgtccctgagaagtacaggcagatcgctcgctcgattgaatctctgctggacctctccacgatgtcgatcgaggaggcgttaggtcgcctcaaggtcgtcgatggtgatgagccacggcctctctcggggcccatcaccatcggcgggaagctccatctcactcgggagcagtgggaggcctctcagggtgacgggaggaagggggagtcatcttccccgacaggcggccataagccgcgcaaggcgcggggaggtgtccagctacggtgggcgcgaagacgtgccgagggtggcgcccgcagaggcgcccagggcgttgccaccggcaaccacaagccggcacgagacgacacctgccgcaactgtggcaagcttggccattgggccaaagactgtcgacagccacgacgcggccaggcccacgtcgcacgggtggaggaggaagagccggctctgctcctagctcacgcaagcatcgagctacctccagcggcaccggccgcagcggctttcctccaccttgatgagccgaaggtactcgtctccctctgtgacggctccagcaacgacaaggctgatgggtggtacctcgacaccggcgccacccatcacatgaccggccgacgggagttcttcaccgagttcgactccagcgtccgaggcaccgtcaagttcggggacgcctccggcgtggagatcaagggtgttggctccgtcaccttcaccgccaagtccggtgagcacaggctgctcaccggagtctactacatccccgcgttgaggaattctatcatcagcgtgggacagctggatgagaacggctcacgcgtgttggtcgaggacggactcatgaggatttgggatcgccgtcgtcgccttcttgccaaggtaaccagaggcactaatcgactctacatcctcagcgcgcaggtcgcacatccagtttgcctcgccgctcgtcgggacgacgaggcgtggcagtggcacgagcgcttcgggcacctccacttcgaggccctgaagcagctcagtgccaaggagatggtgcgaggcatgccgtgccttgaccacgtggagcagctctgcgacgtctgcgtggtgacaaagcagcggcggctcccctttccccagcagacgagcttccgagccaaggagcggctcgggctcgtgcacggggacttgtgtggcccagtgacaccggccacaccaggaggacgacgttatttcctgctgctcgtcgacgacctctcccgctacatgtgggtgatggtcctcggcagcaagggagaggctgcggacgccatcaggcatgcgcaggctgctgcagaggcggagtgcggccgcaagctgcgcgtgctgcgcaccgacaacggcggcgaattcacggcagctgaattcgcgtcgtactgcgctgatgagggcattcagcgccactacaccgcgccgtacagcccacagcagaacggcgtcgtcgagcggcgcaaccagacggttgtggggatggctcgggccctcctcaagcagagggggatgccggccatcttctggggggaggcggtggtgacggccgcctacatcctcaaccgctcgcctaccaaggccctcgatggcaggacaccgtacgaggcttggcatgggcgcaagccggcggtctcccacctgcgggtcttcggctgcctcgcgttcgccaaggagcttggccacatcggcaagctcgacgacaggagcaccccaggggtgttcatcggctacgcggagggctcgaaggcctaccgcatcctcgacccggagacacagcgtgtgcgcattacgcgcgatgttgtgttcgacgaagggcgagggtgggtatgggacaaggcggtggatgatggttcgactccgacgtacgacgacttcaccatcgagtacgtccacttcgagggagctgggggagtaggcagctcttcttcaccgagcgtgtctaccccagtccccgagcctccaccgactccaacaccaacacaccctcgggccacgacttcgactacgacgagctcttcgtcgacaccaccccagccggtgtccccacacgctccagcaccaacagccactcctccgggcacgtctactccgacgccagctcgtgttgagcgcagcccggtggagttcgttactccgctctcccacgacggggagcgcatcgacgcgtaccatgacggcgagcagctacggtaccgtacgatggaggatcttctcggcgaccagccggtgccgggactggtgcctcgcaacctggaggcgcagttgcaccttgcgtgcgacgacggtgagcctcggtcttttgcagaggccgagaaacacgcggcatggcgtgccgcgatgcagtcggagatggacgcggttcaggagaaccgcacctgggagcttgctgacctccctcgtggtcaccgcgcgatcacccttaagtgggtgttcaagctgaagagggatgaagccggagccatcgtcaagcacaaggctcgcttggtggcacgcggtttcgtgcagcaggaggggatcgactacgacgatgccttcgctcccgtggcacggatggagtccgtgcgactccttcttgcgctggctgctcaggaaggctggggcgtccatcacatggacgtcaagtcggcgtttctaaacggcgacttgaaggaggaggtctacgtgcaccagccgccgggatttgtgatccccggcaaggagggcaaggtgctacgcctgcacaaggccctctacggcttgcggcaggcaccgagggcgtggaatgccaagttggattccacgctcaaggggatgggcttcgagcaaagcccgcacgaggcggccatctaccggcggggcaatggaggaaatgccttgctggtgggtgtctacgtcgacgacttagtgatcaccggcaccaaggatgcagaggtcgcggcgttcaaggaggagatgaaggccaccttccagatgagtgatctggggcctctctccttctacctggggatcgaagtgcaccaggacaactccgggatcacgcttcgacagaccgcctacgccaagcgcgtcgttgagctggctgggctcaccgattgcaacccagctctcactccgatggaggagagactgaagctgagccgcgacagcacagcggaggaggtggatgctacacagtaccgacgtcttgtggggagccttcgctacctcacccacacacggccggacttggccttctccgtcggctacgtcagtcggttcatgcagcgaccgacgacggagcaccagcaggctgtgaagaggatcatccgctacgttgcggggactctcgaccacggtctctactacccgaggtgtcctggcaaggcacacttcgttgggtacagcgacagcgaccacgccggcgacatcgacaccagcaagagcacgagcgggattctctttttcctcggcgagtgcctcgttagctggcagtcaatcaagcagcaggtggtggccctgtccagctgcgaggccgagtacatggcagcatccgccgcttcgacccaggcgctctggcttgctcgactgcttagtgatctcctcggcagagatactggagcggtggagctcagggtggatagcaagtccgctctggccctggcaaaaaaccccgtttttcacgaacggagcaagcacatccgagtgaggtaccatttcatccgaagctacttggaggaagggagcatcaaggcgagctacatcaacaccaaggaccagcttgcggatttgctcaccaaaccccttgggaggatcaagttccttgagctttgctcccggatcgggatggctcaactctcccacaagacggcgcacaagacttagggggagaatgtaggaataagtcttggctggttggtcttggtcttgtggtgcctttttcctgcttttcagctttctaggacagcatctctactttcagtttggatgctctaggacagttaggacagcagtttgttgagatgctctaggacagtttgttgggatgctctgctctaggacagtttgttgggatgctgacagcaccctcttagactagcatggctgcatggctgctacaagcagctataaatatgtatccaatcctctttgggaggacatggcttttgtatttagtgaatgaagaaaaccagaaaattgccccatctcgagtgccatcctcttctcaatgagagtaaccattgaaattctaacacacatgactcaacgaggttgtttccaattgcacacattagccattccccttttcatgttctaagcttctataggctataactacttaatctgtccattctcttccttagtgtaatgacgttttcggtggtttttctttgggagaaggtgctatgcctataaagagacttgagattgagaaagtaaaggcccaggatgcagtcttagcttttaaaaatgatggaatcgggttgctgcacgctgcggcttgccagggccaactgaatgtttgcaagttcttggtggaggaattggggggtgacgtgaatattgctggagcacaaggtcattatctaacttttatcatcctttcgtgagtttgctggcttccatgtctacgtttggtagtatgatgtgtgagtatactaatgtgctattcatcacaggtttaacaccgtttatggcagctgctgagtctgatgatgttcctactgtaaaatattttcttgatcatggtggtgatgtaacaaaagcagatgttagaggatgcacagttctccaccatgctgctggcacaggtctcccttgatatgaacactatccatttccttgttatattatcaattatattgttgtacaagattctacgatactgcattactgttaatagattacatttaattcaaccatgtcgtcacagttatcttttattgtgtcgctaatctagatactattatagccccatcatttggcctaaacagccaaagaataagccaaaatttgaatttttgaacttgattttgaagttgattttgaaatgcttttaacgtaatttttgttaatgttggcttttaagtcgctacgaacaaatatacaaaagttttacttataaattaattttaattttctaataagccaaataagccattttggccaaatgggcaaccgatgggagccttagtttatatatcaccactcaaagttgtattggtttgctctgtatatacttggtcacatctcacatgtaatctattgtgatttgtccattgcactggtaaatgtttattcaaataactcaatttatatagtatttgtttccccatgatttatggcccatctcattcattgcaggatgctgtaaggtaacagagttcttgctttcaaaaggaatacctgttgacatagactgtggccttggaacaccactcttgcatgctgctaacgatgacaaggataagacactgaagattttgttggatcacaaggcagatgtatgtagttgctactatttcttatttcctcttcctttttttcactgctagtttggatagctagatatttgttttgctttccacttagattattagctgatgtacacttatgcgtgtttgcatgggactgttttgtttgcctggactgaaccattccaagatattgcagtgcataatccatacttttggttttttccacttttaacattttatggaggatcttagatcatatgatggtgtgatttaaaagttatatttccagatcttaaaatgatttttctttattatgttatgaaatgcattattgtgattattatatatcttaccctcgaggattatcctaactcctaaaattgtcatttggcctgctctaagtaaggttgactcatgatttttggagaaagagtatggaattttaagtgttcaattcatcacaccaataataaaaactattgtcctgctctatgagcttctcaactcttaataaatgaaatgcttttggatcattatgtcaaatttgtaacttcatctgcatcatttccgcccttctagtttgatattgacatcaccaaatgtccaccataatctcttccaatgcagcaacatcagtttggcttcatgaaatttgagtagctgtggttgtacctgtatctgaactctgaatataattattggtttcatgtgtaatatgaattttcctattgtaataagaaatccgtaaaatatgcacataatgcaatttgaattctttcaacagcgcaaattgctaacttgaatttgtaaaaagtggcaaatgctaatcaggaaaaaaagtgcagttcaagcattatatttatttcctttttcatccacatattctgctttcagcttttactaaggctaaactctcattttctgctttcagcctaacgtaattgtcaacaatggagcatgtagtctcctgatgagttcccttgtgtgccgttcattgaagtgcatgaagctactcataaaggtcaatgcttaattgagtctatatttgttcaactaccgctactgttttattttgttaactcaaaatatttgttgtggagctaaatattatattgcacaatgcttttcttaggctggtgctgatgttaatggcaagggagcacttgtgtctcccttgatgtttgctgcatcacaaggatgctatactaacttcattaagtttctcctgaaggctggagcaaaccctaatatacctgatgatgtatgttttctgttcttctgagtcacttattagttttccactctggtctgattacagctctgattattttagggagttattttagcaataagttgaggctgctttgactatgctagttgtattgcacttatcatttgaatattttattctaaaggtgcattttgtagtttcctatcattatcagagcctatgtcctttatttattgtatgtgtaagtatatcttgcgagtacagaaaagtttgtgcaaagcatggataacattttagtgaccaatgacgctacaaatcaagattatatccaaaaggccttttcaatgtccaaaattgccatggccagcttttaacctacacaccatggttttttttgggacatatggagatgtttggttgaaagccacattttgtgataatttgtcgtactctgaatttaatctgcattcaccaattttggtgtcttttaggttccttgctgaattacgctgtatgaaatgacttcttcattcttttgtgcagttgggttggttgcctgtggagcatgctgcattacgtgattgcagggaagatgttgaaaggctatttccattgacttccccaattccaaatgtcccggagtggagtgtcaatggaataatctctcatgcgaaagtcaaagatataaggccaatggtacgttatgtatttatgtacagtaatgctctttcagtctttccatactaaatattgtttaatgccacaggtttccttatgttattgtgaaaattagagttttatttgagtgactgacatcaagtacacttgagttgcggcataagaatgccataggcctaaccacaaaactatgaagaatgttggagataaagatgctaagtttctttattaatggaaatcatcctagataaatgttctgctattcaaactttcaaatatccactttggattgcattaaattaatggaaatcattgaccgttgaaataaagttttcatgcattcttcttaagcttgggaatgataacgttgtttatgtgatgtttgagcatagacaatagatcatgggccaaccacagttctgtacacaaacaggagcatttgtagattgctcatgggtgatggtgaagatgctcaatctgatggtaacagatcccgaatgatgcggcctaactgggaaaaagcttgttatcgttggagtgcaggtcacatgctactcaaggtaagattcgctgcagcttacctttttgtgatccatcatgtattatggtctgtgtcctgatttactctaaatctaggagtacaaacaactgtgggatgctctcatggatgcacaaaaattggatcctgggagcgttgaaattgagaaggaacaaaggtatcatcttctgtttctcttgagcatgttttccaaacacaatcacggttgtgcatggaacatgtgttaatactaagatgtagttgtgcccacatttactgcagctgaacactcaaacttttctttttggttttatatgccactcttctatctttgagtccatgtaacactttgggttattatgactgacatttaattgaatcgcaatctgattagctggcatattcaaatcctgcttatttgtctcaaaggagaataggctgctcattattcaaaaccattataggtatagcacccgatgagctctgatattgttgttacatttaacccataaattttctggttgaggcatatttctgcataatgctgatatccactgtatttcgatggctcctacagccttccacttttagatatgtgatctgtaatagccgtctgttgctggatctatattatgttgaggctttgcagtatccacattagtcaagtcttcttgctgttcatatgctattttcctcacatggaggaaaatgagggaaccatgggcttcattgtctgttaccatttttcactttgctttaatcattaagtttccatgacttgaacgattgtaatgaatgttgctacgtaaaacattgaaaataaaaaaaaaatgacagaattgctagtgttcattttaatgtatatatcaaggttgatgatgcagctgttgtacttgtacagggaatatgatatccaagaaagtaaagatgtaagtttacctgcacagctacttcaaacatttcaattacctttaatagctgttgtccaatttacttataagcttttcactggaactcattttgaatttgattgatcttttttatgtagtagtttagttcatttttattgagttcgaattccttttattacaaatggtgttggctttatggttttgaagcatcaaatttacaaaattggccataaattaatctatttaactatatttccttgtactatcaattaattcttattttaacattttttttcacctcccatctgtaggttgtggagtcgaaggttggcctttatgataaacccactgcatcttatggggtcaaacctccaaatgtttcatctgttatgggaaaaacacaagtaagtgttgccaaaatccccctactttgctctgtatgaataaatgctgttgtattgtatccttattattagaaatgcaatatgaatgttgattcctgatacctccttttaattacttaaatgcgcaatgtatttaagatatcatcatatgtttttaacttcaagatatttatcatatttatccaggtttttgtcaaacatccccatggaacgttatccctgcagattgatacatgcaaaaatgtggtcctttttaaacaagaagtatagaaaaggatgacgctggatgtttctggatccttcttcgtgtaccagatgagcacgttagaagcaggaataccattatcatcgtatggtatagaaaaggattcaaatatatatatgtgtggtaggcttctcggtggacagaggtttcatggaagcagaagagttcatggtagaagaaagttccacggtcgaagaaaatttaaaacactatcacaatttttctaaaagcatgggcatgagttcctaagggaagttcaacttccggacaactcaagaactaaggaactcactgagttgggctgtttggttctctccagtttgatacacttatttacatcggtgtttgtagctggaaagacatggaatgggaacattgacatggatggtttgattgttgttcatgggagagtcagaatcaagaaaaagccatggaaaggcctcaactcaagcaagatgaacagtgactgcaccaagttgacttcgatgataagagaaatgtttgtcaaaaaaaatgttcatcctccgtacttgaagcaccttcttggaaagttagaagctttagctgtcgatgttttcacagtgcgtcagcagcttgcttttgactatcatatctctttgataccttctctgaaccgagtaaatttggtgtatcaaattaagagatgctatgatggctgggatgacagagagaaaatgtacttcagatttgttgcagacaattgcacagtcccagaagattggtgcaatactttgatgtctaagcatttgtttcgcctagtgattttggaaggacagaagaggaacatcatatacggctccaatggcatgagtgcatttcatttggtgagaaattacaatactcatgcaccagaacattcctgggtaagctcgcccttctcttgtttctgattgtgattccagaacgttcctagatttcctatttgcgattctgattcaaaaaagaaagaggaaaggaaataatgacatgaagctttcttttgcagattcatgtgttcgtggattccaaaatagaacattaccaatggtttcaatgtgatagtggtattgagctaatggtcccaaaatatctaggagactttcttgcagaagctgtatttaagtttattgaagatgagtttgatttaactcatgtgtacgtatatttcatttcagttcaattagtttaacttttttttgtgtaggttagtttgaactaatttaatataaaaatttcttctgtaggttaaggacttgttttgctttggggtcctatgttactgactcattgtcagacagtagctccgatgaatcgtcgtcagagagcagctcgtatagtccctctcccaggaaaagaaagagaaggaattcagttagtcacagaaagagaaaatctcggaggtgttcaagttcttccagcagcagcatgtctgattatccacccaggaaaagaaagaaaagccattctaccaaaaaggaaagctccaaaaaatgtaaaattgagcactaaggtaagaacacatttttctgaattgtccgctgctctcttgtgctttaatgtctgatgtagcttttgcttttctggctctttctttagccaaatcaaaattagtgtccgggcctttttggattgctactaagggctagtttggattgttaccttgccaaaattatggtagggtagcaaaccaaacatctctattaaatcactacctttgccaaaaaattggctttgaccataaacttgtctcttatagtcatattttggcttcaatccaaataaatatttttaacttcaccctaccaaagttgctcaagatttggcactaccaaaattttgatagggcatcaatccaaacagacacttcttcgctataatttcacattttgtctccatgttggtaggaaaccaaatataaccaaatgcaattcaggtatattaaaagattgtgttgtttctctgctttcaggtattccaacactgctacgacacaacttccatgaaggatctgaatgtaacagccatgacaagctgtcaagtccatttgatgggatgggtgcattctggaaaggatagttgtagaatcttttaggacttatagaagatatttctctccatgagcccttgtcatttttcagtgcacgcatttcagactttagtttaacaactgtctgtctctgaatttgaagaagacacatttcgacttcttcatgaaccaaagtattaacgtattattcagctttctgtctctgaacaaatttgctccacactcacgctgcatttcttgggtttatccttatgagctgaaaatctgcatacttgataattacgctaactatttctgatggtataatgtgcagctaagaagctaaggcgggtgccaagaccgacgcctaaagcctgggcgtcatcatcctcatgctcctcaaccaggattttaggttgagggtatcagtgtcaactcaacactcatagcaacaattaattacatcctgtagtaaacttataacgagtatgaaaagtaatagaagaatgctatgtaactagatgaaattgaattgttatctaagtaatcgttgttctcaaataaaaaatccttaattaattgttactatttaaagaaattaatcaggtggatagcttggtgagtgagttagaacaaaattaagatgaaaatcaaatcggaagttggctatttttttggctggtaagggcaagaaaaaaaaactcactaacgctagtttcagaagcagacgttgcattggcgttgtcttgaagaaggcaaagagttaggaagacgtgtaggctgcatctatctattttacttatttagccaaagctcaaaaaacaatatattgaccggtgtcataaggcctcttggtgttacacgggaagtcatcgattgtccatattctctaatgaaaattattttagcttattaggaaaaaatattttataggtagatatatgtcctaacgatttaagagcaaataaaaaaaactacgttgaaaacatcgtaagatcaactttaaatttaagtttaaaaaattcaaaaaataaccttggcttcaaattaactagggcattcgaggag

SEQ ID NO: 6985 - DNA, 15455 bp, Oryza sativa
attcctgcagcccgtacgcgcatccgtgtttgagtcggtttttaaattcactcgcttttggaaatacagatccgtgtttgagtcggtttttaagatcgttcgcttttgaaaatatatagaaggagagtcgtataagaaatctcttttaaaaaactcgcatgctaacttgagacgataagattcctaattaccgctcatgattttataaaaataaacaaatccaagggaattcccatggtgaatttcaacttagctaaaccgtataatataataactaaaagaaccttcacccgttgaaaggcattttttctagtataagtataaagggaacaatggggccggatatgtgggccatcaaatctagcccaagcagtcatgctgcctacttctgcaaccgaaaattctgataggcccagcccaacctgatatagaagctgccctctctacggactaatcgcgggcctctctgaagaactaagattgcagagcttgcaggttcgtcagaccgttcgacaacacagattcagattggtactacacaactacacatccaaattggcacagatcaaattattcagggttcttgcctgcaaatcatgctacacatacatacatactgcagactaattcctcacactattgcccacacctcctgatgatcatgcatccacaattcccaatttctacccaaactgttttgcttacttacagagcgaagcaagaatgcggcgaggaggctcgaacgatcgccgggagtgaagcaccgcccagttgtcgatgagcaggatgtcgccctgccgccacgggacggcgacgcactcctcctccaggatctcgccgcagccggcgatgacgtcggccggcagcggcgagccgtcgccgaaggtgacggccctgacggggtcgttccgggcgtccttccacccggtgtacgcggccaccatgctgttgaaccatatcttcctccccctgctctcgtcccatttgaccgctggtatcgggcccatgatcgtcttcaccccgtcttcagtccattccagcttcatcccgagcttcgcagccctaagtgcaattaattgacagagtgacagttcagtaacttcagttagtagctgcagcatgtatgatacattgctacctgtgctgaaggtaacgtcagaattctagttcaagtgagaaaccctgtagtgtgatttgtgtgatggtcgatgggctgatggaatcggtgatgagcagctaaaatggcttgaattattgaaggtttttcatgtggctaattactgaatgtggtcatgcagaactgaactctgtagttccattggttctaaattgaatcatgcatgcaggtcaatgaaacgtactccctccagtttcaaaatttcgtccatcagttttatcactttatatcttttgtaaaatataagattatgactgtacttttcgaggcaaatctatgtatacaatttctattgctcgcaatctaagcattcgagaaattgttgatggtttgaattttaaaagtttgacagaatcctaaacgttaaatatttatgaccggagggagtattatggtggaatgcgacgatgttgcagtgggtttctgaatgcaagtgcaaacattcagaactcatgacaagattacgatatagcggtatatatcagtgtaactgaagatttcagaaaaagaaagccagacctttcctctgcaatgctcttatctttggtgagaaatgtagagtgccatccacggccaataggagaagacggatcatcaccctctcctaacaccctcgtgtatatcagcccatccttctccaatttctcaacaaattctggatacttttccttcatcctcttgtaaacgtagtggctcaacactatcggtgtctcaccaccaatcttcggttccacctcgcagaagaagaacagcttcgccggaaatgtcggaacctgaaccaaaaacatatatgaaatctcagcttaattttaaacattagtataagcttgtagcgaaagcattttcttgaactcgaattggattcgatttgctgtgattgtatggtggacctgcgccatctcgtggtggaaggggatcttctggtcgggcggcgactcgttggcggtgaagacacgccccaccacgttgctccgcggggcggcgccgccgacgtaggggagctccgcgtacccgaaggcgtccacggcgcggtcgaagtccgccgcggcgcgcgccgggaacccgcggagcagcaccgcgccggcgccccgcagcagcggctccaccgtggacgccctctccgaccgcacggcgtccaggaacgcgtcgaggccgccaccggccgcggcggcggcggcgctcgggacgagcaccgccgggaaggcgacgccctcgacgagccgctgctccgggagggcggcctcctggaagaagctccccgccggcgccaccatgttaatccgttgggtggtgtgtgcgcgagcgagcgagcgagcgacacgaggtggatgacaaagggcgttggattcgttgggattttttggtggggacgatgcatatgcttgggatgaacgtggacgggttctcgaacagtgtcgggatggtggcttgtactagctcagtcaagctggacgtcacacttgtcacgactcacgactcatgatgatggcaacgtgcattaccctggtgttgatggctactacctccgttcaatctcaaaagttagttattatattctggacggagaaagtattaaggatgtaagcggattaacctgtaaacattgacggacccagcctaaaattttagctatagcgtaacaacgtagagagtacactttgaactaaagctatagaatctactttctccgtttcacaatgtaagtcattctagcatttcccatattcatactgatgttaatgaatttaaatagatatatatgactagattcattaacatcagtatgaatgtgggaaatgctagaatggcttatattgtgaaacggagtagtacaaaacattgtacagaaagttatgttgcagattagaattaattcaaagcatttttgaaatttagattagattttctagacccgattgtgaaacgagtgctaagcatagtgaaacgagtgctaagcatagtgaaaaaaaatgctaaaattgttataaaaatcaaaatcaaattctaaggtttaaaaaccaacttccaattataaatacgtagtctcatgttacttatagtcataataaattacatagaacaaaagcttgatgaagtgccctcttctctctatcctctgtctccctcttctttctctccagccgacggcgcggggtcagagagggcgactgtggggcggagtggccgacggccagagcggcgtagcttgactcggcggggcagcagcaaggtggcgcagaggccatgcaggggaggtttgaaccgaggcattccagaggatgctcttcggtccggcggtcgtcgaggtgctgctgcttgcggccgaaagtcatggcgtcagggaggcgttgcgggtaggcgggagcaggtggatgcggttggtgtcaccggcattgcatgggcgtagagcaatgcgtgcgtggccgacgtactcaattcgtgggtacagtgaggccggcgtcagcagagtgggcgtgaggcatgggtgaggtccgtgtgccgggacgccgcggctgcaggctctggccaccctgcgcagcgctgccgacatccagcgcgccgtggcgcggggtctggaggactttgagcagcgggagtcgtcgtcgcctgctccgaccactgcccaccccgctccaccggctagagagagaacaggggatagagagaaggggtagtgaggataacgtgtgggtccgcgcgggcccaccattttttattatttgtgtgtgcaactgacacatgggtcctattgattttattattttttaatctaattgccacataagcactacgtcaataacacgttaggtaaagacctagttaaaaggagccatgtaagcgttaaaaccgaacacaatatggccgagggatcttatttaaacggttttgtatgctgggagacctgttatgccggttttgcgatgaagtgatgaaaatcggattaagcgacaaatagaaggaaccaaaagtgaactacacgactcggactctcccagcctcccagccaggcccagcaattgcgttggcacttgggtcacccgtatccgtatcgggttgcactcaagagtcaagagtagtttatcttcgtctcgcctttgttttccccttcgcgcaccaaacaccaaacaccaaaccctcgccgccgccgccgccgccgccgccgccatgcggatccccacgacggagacggagacggggacggggacacgcagccacaggcggcgcaagggatcgtccgacggttcgcgggccgtacaccggaccgacgcatcccgtcgcggaccaacgccgaccaaggaaacggagattcccgggcggccgccgaagcgatcctccttaaccctatcgttggacgacgcgggcgcctccaatccagcctcaacctgggcgatcctgaatcggtacggcgcccggagggattccttccgcggcgacgaccgcgaccgcaccacgtcggcggtctcctacacctccggcggcgaccagatctccgtctccttcgagctcgtgaagccgccggagacctccctcctcaccctcgactggccgcaggggccccgcccgtcggcgggaaccacatcctacccatacgtcatcgccgcgcacgacaacgtcgtcctgttccagatcatctcccccgacaagtacgctcgcccttccgccatcgactacttcgtctacaatgccaacagcagcagcagcagcaaccaccacccctccttgacgcggctgcccgtctcctactggaggaggagagacacccttcgcccgcgcatcatgagcagggaaggcacatgtattctgtcctgcagcaacaattctccttcgttcgttgtggctgagctcgagagaagatcatgccaatcttccgaaaccaacatctacctctttgcttctggctccgatgactggagagtcttcaggaatgtgccgatccgccatggcgacggcctcgctcacctgtgctggtggacaactgatgcagtgttgtcgtaccacaatcgctacatgatctgggtggactacttggtagcagggatgatcgtcgccaaagtggcacatccaggaagggttgacccaccggagcctgttctatggtacgtgccgcttcctgtcgatccagttgatgggaacccttatgacattgaccgtgggcgaggatgccctcaagcctcccgtagtgtgtgtgccacccaccatggcatcaagttcgtcaatgttaaccaacatggcggcggcagcagcagcagcagcagcagcagcagaagcttcagcatcaccctgtggtcgtggcgcgaggaggatcaaacatggggagaagatgcaacattggatgctgaccaacttcgggacctcgattctgagaaccgccttccaaatatccaacctgaattccccgttgttgacatggaaaacccttacgccgtttgcttcttgttgaacgagcgctaccacactgctgaccccaatgccacaacgtggatgatcaaggtgcacatgaagaagaaggttctactagattgtaccggatattccaacaaaggaagcccttctactgccagaaggatgtctgaggggctctccttcatctccagcgaaatgccatcttacctgtctagaaaaaccatcaaaaggtaatttcatgtctggtttgcgaaatgcctgttcacctaccatctctttattatgcacaactgctactgttcttggggttgcatgtcctgcagaatcttactagtctgaactcgaagtgaatttttctgcccaaatatgtttagacaatatggacatcgtggttgcttgatcagggcttgcatgattgttagatgaatatagaattgttcctaggatttaggtatttagcaccaccaacgtttcttgaaccttttaattacttggtcctggatcccgctataaaccatgctagtacagtttatggaaagcatgataaaaatcgatgtttgtttatatgtttctatttcatcttctcaaagagactccgcaatcgtgaactcttattattatttttgttttgttaatctaaccatttctctgaatcttaacttcaggcaggaggttgataagctaggaatatgacaggagattcaggaatcgtcttaccagtttgaagattggatgcatcaaaacgaccaggatgtgagctcctgcatgttaggctaaattatagatgttcggaaagaaatttggcagactatgacacctcgtagttggcagactatgacacctcgtagttgtgttaaattatgtatttttgctcgtataatctaaaacaggattatggatggattgtatgctatattattttgtctcgcatgtccatattatttttatatttttgttgctggggcactgctcaacctgagtactatatgagcaaacagtcgtattgctctacttgattactcgagtaaacaagtggtattagctgaggcattgaggcacaatctcggcgaagggatccgaattaggagagagacgctctctccccatctcgtgcttctcattagactcgttctttcttttctttccgcttcctttttttctcgagccctattgcgtattgcgttgagcgtgtgatgacttgtgataaatttataacaaaatgttgggatcttggataaatgggtttcacagatgggaacagctttacatgaactgaaaagtcacattcgaaccagttcgcatgtttctcaaatttgtatgcccttgccttccagactcgagcgagtcgcttttagcgcagccgatgaaaaatcattacaatgcgattcatatcataggaaaatatgcatttttagcattgccgtgcttatcaggacacgagccgtatgcagcgatgtgaaaagtgactagcaatcaatccatgattccatagtgcgcactgttccttccagagcaaatgtgaactttggctagcaaactgatgaaactcacaccaagccttctaaaatagcaaacgaattcgcaaacctaaaaccctgaaatagctattgcttagaggtgtaccaaacgaatttgcaaaccttgaaacaaagtgaaccttaaaacgaaatgagagacacaaaaggtcttcagaacgtcagcaaccctggcggattggaatatatacattacaaccttgatatatacatgtaaaataactgtatcgtcaaccttgatatatatgttaaaatgaacactagcaattctgtcattcatttccaatgttttacatagcaacatgccaacattcattagaatcgttctagtcatgaaaacttaatgattaaagcaaagtcaaaatgataacagacaatgacgcccacggttccctcattttccttcatgcgagaaaaatgggtgaaaatgacaatgtcggaactcattgggcactgaaatgtctgaataatgagctgcctttctcctttaagacaaacgagcaggatttgcatatgccagccaaatcagattgccatgcagttaaatgtcagttaaatgcatgcagccaatgcacgttgccatcatcaactcaaagatggaagaaaggcatataaaaccaaaaagaaaagtttcagtgttcagctccagtaaatgtggccacaacgtcatcttaataataacagtcatgttccgtgcacaaccgcatttgtgattggaaaacatgctcaagagaaacagaagatgatacctaagttccctctcaatctcaacgctcccaggatccaatttttgcgtatccaagtgagcatcgcatgcatgcttctactcctagatttagagtaaatcaggacacagaccataatacatggatcacgaaaaggtaataagctgcagaaaatcctaccttgagtagcatgtgagcttttgcccagttaggctgcatcattcggcatctccatcagacagagcaccttcaccatcacccatgagcaatctacaaatgctcttgtttgcgtacagaactgcagttggtccacgagtctatgctcaaacatcacataaataacattatcattcccaagcttacgaataacgcacgaaaactgtatttcaacagttaacaagcaaccttctaagacatcacaggtttcaagataatggtgttaagggtatagatgtgaagggtattttgttagggataaggctgctagggttaggatctaggctgatacggtatagatgtgaagttacaatactacccgtcacatctatacccttaacaaatggcagagtaaaattacttctaaaccatcagaaataaggtgcaaggatttaccaaatcatatacttttgctgcacagtcgtaattcttctgcctaaatgccaaatctgcatgcgacttcaaaatagcttttctactctcctgatgttgatcctaaacaatgaaaaattcttatgcaatccaaagtggaaatttgaaaggttgaagtttgaataatagaacatttatctaggatgatttccattaacaaagaaatttagcatctttatctccaacattcttcatagttttatggttaggcatatgtggcactcttatgctgcaattcaagtgtacctgatgatatcaatcactcaaatagaactctaatttttatcatttacagaagtcacaatatctgatgcttaataacgaaaagcacccctttttcgttttcacactcaaattcacaacttgaggtccaaatttaactttccaagtagtcactgacaatcaagtcaacagacagatggcccaatatattatttatgaagagctcaagatgccacttatatttattaataaatacttttatttggaacagaccttaaagtcaggttatcaagtactctagcaaaattgaaggtttaacaagtactcgcaaagccgagggacaaaaagggtctgctctactttaaaggaacatgcatgataacagagcacataaaatccttctctttagtgctattaactgttgttgatatgtaagttaaaccagtgttacagcctaacaagcatcaggtaaccacataaatgagacgggaaatagagctccgtgatgcaaagtgcatggtaagcaacagaaaatatgtgcagagagcatagcattaaacaaaatttagtactccctccgttccaaaatataaggcataaccacccctaacccaaagaccaagaaaataattattatcatcttgtagtttggatcatcctaataaatacaatgcatgcatccaatagaattagagaacatgagagtggaggatttaaaaaagtaataatttaatggagaaggggtcatagttaattgcctacatgcatgcacgcattatattatggaacatctagaaaaagtggttgtgccttatattatggaatggagggagtatgaaaaaagcaactatatataacttaccgttggctttgtatggttgacctttgcatgagaaattattccatcaacactccagtttgggacatttggaatttggggatgtgaatggaaatagcatttcaactccttccctgcaatcacatgatgcaacatgctctactggcaaccaacccaactgcacaacagaagggagaaagtcatttcatttcatacaagataattcagcaaggaacctaaaaatgccaaaatcggtgaaacctggaattgtttgtttgcagctttcgaacaaacaactccttatgtcccaaaaaaccatggcatgtagttaaaagctggcgtgagatttttggacattgacaccatgacatggctttcttacaaaaagggaaaaacagtagaaacaggctgtagttgtggactcactgatcactataagggcattcatgctttgcacaaactttttccactcacaatattatatacttagttacttacacatacaataaaatacaagaaacaggagtcaataatccatagaaatctacaaaagtgcattgttggtataaaatgttcatatggaaggtcatgaaagctatctctatggctaaggattgtctatggataagtcaaggtagcctcaacttgttggtaaaacaatcagagctgtaacagaactccaagaataacatacttacaacattgggaatattagggattgctccagtctccaggagaatcttgatgaagtaagtataacacccttgcaacgcggcaaacattaagggagttatacctgtacccttgttattaacatcagcaccagcctgagatcatgaaaagcattgtggatcatgttttgattagcaaaataaaagcacagcagtagttgaacaaatacagactcgataacacactggcctttatgagtagcttcatgcacttcaacgaacagcagtcaagagcacttatcagggtactacaggctccattgttggcaattacgttaggctaaaagcagaatatgtgaaagaaaaaggaaagaaatacaatactttaacttttttttttctgatcatcgtttgccaattcttaaaaacgagttcagagttcatgaagccaagatggagttgccgcattggaagagattttaatgcacatttagtgatgtcaatataaaatgagaaggtcggcaatgaagttactgaaggtacaaacaatgacatgataatccaaaagcatttcaatcatttagagttgaatagctcatagagcaggataggttttattagtgtcatgaattgaacgcccaagttttcactctttccgccgaaatcatcacccaagccttacttagagcatgccaaatggtaatcttaagacttaggagtattactaaaggtcaagatgtataataatcgccgtctatgtcaataggtattccttttgaaagcaagaactctgttaccttacagcatcctgagcgtgaatgagatgagctataaatcctgggagagagatactatagaaattgggttatgtgaataaacaatgaccattacaataaacaacttggaacagattacatgtgatcaagtataaatagagcaaacttatataactttgagtggtgatatatagaaactaaaggtatctagattgccacataagaaatgattaccttttttttcgaagggcaggaggactcctcttttcattaataaaggaggagagaaatggtttatttgcaggcgtttgctataaatacaaggacataagaaatgattacggtgaagctgtgattgaaacatactccattaatagtattgcagtattatagagccttgtacaacaatacaattggtaatatatataagaatgaactggatattgagggggatctgtgccagcagcatggtggagaactgtgtgcatcctttatcatctgattttgttacatcaccaccatgatcaagaaaatacttcacagtaggaacatcaccagactcagcacaggccataaacggtgttaaacatatgtgataaacagcacattggtatacttcacatcatactaccaaacgtagacatggcaaccctgattttgcaaaagggtgatagagtaagataaataatgaccagaacgcttcagcaatattgacgtcacccactcaccccccaattcctccatcaagaacttgcaaacagtcagatggccctggcatgctgcggcatgcagcaacccaatcccatcctttttacgagctaagactgcatctcgggcctttcctttccccatatcaaggctctttataatatcttctcctaaagaaaaacacagaaacgtcatctcattgaggaatagaatggacggattaactacctataacacgaaaagaaaagtaacaaatatgtgtaatgtgcaatatcctcactgagtcatgtgcacctatacactcactgggtcgtctatgtaaacctgtactttgcaacttgaaaacatttgttcagattactacctgactacacatcacaaacagtcacacttggaggcgtaaatgtaatagaggataatcacaacatttgtcgcatttatcgaaggcaaggaagcctcaaatcttgcaatctctagataagataagttggtaattcatggacctgggaattaaacagttaaaagctttcacaaacgatcaaatccatctagagaacctagaaatacggaaaatagaatgtggcaaagttctgaaggcaacgagagtgctagatgctgaagcgcagctaggctaaaacttttccttccatgttcaaatcaacaatacaaccatcgatgcaaacgcaacacaagtacacaagcatcactcaaacctaagggcggaaaagcacacaggagcatgcaaaaggggcatcccctcatttgctatctaaatggttatgaaacaattaagaagatagattaaaatgtgatatatcactccataaacatgtattcaacttttacaagtccaacgagaaaaaaaacaaattaaattacagctagttaaagtaggtctatcacatttatcttattaaattcttttagaaaaattataatcattatagtggcacgtaaataaatatgtttagaatagtttcccatcatgcctacacagatcgatcgggtgggatggacacggcgaagatgaggagaggaagcacccttcgagtcgtccgaggtacccatctaaggccgccccaggagagcgctcgcacctgcgaacaaagcgagaaatcaccattagacacaggccgaggagcaagccccccgactaacgcgcgaccgcgacgatcgaactacgaggagaggtgcggcaggggaaggctgaacgaactggtgccgctggtgccgtcatcggtcgggcggcggacgaacggcgccgccatggctcgccgcgaggaggacgggtggggtggggtggggtggggagcaagaggagacgacgaggagcgttgcgttgggggtgggtgggcccgtggcccgtgggcggtgtttggccttcctttacttcgggactgtttatttcgcgagaagaaaattgctaggtgttacgtaagatgtttttactggatttcgaaagagtttccggatataaataaaataactaattttataacttatctgaaaaccgcgagaagaatctttcgaacctaatcaacccgtcattagcacatgtaagttactgtagcacttatggctaatcatggattaattaggctcaaaagattcgtctcacgatttttcacctggttgtgcaattaggggctgtttggttcacatactaacattgcctaggtttaccatgctttcttagccaaacttgtcaaaggtgaggccatcaaaatccaagccacactctagccaacaaaatgaaaccatgccacactttttagagacatttacatgtgggacctagattacaaaagagaaatcttgccacacttgtggaagccaaccaaacactcacctaacatggtcaaacttgtctaacctcaagtatggcaaagtgtggcaacttatagccatcaaccaaacagccccttagttttttaatctatatttaatgctttatatatgtgtctaaatatttgatgtgatatttttgagaaaaaaatttgggaactacaacaggccttcattagtcgcttcgtacggaaacgcaaccaagggtgtgggtttttccggtgcactagactgggtgcactcgtggggcgggtgtaggtagacccggttcatggagccatttgcccggtcttgagttgagacaaggctcgatatacatacacacacgcaaaatgcacgtatgtggtaacgatggtggctgaagtttggacgattaatctgctttatatttttgcgggcgagcgccgccttcaacctcgccagttgctgccgccgctccgcccgtcgtcacggcgctcgcccgctgccgcactcctcctgcacttgctcgccatcgccaccgccactcctcccaggctcgcccgctgccgcatctgtgatcgcgacgacgcgccaccgccagagcgagacgaggaggacatgctcacagtggggcccatattgggcacactggtctttaataattgtttctctctcctattcctttaaaaataataaaataatcatgctggtgtccagcagctaattgctagtttttttacgatgccttacagcaaatacaggtttatgatgtctcctagttaataacacgttttttggatgtcctgtagcattttttttgctaaaaaacaatgtactaatttgaatggcaaattttgctacacgacactgtttatgggttttagccctaggacactgcctaaactcacttttgggagaaaacactccataaacgtagtaatttgccagtggatccgcttcgattaaaataatacttttcggttgaagaggtgagagaaatcgtgtgaaatgtaaaaaatgcccttggcccacatgtcagatctatctcctatctctcttatcatctctctctctatatatattctctctcagaagcccacggggcggcgtcggtcgcggcggagatggcgaggacggcggccggcgaagtggagcggggcggtggcggcggcggtggacgagcgtgcggctggcagagcggcatcgttggtcgagcagagtggtagcggcggcgagcgagcgcggggcaggcgacagctagcggcgtgcgagagccgcggcggcggcggctggccagagcggcgcacaccccatggcgacggcgatggcgacgcaagctcctaccatgcccgccggatggtgttcaccgagaagcgtcgcggccatggtgacgacgatgcaagctcctacctcgcccgccgccgcgtccgggcgtggctccgtcctccccctcctccgtggccgcctgtaacattctgaaaattcgaccaacaaaatcaaagactccaaaaattcagatcttcaaaaaaaaactttttaaataaattgcatcatgccaattttattcgaagattttattggattttgatttcggatttcatcgatcacaaatgggaggaaattaactaggaataaaccctaaaaatcaagtgggctaaataaataattaaaatataaattaaaataaagattaggtgggtttggaaataaataaaatgttatcgcaaccatattaacaacaattaaattttaatacgatggaatgagaattaactttaattaaaaattcaaatgaattatataaacaaaatatgagtgatattaaattaggtgaatctttagttagaataatataaatatggggtaaaacttcatttatgcaaaaattaagaatttcggaatcaaattcatatgagaaacactctaaaatcggtttattggaaaa

SEQ ID NO: 6986 - DNA, 24863 bp, Oryza sativa
  unsure (1)..(24863): unsure at all n locations
aattcctgcagccctccgtcaattttcaaaatggaaaattatttttgtaaaacttttaataaaaaaaattataaataaaaagaattgcatataggactactactcagcacaatgaggcccaggcaggctgacgaattctcgcgggcctcacacgacgtactactactctgcagcattctcatgaaaaaccttgtaaaattatcgtcgaaaccggttcggattcggtctcatttggaatgaaatgctcttatgaaaacttcacaaaaatttcattggaattggttcgattcccgcatatttggtcccatcatctagctatattgctgatgaaaactccttgttttcgaatcaccatctctctaaactagtgtaataatctgtactcatatagtgtagtactagtagtatatagaaggctaagctagaagtggtgatgcttttctaatattttcaagccgaatcttcccaacggtagtgacgactagatcacttgacaaaatcccaagtaggaactaaccagtgccctaatttataaagtaatactatgatcaatgcccaactaacccattgttacacaattaactaagcagtgttaatggactataagaaatacaatcttcctaccatagtttaatctcaactacactatgtgccagaagtcatgtgttcatcttcatcaggtcaggagtagaatctgcttaatttagctacaaaagtagcatcaagatcaggggatcacatagccacttaaaaaattcaaatgatggggactctctccagttgataattaattgaagctacttcttcagacttaaactagtggggggcatgcacttgacccaaactaaagcatccaaactttttgaaaaaacactagaaatatactgcactgtagagtattttactttatatagttctgtagtgtttaggacacagataagatgcatgactgctaatgacaaacggctatgcaatacttactcataaagccgcctcgattcacgtgctaatcactaaattagtggagcaggaggagtagcagaaggattcattagagtgagagctgggttagtttaattaatcaacactacacttagtttgacatcattggctggaatcaaatcgatcgaatggccgcaacgacacatgaaaccaaactgtcagcagcagcagcagcagctagcattgctgggctcgagatgcagaagactgaagacccagtgataatccatagctgaagacacacattttgtccatgttttgccgtttgaacaagcaacttaaactgtaattagtgctggccgtattcatgaacagcaatcaggtgtcaggttaggcagtagggtttacgtctccgatcacccaaaaacatggccaagaaaacaagggacaacctacacgacaagatcaaccaacaaacgaacaggccaaaaatccataattattcagcgatggtaattaagaacagtagaacgtgaccaagtccggacatgattagtgacaagcaggggcgtaatcaggttgatcacgttaatttaattgtggaactacgcgagttttacgccaatttatcgcagttttttgaactatctgcgtgatgatggatcgatcaagtggtcgtaagggaaggttcctacgcgcgtgattctcgttgtggcacctgtgacatgttgacatcaccatactgatctcaagaaaagcatctctctggatcaacggtcctgatcttcttgtgcaattaggcaaaattcgttataccgtactatatccgttctaatttttagctataaacatggatatgtatttatttaaattcgtagataaacattgttatattttagaagggatggagtactatttaaaatcaaaacttaaaagttgttcatctttaagtagaaaaaacgtattcatatgcttcatccgtccttaaatataagtgattttggtggtatgtgacacatcctagtatgtccagattcgttataatagaatgtgtcacatcccacactaaaatcttttatatttagggacagatagagtatcaaacatgaatccacaattttcaaatgatgtttagccacaaacaatattcaactcaatatgttaattttccatcttttgaaatggatactgtagagtataccgaagctgcacatgtaaggattgctcatgtgactacggtgtgtttggggtgttgaccatgacgacttttatattacagtaactaccaatttattacaagtaaaacaaatatatagatgtacggcgctgcagcaattagtaaaaacaaatacacgtatattctcagtactcgagtggtagtatactatactgatttttgtttttcaaatttgaaggacttgctctctttgcaggacactgttggttgggatgagaatacttcaggggatacaggaccgttggatctgagtgcagagggagacaacggaaatgagccgttgtttaatgataccgatgggaatagaggacgtgatggaatatgcccgtctcatgacaaatggtaccttcaattcatcctcactcacactgtcccagtacacttcctgtccatcactctatgagcaacttgtgaatctcatcagtaccattgtttttttttcttttcaatttgagtagtacaatcaccacaacaatctcatttgatagtttaatacttctacctctgtctcaaaacaagtttattttttatcccccgtttttatcaaattcccaatataactattcctcattttatcttctcctaattctcatacttgtacaaactccaaatacaatgactactttataaaagaacttattttgggacaaagggaaggagctaaaaatgaattcaatacgaggcggaggaagtagtatgggtcactataaatgcttgatgaccgtggaagttttttttttattcggccagaattaggctcctttggaacaaaacggtttttaaaagaaattcaattccatggaaaaaatttcctaagtgatcctttggatcaaatgaatagacatcaaaaaatcatatgcgatttctttgggtctgctcaaaacataggaattttgattttttttttaacttaaggtccaacctattgggaaaaaaagaatcatatgtgcctatctctttcctgcttacattcagacggtcatttttagagttttttttaattcataggatttgaagtgctagggcattctaagtctctaattatgtaaccttttttaactaatttctatgagtgtcgttaatcatgtgttccaaaagagtccttactttagagtttagctctttctctcagactcggaggagaattattgtgtattgttggcctccatatatagtagaacagtcaggagtcttgagagttgagaagcagtggtttaccatatagcagatgtcagtgatttgagtccacttatcttcaatatatgaacttattagatcttgtgcacaatgcaatagtgttatacacaaacaaaattagggtcaaaagcaccctttctagctttactacaactcgtagatttcagtatagactcactgattatagacaactactgtagtttagaatatgatatgaaaattattccttcatatgtgatccattttcacccccctaattcacacccgaaagtgcaaaggtaaagagaaaaaaaaagagtcaagccagacttgcatcagggccagttgacttgggatgtgttcggcaggatacgttggaaactaatcctttcgaaaaaaaagaaacagatcattagcgaatgatttattaagtattaacttaaaaacttaaagaatagactatatgatttttgtaaacaactttttaatagatttttttttgcaaaaaaatacattatttagtagttcgggaaatatacgtgtgaaaaatgagaggtagaagttggaaaagagaagagaagaatatacttaacctagaaagtttccacacgagcatactctaaaattgccagtttcagactattttgagtcatcagtcgggttgggcatgcctgtgaaggtcttatggcagctgtagtatcgattcggcgagtttgttccaccgaagttaaggccccgtttagttccctaatttttttttcaaaaacatcacatcgaatatttgaacacatgcataaacattaaatatagataaatgaaaaaactaattgcacagttagggagaaattcatgagacgaatcttttgagtctaattagtccatgattagccataagtgctacagtaacccacaagtgctaataacggattaattaggctcaaaaaattcgtttcgcggttttcaggcgagttatgaaattagttttttattcgtgtccaaaagccccttttgatatccggtcaaacatccgatgtcacatccaaaaattttcttttcgtgaactaaacaggccctaaataaatttggaaattgttgtacgtacaactttttcttacgatcttagtacgataacggcgcgagcacatgacgagcacacggcacatgcgcacgcggcagtcaagagcactcatgggctaggacagaaacgtttcatcgtataaacatcgtacaaaaaaatcgtacgtatagcagcggtgaatcaattttttgttagatccccgaaacgtcagaatcgattttacgagacccacccaaaaaatatcccaatcacatctttcccctcatcctgcatatctaaaagaatttattcgatgtgttcaacttctctttgattgaaactattcggttctcacagtgtataaggtttgtttttttttcattgtacgtaatggattctaggttcacctataacaagggtttcacttatcgcacgataatcacggtgattgcgcttatcacggggaaatcggcgatatagtttaggtgaattttgaccaaattcaaaattccggaaaaaaatcaaaaaaattgaaaaaaaaatcattgatgtagttcttgatttgtaattgacaatagtgaagaatatttttgaaatagtgtaaggtaaattcaaatttgagggcaaaagcgaaaatagtttacaaattggaaaagggaagagaatattaggccttaagtatccaacatattcttccaattattctcaatttatagttttctacacatattcaaccgtattttttattttgttttccctatttattttacattaaatgatttcagctacacagcccatgataatcgtgcaaatattgcggttatcgtgataaaccatgcgattatcgcggtgaaaccgcaaaaccgccaagttttgaattcgaatttttggatgtgatttttgtgcgattttaggcggtaagctcggcccaaatgataaggtaaaccctgcctataactgatgttaagacggacggtcccaacttcggtgttgtaacatcccggcctagggcttaataggattaatagaatacttatataaacaagttgcaacttcttttctggaagccgatctctaaagaactccgaggttaaagcgtgcttgacctggagcaatttagggatgggtgaccgatctggaaattcttcccgagtgcgcacgagtgaggataaagtgtgcagaaaagacttgtgttggtctataagggcagtctatgacctatgaaagctgccagatataagcgggcccaacctgggagaggtaggacgttacaggtgtcctgtacaatttgcagcacatactacacgccgtgaccgtgctagtatgccatgcttgggcacaccatcgcattgcacatagtcgattgaattgtactactagtatagcactacgtttctttgtcacagccacaccaacaagccgctattactccattccaaaatataagaatatggaccaacagtcttttcaaattcgtaatactataaaatatcatgtctggttcaagattcttatactctatccctaaataagtactagtaggagtacatcttgtataggatgtgtaaatgtcgtagtaatacagatttgaatagtttttctccgttacgaatctggacagtaggagtagtatgtgtttggctgtgtttagatccaaacttctaacttttttcatcacatcaacatgtcatacacacataattttttagtcacatcatatcaatttcaacaaaactttcaactttggaagaaactaaacacagcctttgtttttttaccagggtgtaatagaagagtagagtacgtgcaccgtaggagtactctatttagagtacgtgggcacgtcgggcatccgtacgcagggagtagattgagcggaacagagacaaggagtgcaggagggaggagacgagacacgcgacacagggcggcaacaaagatccagggcgtggggagccgtgcatgcgtgcgaagtgcatgcgcaggtgtcagtcgggagtccagggcagggcaggccggccggtggtcaaatcgcacgtcatcatgtagcagtacactcctctgagctctgctaccactagccctgtccggactccggagtagggtagctcgtcgccttcgcgtctcgtctcgtggactctgctattcctggccgtcgcatgcatgaacccaccggctggcctcgcgtcgtcggagacgatatgaatcatatcgcaacctctgctactcctactcctactccacccgaagcgacgaccaccaatacggcgctctgaatccactcgtcggcgcgtcgcaccacgactcctgcatgctcgcctgcctgcctgcctgcctgcagcgctagcctgtgtgtgtttatatccttcgttttgtaccggtccggctacccatgcacgctaggccaagtgtgcgtgcatgtgatcctctttgccaaaatgcatccagtgagatgatggtcgcacatgtcgacccgggcgaggcggtgtcacctcgatggatgtccagccctcccagtgtcaccggaaccgagggttgagggatgccacttccatcactactgtaatcaattacgattaagagcagatacagtgacagactattagctaactataaacatattttaataagataaaagatgagagagaagagaaacggtatacagatttatagccagctgcagcagcacggattccaagacacattatgtgtatgatatgtgtgaccatatattaatagtatagtaagcaactatattgtatgaattaactattacaatggctatagataaattagaggtagtagtggactatactattaaacttgctctaataagcttgagctaattcctaccaatcctgacaccataagcttgcatttgctagtaatattcatatccatatttcatactccactgttactactatgcagtactttctccgtcctaaaatgtaagtacttttaaggttggcacggctattaaaaaagtaggtgataatgattgaaaaagatgtgtgattggttgaaaagagaaagtaggtgaaaaagaatggttgtgattggttgagaggagaaggtgggtagaaaaatagctttattttggaataaagtactgtgctagaaatagctacattttaggacggaggtagtattccaattcatcactgcgtgtgtgtttgtgtgttcatcatccacacggacactgcgacacgcagcaaagctgcaaagcagagccaatgagccatggcaatgccactgtgacgcagccattggagaaccggatcgaactagtattgacctaccagcagtatactccctccatactcataaaaaaatcgtttttgacagcgacacggtctccaaaacacaattttgacatcttgtttctataaaaaaatttattgaaaagtgatatgtatacttttattaaagtatttttcaagataaatctattcatataatttttacattttcaaacctaacaatttaaatcaataacttaaaagttattcatgatttatatttctaaggtttaaattaaacattattctagacgactcctctactaacactgagggagtactgtactactatgacgagtgtactgtgtaccccagtcaagtccttccaggagagatcgagtgcctttctcagctatcaaatcagaacctaatcattgccgaaaagaaagataggcgttgaaaagctagagccagagaaaaaaaagaaagacaaaagtatgacctttcatatcaccactcagctccgattcattcaccacctgctacatgctactcctactactcctaccagtatactccagtagtgtgtgctcacatgcaatgggcttgtgtgcagcacatctggctagttttacagtttttcaaatcctttaaaatccctaagaaataagcttaagagtactaagaaataagcttagtagtatatgtagattttaaaagaaagttaacagaagctttagaatctttaaattttgttttttttaatctctctctcattcgattcgtatgatctactcctatataaacaaccgtatttgtagtatttgatatttggattggtgccaattacaagccaaatcccatattgtagtgaggaaatttctagaaactgtgccaaatttaacatggatataaccaactaattggcttcaagccaaactatcgcatttactatttaaactaccaaaagattggtatgggcacgttttgacatcaatccaaacaatttttatatttctacctttttatcaatcctgagtttcagaaaaactcttactgataattagattgaaccctttctgataattagcgatctaattagttacttcatccatttccaaacgcaagcgattgatttgcaggttgttttgtactagtactatcgtaatgtatatttgtgtacagatttgaatcctaagaaagagtaattgaaaacagagggagcagtattattaaccattacctagttcttcatggctcatgctggattctgctgtgtccataaaccggatggtccatgactgaagtaacttaactacgagtatccaatctggtttacatggagatcttccatgcattggacctactgcagtaaaagggacaatccctgcgtatactgctggagacatcgttacaattcattcaattctatacccaggatatggggggtgtggtgattgccgactttttttcactgcgaggtggactagaaaataggaagaacagccaattgaatggttcgatccaatagccagttgaatgtttcgatcggccggcgagtgtgctgtaacagtgaaaaatcggaatctcgtcgagtgatccatccgttgggtttgtacggtgagcacagttccgttaagcagttaccgagtccccattcgccatgtgctgtaaagtggttgaagtttgaggctcccaacttcccatcagttgccttcactccttcagcatagtataagccataaccgtttattattgataaaaaataatttaggaataaaactttgcatatgtggtgttaacggcttaagaatcaaaagttcttaaaaaaaacaatggcacgtctaataaggattaacatgataaactgtgtaccaaccaaacaacccctcgtctctataaccgaaagaaaaaaaaagaaaaattaattagagtagcaggtttgacagagtcatgcccaaccaaacggtttcagccacatctacaaaaagagagtggagtgaattagactgttttgataaaatgaatcaaagaggtgtagttgctattaggttactcacaactgtactctagaaccaactcttcgaactaaaatttacttcatccgtttcataatgtaagtcattctagcatttcccacattcatattaatgctaatgaatctagacatatatgggtctgttcggttcagctggactgtggctgcacagctacagcgctgcagctctcctagcataatcttgcttgttgagtaatgtagctgcagcgccgctgctgtcacagccagctcttctgaacgcaccctatatctatctagattcattaacatcaatatgaatatggaaaatattagaatgacttacatcgtaaaaaggtggaagtaagagctacagctctagctacatgtacatcaccagtacccctgagctggaactgggaggaacaaactacggcaagtggcagcagcggcaagtacccaacccagttcaaaacacacgacatgccaaacagttgtaagcagctagcgatcgatcgatccaggatgagtgcaagcctccaaacgagcgcaggcaaagggcacagtgcagcatcggaattcttccgctccccggggaggcaaacgcatgcaggcacgcccccctcatgcctctacagcctccccggtcggtcgtcgtcgacctcgcccggtcacatgcatgcatggcaacctcgagtcggtccaaggccatggtggattggtggtggtcggctatggtggtctcgtcccatgagtgactagctcgcttgctgtgacgagacgtatagggcttgtttgaagaagtttctagctgctgtaacttttctaagaatcagaagcactcttaaatggtacggcttttggtttgaattctaaaaaattatagcattagaatccagaaaataaattagaagctagaaaatgaacttctcttacaattataagctcccctaaacagttttttggttcagattttaaaaaattgtagatgtaaaatttaaaaaataaactaaaagtcagaaactggaaacccaacttttctagattcttaaaagcttactagcaaccatctgcctctcagtaaactccccaaatagggtatagcatactgctggcctctaccattcaaatcctggctggtcaatgccgtttaatccgttacctttccggacttgttttttaaaaaaaaacaacgggatttgatttgctggccttgaattgataggggaatgtacatccaagtgcactgttaaatcagaggggaaagaagtgggattttttttttttgtaatctcccctccagctagctcaacgtacactttgcctgtcacttgtcagtaacaagctcggagacgacggcaatggcggagcacacgatcgccattgccatcgatcaaacatgatcgatcgctactatgtcgcatagaaacagagactaagaagaagaagaagaactagttcttgtagtcctcttccttcttgcaatggcgaacgctgttcagatcaccacctcctctgcaagaagaggtcgcggtccctctcggcggccggctccgacgagcggtcgaagcggctgagcacggcggtcttgaagttgaacgcctcctggacacggttgcacgagcgctgcatgcccacgccgctcaggctcgccctcgcctccagggtcacctcgctcagcggcaccctcttccgcgcgccgccgccggtgccgccggcgacgcccggctccggccgctgcttcggcgcgctctgggaccgcaccttcgcctccgacgattgcgtgctcgacatgtagccgcggcagttgggcgacgcgccgtagccgccgccgccgcagacgctcttcgtcggcgtcaccggcatgtgcgcaagccgcggcgtgctctgcgccgtcgccggcctgggcttctcgagcgggcaccagtcgtactccgggaagtggcgtgcgctcggcgccgatatccgcggcggcgcgccggggagctggtggaacgggaggagcggcgacgacaccgagttggcgtaccactcctcggcggcgccggcgtcgaccacgggagggctcgtcctgaccgacgacgacctcgacttgggccgcccggtgtccatctccacgatcttggggctccggtcgtacccgtacgacgacgactcgatgctcgccgacaggcggcggctgtacgccgccacgccatgctcgctcctcgtgtcgtccatataccgctcttgctgcaaacacaagaaacccccgaggtaagaattgtgtcacagcaaccaacatgcctcggacgaacacctttaaaaaaaaagctcgcccgcttcgcacgcaagcgatcgtggtcgtactcgtaccagggaatagcgcggccggacgggagggtggtggtggaggtgcagcggcggcagcgcggcgccgcgcgacgagcgcgcggcgcggacggcggcctgcgcgcggacgagcgcctgcatgctctgcagcgtcgccgccgcctgccgcctcaccaggtagccgcgcaccagcgcctgcagcttcaccagcgccttgagcgctcgcagcgccttcttcgcctgaaccaagaacaaaaataaaaatctaatcatgtcttaatctatgagctttttttggaaaaggaaatctactggaacagtggatgaaatcgaaatgagcacgtcgccaaagaagacgaacagatcaagaacagaagcagacactgttgttcttggaagaagtgaggaagttgttggggctcactcaccaagaatcctcggaaggctgtctggatcttgaccgcggcggcgcggccacggggatccaagacgccgccgcagacgaacaccgacgaggtgggtggcccctggctggtgaggcggacgacctcgacggccgcctgtgccgccgccacggccgcgtccgccgcagccgcggtcgccgcggcgaccgcgatggcgtgcttgctctgctccctctcggtgtcgctgtacatcgacttgagccacgccgcctcggccgccttcgcgatcgccgcattccctcccaccgccgccgccgcctccccctccgtcgagtccctcgacgacttggcgaagctccaccgcttcctgtccggcgggggcggcgccgcggccgtcctcccatgttctctcccctgctccttcttcccgccgccgccgccccacaggctgcggaaccacctcgccgccttgcccatggccggaattcgcgactccggccggcgagagagacacgccgcgctccaagaccaggtcgaacacttgagcaagaaggcgaaacgggtcaagtttgaataagagagggaaacgcccgggagggaggagcggggttcaaataaaaagaaggggagggggggtccaatacaagacaaaaaattttaaaaaataaaggggaaaaaaaactatccctaggaaagaatcaaatcaaaccaaatgcgaccaaaccaaatcgaaatacgaaatcataaatgatggcaataaacaaatggcggtgcagctagcatccaagtgtgtgagagcatgagagaacaaccaaagttgtagtagctcaccattcaaaaaaagaggctgtttcaaaaagataggagtacggtagggggggagtatatccactcccacgtcccgtggctgcactgtgaaagctgcaaacccataatctcaacgtctcttcgtgatttgtgttggcttgcgagatgtgaggtcacttgccatcattaacgatgtaaaaaaaacagttatctatacactcatttgtataaatctacgtgtccagattcattatactataatgtatcccgttctagtatgaggatagttttttttttaaggacggatgaagtactcctcctgttgaaaaaaataatttctatagataaaatctaaatataggataaattgttttttttacatagagagtattccctcggttctatatggtgggttttctacacagcggtatatactacaatgaattcgaatagagagtgtgtttcaaattcgtcgctctacacaatacgttttatcatagaagactctttgttgcaccgaaaataccatcagaggggttatcgcagctgtgggtaagcactaagcagcatggagagcactagtctactactacctggcacgtgatgggagcgctgcaaaaaagacggtgaaaaatacaaacacctttggcctctttccacgacggcgcgcacccaaacttgccatccctacacctccaaaacctccaacgatcatgtcgattaacgtatatgcatgcacgcgtacgtacgtacgtacgcacagtgcagccttcgtacacatacacacatcgtgtacgtacgtaagtacgtacgtacgcagtagtttctttttactagcactagcagctgtacttttctttttttctttttgggccattggagcgtgtgggcttttgtaccctggcgccactctcgtgagctgcactttgacttgtagcagcagttgtagtatgccggtgcaaagcagagaaaaggatcttttgggcgatgacgtcatcgggatcgagccacagaagggctcacaggacgagtgggtccttgggaatatcgaattattgatccatcgagccatcgatcgatcgatctggcgcatcaccgctactatgataaaagattccaaatcgtcgtccactgtagggtagtactcctatatcagatttgagtttggttttgggctaaatttaatttcatcctcacgaagtagtgagcttaattcaatcgattagatttcttacgataaaaccagcttatccgggtttaaattctggatttgacacatatgcttgtatttaggactaattatttttatcaggatacgtgatgtattcgtcgataacgaggtgtccgtgatgcgttcgtcaatcttaatatatatcgtcctaatttttcggatacgtttataagggtagtgtgtccatatgttagtacgtagcgtctgcattcgtaccgtatttctaaaagaaaaattttggttttgttgtagttttatttttgtttaaaaggatacgcgaatgcaaattactgtacctgtagtagtagtacgtgcgtgtcctcgcgggtcgcacgtgcaggatcaggtagggcgtgatgtgtgcgcaatgtgtcaaaaacatgttactactactgctgctggtgcctggtggcgaaactgttgctgtgcgtgggtgatttgaacgaacatgacgatgcagtgcagctgggtgagaggcgcgtaccacgtacaggagtttttttttttttatgtaccaccacgatctttgtgacctcgcgtcgtggtactatctcacgcagtaaatgaccctgttcgtttcaatttttttgcagggtcaactcgccccagtgtgatctttgctgacctggcccctgctgactctgaggtgtactagtaaaaggaaagaggccgtgtttagttgttttggcaaaaaaatttaatgcatacgggcacacatttgaagtattaaacataataacaaaataaattatagattccacctgtaaactgcgagacgaatctattaaatctaattaatctgtcattagtaaatgtttactgtagcatcacattattaaatcatggcgtaattaggctaaaaagatttgtgtcgcaatttacatataaactgtgtaattggttttttcgttcacatttaatgtttcatacatgtgtccaaacatttaatgtgatgaaaaagttaaaaatttgaagggaactcaacacagcctcctacagaagtgaaagcctcatccgttttcacagggtttgactcgggccgcgatcgcatcgaaaccataaatatgaattttaacagcagaccgtgatgaaacgaaacggattggcacgaaatttaacagctgccattgaccggccaggtttttttggaaatatccaagtgaaaacttgtgatatttctgagacgcagaagctgtaaataaatgtgtacggcggcaaccggcaggtgcacatttgctggctggatctttggggggcacggcacgcatggtgtggactgtcacacgaatatttttttaaaaaaattctttgggattagttggcgtttttcgggtgtcacgttgcgatgcaagtatgatgtgggggaatcaatgggtttttttgaaacgagaaacaaagaagggcggatggaatcagaggcatcatggaaatttgaacctacgacacaacgcccctcgatttttaaccaaaacagcaaaatttcaattcaattcctatacgagatggagaggtgaattgatcgcggtaataaaaagtttgcacggttttctcgctcgccgccacacggtctacgagaaagggaaactgcaggtaaaatccgcggtggccggcggcgcggcgacctaggtgccagcgccgccgctggatcggcccagccatcaacgtgggccgtgagcccccctcgtcgacggcccatctaaggcccgcaccgcgaaaagcccaacgcacggcgaaggcgacggcggtggcgaccggcgaccccgactccggccaacttctccattcacctccatgccaatgtgacgcgagtaaatccatccaatccaatccaatccacgatccaatttggttgctggattctcttctgttcttggatagatatccatccgatccgaccatggacaatgtttcctccccctgttgctacgcagtgtgcagttaccgaaaagctaaggaacagaacaagaagagcacgacgcttatccctttccgctgccgccgtatcgatcggtagatggatcaaaaccgccactgaaagggatcaactaaactactgatgaaaaaaagttgagtgctttagacaaaaacacaaaactttcacgtgcctccctccaatcccagattatttttctatagatcgatcgatcgagccccgtgaatgcgattctgcgcgcatttccggagcgtcttttgatcgtggttgggtttgtctgaaccgaactccaaaggtctcgcctttcttgctctgaagcttttctttagcttttcgattcgcctgtcggggaccgggatcatggcggcggtggaggcggagaaggtggtggcggagctgcgggagaggtgcgcgacgccggcgtcgctgctgcgggatgtggcggcggcgatggccggcgagatgggcgccggcctggagaaggagggtgggagcagggtcaagatgctgctctcctacgtcgacaagctccccactgggtcagtcagtatacctgcatatgcatcgcctcctctgaattctgaatttctgatttgtgttcatagcgtcagaaacaagagtgacagtagatacatctctgaaaatgatgggtttacactgatcagttttgtgccacgaattcaggagagaggatggattgttctatggattggacctaggaggaacaaacttccgggtgctcaaggttcatcttggtggcagcaagaagcatgtcgtcaactctgaatccagggaagtcagcatcccaccacacctgatgtcagggacctcctcggtgggtttttgtacgctgaatcatcatcatttgaccgagttttgctccattttgatgttgttccactgttgtgcatttttttatttgacgatattcgttgttttactatatgtctgcaggaattgtttggtttcattgctggggaattaggcaagtttgttgctgaagaggaggagggtactgacatgccaaacggcaagaagaaagagctaggattcaccttctcttttcctgtgaggcaacgatctgtggcatcgggtacccttgtcaagtggacaaaggcgttttccattgatgatgcagtaaggcgtccttcataaactcaacatgcatcgcatacattttttgtggtgatgtaaaaaatagtcctaattagtaactacagctctgcaaaacccattatttatatgaacatcttgcgatatgaacgttgttctagtcacaagccttgtcattaatacttgctagctcttactagtagatcagtttcacgcaaacaaaatatccatttttaagctgatatgagtgaatcttctatcagataaaacatttctctgaaatcaggtaggtgaagatgtggtggctgaactacaaacggctatggtgaaacaaggtctggacatgcatgtagctgcattggtgagtattgactggcttttacctttcataaacataatatatctacaatgtcaggtaaacatttttagtctgagagaacttttttgatgaaatagattaatgatgctgttggaacattggctggagcaagatactacgatgaagatgttgtcgcaggtgtgatatttggtactggcacaaatgctgcatatgttgagaaggcaaatgctataccaaaatgggaaggggagttgcccaattcaggggatatggtaagggacaaaggccatactcccaccttccattgaaatttaagcaataaattaactcacataagtttattttactcaacttttttgttgtatctttattcaatttctaagttttttttaagtgcgtttatcgtatttcaggtcatcaatatggaatggggtaatttctattcatcgcatcttccagttactgaatacgatgaagcattagacaaggaaagcttaaaccctggagagcaggcaagtttcttcagcaaaagaccacctaccctgcatgcctgtactgttggatcttgggtcttggctcaaccatatagttttgttttctttttcagatatatgagaagttaacatcaggaatgtatttaggtgaaatcgtaagaagagtgctgcttaaactgtccttgcagtctggaattttcggttctatagataactccaagctcaaaacttgtttccatctgcggtatgtcatttccttttgttttcacaattagcgctcttatgcaattcaggattgagtaggttgctttcaaatgcagcccatatgatatgaatgctcataagactgttttataaagtgtagaaaattctataacagattcaaggctgaccctaaaatatccgttaatgtggcgaacaggactccgcacatttctgcaatgcaccatgatgaaacacctgacctaaagatagtggctgaaaaattgcatcaaatcctagaggtatccatgcttctgaaaaagctcatattctgcatgtgtattctctgtagtgacatggtatgtatgcctgcagattacacatacatccttagagataaggaaaatggttgtcgaaatatgcgatatcgtggcaaggagggcagctcggctggctgctgctggtgttgcagggatcctcatgaagcttggaagaaatggcggcatcaacaatcagcgctcggtcatcgccattgatggaggtttgttcgaacactacaccaaattcagggaatgtttggagagcacgttgggtgagttgctgggagaggaggcttccaagtcggtagccgtcaagcacgcgaacgacgggtcagggataggggctgcccttattgcagcctctcaatctcgatgaaaatttgctagataaatagtagtatatgccgtccatttttgctctggagtgaaaaaaattattgaaaaaacctagctttgttgtatgtgctgcttgggcatggtggaactggaagcagtctgtaaccaaaatgaggcttgatatactgtcgccctgcatagttgtaacctgaaataaaattggaactgcaaaaccttcattgttacctataattatcccttttggggatttttttttaatattccgaattggctgtaaagatgtgtgtgtgcaatgaattatattatgcgctacttccatgaattaaattctgcagtagtaaggataaccaatcaaatctagccatttataactgtttgagaatgtataaaatttacaatctgtgtaatacggagtataatattctgctctaaaactcagcaagtaacaacaaaggaaggaaaatgtgatcccatcattatttgttcaggtgaatgttcccctaaaaacattttgctagcatccctgtctctgaaaccatcgtgtaaaaccagcagcggtgactcttccgttaaatccccaacgttaatctcggtccttaggtttcaattagatgtgcactttcaataacaacatgctacaacaaggaaagtttttaccctgaaagttgaaacgtcaagaatgattctcgatcatactccagtactccccctgtcccaaaaaaatctatctagtattggataaaacttttatctagcatgtccagattccttgtactaggttatatcctatctattctatattggttttttttttggacggaggagtatgtacaagtactgtttatagtatttttgttagtaagccctataagctaggtatacatgttaagactggattaacaatgatgataacgcaacaagaattatgccatgatatgaaaatatatctcgaatgaacaagaagaaattcccatgttaacacctccactaaactgtctttacatcttaagttgtacttactgttagtagatgtggagatgatttcattcaatcaggcgaaattgtgcctacgtgtgccgtgttacgaccgttggatggcgcgcggagagtgcggcaggatgcggcgtgtctcggagccccaagtttgagaatcattcgaacttttggtttgaaagctccaatgtttacctttaagttgtgttttttttttggcaaaattttcacgcgagggattgtgtgtggaagctacgccgaaatccacttcgattttgagttgaaactagccgaatctaaaagtgagcccacttttgagttgccgaggtggatagcaatactagagcccatgatgacaacttgatcgagatgaaacgccgacacgatcgatggagctcacatttttgcagacatgcatggcaccataattaacttaaacgcattaactagatcgcttaattaacaaaacacataactaatttgacacatgcctgcctacatccaaaattacaccaccaaaggcgccatagattagcttaatcacccagctactagtaattaacaacactgttccatgctactcgatcgtactactaatcatgaccactaataccgtcatgatctctcgtaagtatacatataattatgcagcccaaagacatcaaaatggccataaagccaagcaccacagatcaaaatcctctgcagttaaagtcatgtgacgttatcattaacatataggcccgataatccctaggtccacctgtcaatgacaaaggaccgtgtatttgactgcagagggatctcaatccaagcaccacaccatgatcaattcatcatcatcggcagcagcagctgaaattgacagtgattagttcagctgtcagctgctgccctcttcctgctccctgccgccctcatcagctgcaaattcagaacgaatcaggagtaaattcattttgattgatcatggtggttggtgggtggtaggctcaccgacggcggcggcaggtcggagctcttgagcacgcgcagcctcttcgcggtggcgatgaacatcctgcagcggatcgatcgatgagacgagaaattcatttgggatggaagctagctacggatgtgtaattttgtccaacttactgccagggaacgtcgccgacgagcatccggtcgccctcgtcgtcctcgtagacgagcgtgtactcgccgccgccgaccatctctccggcggcggccgcgtcggcctcgccgtcagcggcagcgctctgagctgcacgagcaatagcatagcatcgtgttcgcatgaggtcacagcaaagagcaaaccgcaccacgcggcgggcggcgcaaggtaaagctgagctcaccggctaggaggccgcggaagagcttgtcgacggcggcggagagctgggcgtagccgccgtacgccgcgaggtcgaccttcctcccgatcgggacgccgtccatgttgatcttcacgaacatgcccttctccgcgccgccgtctttgctcgccttgtcgccgttctgcggcgacgacgacggcggcggcggcgcctgcttggacgacgatgacgacgacgaggcgaggttccgccggaacgaccgcaccggcggccaccccacaaccggcgccgccgccgctgccccgctacatgcattttcacacataaattaagcatcaaaattgaattaattagcttctttccacctccatttctgtcgaacaaatgaacaaaccttggcttggaggcattggttccattggatcggagagcaaaagcaggagcagcggttgatccctccgatggcttggaggaggaggaggagganaagtaggcggggaggccaaggcagagctcgaggccgctctcccccgccgccgccgcgtcctcctcctcccggccgaaccctctcctccacgccatcgatggcgacgacgacgacctcgatcagctactgacaactgtactcctgatgaaaacaagtcacgagctcttcctcctcactgcgtccgtgcagcagcagcagcaggagggagtaatatatagccaaagatcaacgacgacgacgacgagctgcaagaaggagaggagacagagcaggtggtgacggcgcgagggacgaggaggagcagagagcgaccaaaaggcggcaaggatttgcggggaaaagggacaaggtttgcgcgccacgaggccgtcaggtactattcaaagcagccaaggccaaggccaagccaagctgcaaggattcagagaaacaaagcgagcaagaatcactactccctactagtcctaggccaagctgtgacaggtcacaggagaggaggatgcagcagcagcagcagcagcgagagaaagggaaggaaagctaggagatggatgcgagggagcatctagctcatgcgcaggaagcaaagctgaagcaggtaggagtagtaggagctagcttgagcttagctaagccaatgcaagcaagcaacggctgctactaccattatctcgctgttctatctctcgatcgctgcgtgcgaagctcgcaagggcaggagtgagtgtgttgcgagtgctctggttgggctttataaatcggaggggggatgtggcgccaccacaagccttttcttttcgtgtatgatcatctcctgcattaaagattccttgtggggagcactgcgtaattttgtgcaaacatatcttcctatccaattctgatgcggctaaactgtacttctaactactccagtccagctttaggctatgtttgagcaagtttaatagtatagcccactattggctccaatttatctatagtcaattcatacaatagttgcttattatactattaaatatatggtcccacctgtcatacacacattgtgtcttagagtccgtgctgcagctagctacagatctataacccgccgctcttctctctcatcttttatcttattaaaatatgtttacagttggctaatagtctactattgtacctgctcttattaggtgagctaaacaactgcacatcaaaaggtgttcaaaattttaatcactagtataaatttaaaaaataagtttatttatttataacaaatttagcagttcaagaaacacgatcattaaaaaagaaaaatgttagataaaaatgctcaaacaaacgaacccttaatctgaacttagaaaaactaataagcattctagtgtaggagttgttactagacaaaaacgagggagttggtagacaaaaatgtttgctcaattttatcgctgcctaggctgtgtttagatccaaagtttggatccaaacttcagtccttttccatcatatcaacctgtcatacacacacaatttttcagtcacatcatctcaaatttcaactaaaatccaaactttgcgctgaactaaacacagccctaactagaaacctggtgaatctttggtggatttgcactgtacagcatcagaaacacagagcaaaggtgattggtggcttatcccaagagacacagggagagacagtggcaatgtctacaatggctgtgtctagttgagcgcgaagtttggattttagttgaaattggagatgatgtgactgaaaagttgtgtgtatgacaggttaatgtaatagaaaaggactgaagtttggatccaaactttagatataaacacagccaataatgcaaagctgtagtggccggtgggtcatgtttgattagtagaagaggcatgtgttaaagtgacaggaatgccggtgttggacatagagggtgagaggatcagataagataagctcaggctgctcagcttgtggttattactatacaccatctccttttctttgataattgattctcctaccacattatacttatctcaagatgatgataatatttcctttttttccccctgcaatctcaaggagtcgaggttcattgtatcactgcatgcataaatctgaaaacaattttaggagtattgtgtttcctagaaagttaatgagctgtaattgatcaagctattttagttacagctgggctctttaactggttaagctcttttaatcacagtcagtgtcgtcagtttgttgattgcacagaatattggcaaaaacgattggtcccccctcttgtagaattaacgcacattccttccagataggcaggtactaccaacactgcaacagcacatgtcaaaactgttaaaaggccaaaaaaaaaaaaaagtaaagcaagtagccgatgagaaagtcatactccggtgagaaaactccgaaggcagcgtttggctaatgggttggggaaatcatttcccattcaccaaaagacatctttaaatcctaaccattcattctcctctttcatttaatcctaacccttcattcattttccaatcacaatccaaccctccatttcccattatccaaacacaccgaaaagggtttaggaagatctcgccgatggattattgctgggagtggtacaccggttattcaggtatattatttctcggtataatcgacgagaaccaatgaaacacggacaacctttgcaaaagaaaaaaaaaactgctcggagtactttattcgttttttggttttaactggtttactgagcggtttcttggctcaaagatggttgattagcaccatataaccaaagcgca

SEQ ID NO: 6987 - DNA, 33462 bp, Oryza sativa
  unsure (1)..(33462): unsure at all n locations
acttgagtgtccaaagaattatattatgcactatagatacttccttcttgctactaaattcagcggggtcgaattttaacttatcaaaatctgttcccatgtgagaagccttcatactagcagatactggcttgacaatatcatttgaagtgtcaagtacttcacgggcagaatttgtttgaaatgattcaacattggcaacagaaacttcggagcaatcactgtcatctagtcgggctagttcttttatcaggcatcttagtttatcaagagcaacagcagcagcagaagggtagcacacaagaagttttagcatactgcttaacatagatctgtacatcttgaattcagaggacatataggtatgtttccttattgtttccttgtttccagtgcttattatttgattgaccagggatatattatgatttaccattgatgttacatcttatgcacgaatttgtcctccgcattttcaactgttgacaggaagttgctggtaatcccttgacacccattgtatgtcaatgatgaaccttcctgagtaatcatgttctgatgtgaccttgtttgctgaagaaaacataaggtgccagcaataactttaagagcagtaccttgcattctccaggaagagaatgcaaagaacttcagcagccagaacaagcttagatagctcacaagtattgactaaatgaacaatnggagctttgcacagactatcttgaaagtttttataatcaatcagatatantgaggaaaaagagatgtctagacagcacgaacagtaagaccttagtgttcaccttttgaagaaccataaatgcttttttcttacaatcaagtgggaaatcatcatcatcaattagctgtaataacgtcccaaaaacagtctttaaaacaggaaaatggcagatgcttccgtgaaacatgaaacataaacatttcaatgacacagtcttcatgcaatgagaagattcatgctccaggaacaataacagcaattccacctgaaatagaaaaatcgaaataaagtttacttttaagtcaattcacaaaggaaacagagagcattggtattaatgcccccagcttctcagcaagagggtaaaaatacatagctagtaattctaaaagaaatttgaatcacctgattcttgattgtcatctctaattttaaaatgtgactaaggtgtcctttagtagcatgccaatcacaggaaatgacacaaggaaatgggatgcgattaatagcatcttcagatgtttgagaaaacacgaatcaggttataaagtgccaagcattcgaaagaaagagagtatatttacttctataaacagaaaacacatgcatatgattattgcaaagtgaactaaatgatgtaacacagaacataattgcagcgatgagttagaacaaattaagtcaaatacatatgctaccaactagtggattacactacctgattgcaaaacagaacaactgatttggatgccaatcttgaaagtgacaagagcatgtcagctttgaaattatcttccaacgtgcccagaacgatctgctttccaacctgtgacatcaagagtgaaaatgcttctttaaaatgtgatgaaaacaactgcaagaaaaaaaatcagagatcccacctaagattggtgtataaagcaaaatatatcattagtcttttatgttctactactccatttcagaaaactagccagttttattggtaggtccaatttcacaagataaagtcgacagatagcatcgagactatcatcacatatttacctatttcatagacttattttttcattggatgttttcagagctttggtcttcacattaacccgtaatgcaaaaactaacttacatttgtactccctccattcctaattgatcatcatattacatgagtgcaccaagaccaagaaaatataataactctctcatgctacatttactttagcaataaacttgatgcatgcacaatccccactattttctagccaatagcaaatcaaaacacttgtgtgtatggatgcatgaatcaatgctcatttaccccaatgcacaaataacgaatagacttaatgaatgaacacaaatacgatgatcatttaggaatattttcaaaaaaattatatgatgatcaatttggaatggagggagtaataactaacaacttaggtgttcaaggactagattactattgttgtaaatcagagcaatgtgtagttttaaattttctttccttgatgattccttggagtatgtgcacatgattggtaggcatatggagtattgttaaagcaatgaatccgtaagagtgagaaagcaatgtaaatgttgggcaacttaagagtaaataaaaaaagattaaaaaacgaagttaagcaagaaacacgtatatccatgaacacctcatgaactctatggataacagccaacgtacagtcaagcttggggaaaatcttaatcgctgccatgataatttgaggttgtgatgttggtgaagaaattaatcttcgaagtgattcaagtgtaatgtatgagaaatccactgatagcctagaaaaacaggcagctgcaaacaaagccgctttgacctgccagatgataaccataataccataataattaggtgagttgagaaatcccaagccaaattagatggattattgaggttattacaacctgtagcgcattggaggaagagaaggtggagaggatgagagagcggaggtggaggctgtggtgggcgaggtgggcgaggcatccgaacatccgcagcgcgagagccctggcccgcgggcagccagcgtcgtaggcggccttgaccctcgcgagcaccgccacctgatgttggggttccgccgccacgcatgccatggtcatgggcagcgagccgtcgaggccgaggaggaggagggcgcggaggatgcgggcccggacggcgttgtcggcggtggcgaagtgggtggcgaggcggaggaggatggtgtgggcgaagaggcgcggttcggaggggaggacgcccaaggcggaggcgaccgcgggggggacggcggccggcggcgaggctccgagctcccggagacgcggggcgacggcgtcgacggcgcggaggcgcgtggctgcagggagattgattatttgagatttaaaaaaaaaagaaagtgaggtgagggtgaagcctccatggatggaggggggtttactctactcaccggggtggcgggagcggagagccctgtcgaggtcgatgctccattgcatggcggacgacgccgccggtaacttgtccatcgccgccgacgccgacgccgacgatggcggcggaaacctctttttgtggagaggcccttgtgtttgtcttgttttacgggttcctctccttttctctagtggccgataggggtggaaacagtaccgaaatttccgggatttccggctgttttcggtttgaatcgaccgttttaatcggtatcgataattattggagttgtaaatgaaaataataacatatttcgaaaatagtagcagaaataggatagagatttttctaattatttggtcagtaaccgtatttgtataataatttccgttaaaatttagagaaaattccgaaagttccctggcggcccggccagcccaacccattgaaaaccaatgaataaagaaagcctagcaggcttgcagcccatcagggagggaaaatgataaggggaaaacgttgttaaccctagcacgtagcatgtggacttttctgaactttggtctttttcaacttatcgatattgaaaaattgttgaactttgtttatattgtttgtcgaacttattgttatatcattaatcatcatatattcatataatggtattacgtggagtgttatggtgcaagaataaaattatgaagtccccttcatgtatagttaaatatgtgattatgccacacccccattgtatccgacgtgaattttttactttcaaccagcatcggttaccgatccaactgtccagcttccaatatagcaatatcatcgatatgctatcgctttcgggtctaccatttcgattccgtttttgagaaaaaaaatagaaatgaaaatttcagaccgttttcatccataatcggaggagatggggcatccccacccttacgcgccggcggagcttcacctaccgggcttcgtgcctctgcaactgtctgccctaccttgccacctccatcttcgtcctcctcgccgtctggctcatctccggtacgctgtttattccccttcttccctcctcattctgcaaccgtccccaaatccaatttctctctggaattcagagtatatctttgatttgcttcggagtaccaagaccggcttgccgatttcccatctgctttggggcagatagctttcgagtgggatgtggtggatgtgtggatatttctggtgtctgcgtctgcttttggatggttggtcggttggtccggtccccgtttgtggttgtggccgggatgcgtcgtgaacgcgtggcggcgtctcatgccaggaaccgggcgaaatgcgtagcgtcacggtgccctgaggcgtcgagatctgagtaggaatctggttttcttttggatcaataatttcctgttgcactactgagcttgtggtgtgcgagagagtaaacgccaaggatggcatgttgcaactggctagtatatactccatgtaatgtaaatacttgcattggacagcgatttcagggtcaattcaagtagaattgacacttattttgggggattagatcagtagctgtcatagttatttcaatgatgtcctgcagatcgtagtgatcttgcgaaggtctcgttgcttcgaaggatgaggatgttcaacttcgattagttggatatctctttctgttttcctgtcttgatgaatgctgttctaaaccatggtacgttggcattggggccctggtatgttctgtttctggaagtttgaagaggtcgaacagggcagggctttgctgttggagagaagactgtagagatatgctgcccattacaatgggagctaaaactatgttcttattgcactctttataatcgatcaaagaatgaaacactggtggtacacatggagattgcttccataacgttacaacaggtgatttatatagacagatacaatgccttgcagcagcaacggccaacggcgacaatggcaacacaacatagcagtatcccctactgcattggtaggttttattactgcaaaatttgacctccgcggcgttaccggtagctgcggtatacgggggtgtacatgcagctctctgcgtatttctccagatccctgggttgaggcagccgggtcgccagtcctgcacagaacgattggccgtgtcagaggccacggttttttggcacaggacctggatggtcgtggaaagtgtgactagagtaaacgacataccaagttcataggcttttgcagccacgcttgcggcaatgcgagcagaaatctttctgatgtttgtgaagggcgggaagatcgatcccttctcaaagttctcctgagtggcctgatcagctagtgtttccgctgtttacgagaatggaattagttctggtgtagtactgcggtacgcgtcataactgtttcggatttgagcaaacattcgactgagtacttacaggcagctagaagcatatcctcgtgaacacggacagctccagagattacgacaccgaggccgaatccagggaaaatgtaggcattgttcgactgttgtgaatagcgaatcaattagtaacagtcaatttctattttggctttgctgtctcttggaataagtatttaagcaaggaagcagtacctggcctggcacatgtatctttccattgtactccacagggtcaaacggactgccgctggcaaatactgcacgaccctgcaaggatacggatggatcatcatgagttatgcattatcacgttttacaaaatcatttttttgtgctaaatatgcatagcacgatgtctctttagtaaaagttggtagtcaaatggcataggatttaaaacagtgagttcataatgccagatgctcaacaagtacagatttgcagctcacctggctccaattatatgcttcttcagcagtacactcagagtgtgatgtggggtttgacagagagaaaatgacgggtcgctgcattttgggatttccaatatcagaagttagccaatcatctggtaaataccacaaagttacaacttgacgacaaagatgtccaactaacctcgttaaaggaagccatggcctcaataacttctttagtaaaagttttgccaactccggatgttccaatcagcacagtaggtttgatggactacagaaagaataggtaaacattaaccattaggatacaagaaaacaagcataaacagcacaagtttcggcaaaaccatcagctaataattgaataaatcttggatgtgcatcagatgaatacctggacagcatctaacagtgtcgttacaggttcatgctcatgtgcccaaggctttttaaatgcctggagggattcttttcgtgagttaacgatcaacccctacaaaatagcacaaattgtatggtgttaaaactgttggatgcagaggtgaaatgttgcattaacagcattctattccttttggttctatacctttgaatccagcagccaaaccttcttgcggcactcctcaattggagcctttgtctgaaaaccaattgagaccagcaaagttataagccgtaagtaccataatgaattattataacagtacagcagttagattgtgaaacactatattacctgttttgaaatctcaagagcaatgagttctgcaataccagttccagcctgcatgcaaatgcatcatgttatgtgtttcagggattacgtcatgtttcaacagttgagcaaagattacaataagccgataagagaaatcttgaccaacctcaccagcaccaaggaacaaataagtgtgttcagccagggttccaccaaccacctttagtgatgataaaagacctgcaaggaccacagatgctgttccctgcaatccatacattttggtttaatttagagggcaacaaacagaacagtggaaatttattctataagaatatattgtggtgaaactaaaaatatcatggctcaaacaacacaagtggttcatttacctggatatcatcattgaaaacaagatgactcttgctgtattttgcaagcaaatcaaatgcgttgtgattggcgaagtcctcaaactggcacaaggaagattcagtttcattagcccttatattatgtctattatgaaaacaatgaaaagatcaaataataaaaatatattttactatgaggctggggcagacctgtatcagaactttctcaccatagatttgcttaacggcactcataaattcttccatgagctcatggtactcctgccatcaaggacaagacaaggttcagatcttaagttgtcaatttatacaacaccttcattactccaagcaaaccctttttggtggtaccttgccagtagcacgcctttgccggagcccaatgtagaattcatcattcaacaattgctcattgtttgtaccaacatcaatcgtgataggtaaacactacaaagtaaaagtgcaatttgcaaattcagatgatttggctgttttacagttttctggtagaaacagccgaaaccataatgtaatggatatgaatgcttacagctgacgggcgaactcctccaagggcagtgtacagagaaagtttaccaacaggaatacccattccctgtaggaaagatcattgcaacaacaataagtaaagtttctgaagtaagcaactaatcagacaatcatacctgacaacccaaatctccaagccccaaaatgcgctcaccatcagtaacaacaataacttgaatgtttctctctggccagttccttagcacatcaagaacctttcccctagaatgcacttccagtcagtccaaatcgaataggtagagagaataaaatcaacacactattcttggatattcaagcaaagctaggcaaacatacttgtccttcaagctgacatagagaccctgtggttgtctaaatatgctcccatacttctggcaggcctcacctactgttggtgtatacaccacagggagaagctcctccacattatcaatcaaaagcttgtagaagagcctctcgttcctctcctgataaacacaaaggtattattatcatatcttcaacatgctgttcctccacattgcccaatgcccagtcatttttgttaaattgtaaatcattcaagaagtcatcaggtaaaaaagattaatttggattacctggagatccatcatggccatgtaacgctgcaaaggtacactgtactggcgaagattatgcatgatcttcttcacctgcacaaaacattaaggagggcttaaaataaacgccacagagtgataaacaggttatagttgcttattgatgtagctcgtacttgaagatcctgagacacaactgccggaggaagaaggccacgtaagtaatgagcatcccgctccttctcactaaaggcaaggcccttgttgtgatgtggatccctcaaaagggtgtaaccactgttgcacaagatcaattacatcagcaactccatttcagcatggtgaacgaaataaatcagttctcagtgcacaaaattatggccacttattcgtatgaaaaaaaaactgccaggccaacattctatagtagcacgattctccttatgagtgcctaaattggtgttttgcagtacttgctgtaagttactgttctcagctgtattttacgatctaggtgataattattgttatataactcagcacatgtgtgttaaatttataattaatttccagctaaatttcattgtcaagggatggcggagaaaacaaagacagacaatattggcatggcatgggccagattagaatataccccacccacaggagtgcaggaaatataaaaagctactagtagaagaaaacaatcaaatctttttttctcagctacccgggacctactcaaaatccatccaacattaacccagttcagattactccagcagtataaattatcaaaaaaaaaaaacaccaacagtaatattctgcgaatttttttttttgaaaccgatattctgcgaataaaatgaatatactgtaaaaaaaataagaaccgtataatccgctgacttgaggcaagaaagaagaaaacaaatttgagctgaactgattgtaatatgtttcttcgtgaggagaaggctgcggtaaattacgcaaacaaacaaatgaaagggacagattcagctttggcaactgccacacgacaaagaaatcgactggatcaacacaaattcgagatttagcacgattcgagcaaacaagcaacaaaacaaaccgagctgcgagaaggcgacgcatcctcacttctaggcacgtcaaaattccaaaacggattagaatatttatcacgcgggcgaaaccgtatacctaacccagatcaacgcgcaagctgagctaaatcggcaaaaaaaaatccccaaaaaagtgcttcagatcgacgcatcgtaacgtccgccgcgaccccaccaagatccagcccccccacggcgatccgatccgattcgagcaccgctcacctcgcgacggagaaggcccatggcgtgacgggcacctcctcggtagccatgtcctcaaccccgccgccggccgccgcaacctcctccttcttctcggtctccgccgcggactccatcgcgaccgcctccaccctcctcggcgccgccgcacggaccctcaccgccgcggccctcctccgcacctccctgcagctcgtgcatccgctcccgctcccgctgctgccaccctcgccgcgcttccactgcagaggcacaaaaacacaaacacgtcacgctcgttcgttcgtatccccccccccccccaccccaaaaccccccaaaaccacacaagcaaactcctcgctcgaggggagtacgtaccagcggggaggcggcggcggcggcggcggtggcggcggcgcgcgcggacagcatggcggcgaggtcggcggaggcggtggtggttggtggggcgcgtcgcgtcctcgcgtcgccgatggctggggggaagaggaagcgagcgcgtgaggggggtaatgggagggaggaggccggtataaaaaaggaagggggttgcgttgcggagggtggcgcggcacacgtgacgtggacgaggccgtcgggtcggagtgttttacggtttattttattttacacgcgggggggaggggtatatgtggtgggttgtgcgcggtgtggtgcggtgatgtttccgcacgcctcgccggaccgggccacccggtcgcatgtcgcagtcggcgacgctcgctggatccagtacgttgtatttgcgtccattataaggttttgcataagtcggctgtgggtttaacttaacctaaacttgcggctctcacgcacgaataatctatgtattttttaataaccgaataatctatgaaaaggtaaagttatcgcactattttacttttttaaaaaattacacagcacatgctcgcacactaacccctatgaacacacacgtaaaccctgcatctatgagcatctttgaagactgagccggtaaatcctgaagattgacaaagtcaccacgggcgtctcgtcctacccttgaaagcacaataccgttaaatcctggaaaattcgctcccatgaaaagtcgagcccagcaccattttacttggtgatgcacaaatagagtagtgagattcatatataagtaaaaatgattttggtttagtatatgtatgtactctacgattgtatagttgatacaatgatattctgcgatatattatctgattatggataaatggcatctttatatcttctacgttttatatctctttgtatggctgacttgtaatattatcttggtttttagttgggggtatgtgttactaggtttattttttagggacgaagagagtgcatataaatgtataatagggtttattagtcatcttgataagccaatcaccaatataaaaatccatattccacgtctatttattactatctcgcgtataccttgatagaattaatctccatactcgacaataccattgccggctatatcccgtcgacatcattttcctaattcaattttttgttttgttcaactagtagttttcttcttctctcttaaattatcttatatgtaactttttttcttcctttcagaaactttaaaggcccgaggagaaagggaacactgagcgtaataagtgaaacttacggtaagtcggtaagtcgtatttcttgtaatggaactttgaggcataagatatttaaaattttcactcgcaattaagagggaacaaataatctttgggtctgccagattaacactagttgaattcaggaaaattgcaaatggatcatcatttttttacgcaaaaaaatatatgaaataagtttttttgaacgagaatgttcagaacaacttgaaactgtcccatagtcatagcctcacaggtctgcactgccggcatagagtacatcgaacacatcagatttatttgcttgtcacttgtccttgtcatatggctcgctaatcacctgtaggcacagcacatgcctatcaataattatgagctggttggttagaatggagcaaacccaagattgtggctccaaatcaccgtgtaattaagctttggaatgttagttgaaccgtggaccatatggccatcagcgtgtgtggttgtgtggactttgggcgtcaagccagtacacgtcgaagatcgaatcgtcgtgtgtcaattcaagccacctttggttgagcactggtaatatgtggtcctgatcactactgattccatcacacagctatatatgattccatcccacagatttgggggagggggggggggcataaaaaaagaaggcacttgccttttcctatgtgaaggtcggagtaggcatgacgatgggttgtttggttagtagctaactttgccaaaccacaagacatgtaggatcatatgactaaaaagtgtggcgagccacagttgtgataatgaaccaaacgattgtctaaaaagttatggcataactatccttagacatggcaaattgaagatagcaaccaaacagtcccgtagtatgtcttatagcggacgagaggttttcaaacttccatccggcttctactagtagtagaaaataatttgaaccattgatctcatttgatcgaaggattcggatctatttataatatcaccctactagttatccgtagaaacaaggagtggcgttattatataaaaaaaggtacataggggtataatcgttatttggcagggactattttttttattcgatgaaatataagtaatgccaacgcaatggataaccacatatcgatctagaaaaaaacataaatgaacaagttatacatattcactatattagtaaattattgattactcttaataataataaatagttcagattatttctatggtaggataatacttttcttttgcggggtactggtagagtaatactaataataagagcagcagagaatcgctgaaagaaaaaaaaacagcttcgccatacatatttgacagtaagtatatgcaaatttacaaatgcgttttgcatgactacttttactgacacggcaaaaaaacataaataaatcttcacataccgctacacttttttgcatgatactactacagctacatcccagcatgttccagcatggcgttcggggcccaattaagagcgaccggacggatcggcctagaaccaaaacgagcagatctagttccagttcattcattcgagagggcgcacacgcatgtggtggcgtatcaaaagcgtggatcggatcgatgcatcgacgcgcgcatgagcgtctcgtcgatcggctcgtcgtcgctggcgtgccacggtgccagtgctgttggctatgggctcatgcatggccaggtgggaagtgcggccaagtgggagcagctagcaagcaagtggtggtggtgtgcgagagtacgagcgtaccactccagttaggccacgggaaaggaaattcgagcgggttactgtacgattaccacgtgccgtaattttctctgttttaaagcacgatatagttcgggctacctgttactcgttccgtcctaaaatataataatgtccagatttatagctaaaatttattatatttgggacagagttccgtaaaaaaaatgttccgttaaaaaaatattttaggatggagatagtaaatcgtagggtaatggtaaccccatcccaaataatttgttaaaactcgatttggagtgcatttgctaattacggttccctttggtgtgctacacgattttttattattgtgcatatgaaaaacgaggcactccattcaaaatttgcgcaagagttccgtcaaaaaaaaagaaattgcgcaagagaaaggtgggtcttctacaattttgctgctgccacgctatttgactcatgcacagtgacctcgcgttttatggacacaatatcccaccccaattaaattgcccgtggctcgtgggggtcacacgacacgaggagagagagagagaggtgtgtgtcagtgcgatgtcgcagtctcgcagaaatctcgcacaagcgtgctactcgcttgttctaaaatatataaaaagttttgagattaaacacaattattagaaaaatatataaaattaaaataaaataatattataattagttgaaaaatgaggataaatgaaaaaaagaatgatatggaactgtgattggttggaaagaaaataaagttgttatatattgaaataaattaggagtaaaagttaagctctgtttagattccaacctattttttagactcgatcatatgaaacgtttgaacatatgtagagcctttgggagtccctgtttatgagtacaagccaaggaaaggtagacgataaaggcaaaaaacctgtgatgcagtctcggctcagttctccggacaaccatgaaaggaatcacactacgaccatgggatggacccccccgccgatgggctgggttaaagcaaatgtggatggctccttcattcaatgttcggaagctgctagtgctggaattgtcattcgtgaccacactggctcagtactgctcacttcctggagaattatcagccattgtggatcagcggaagaggcggaagcgactgcatgctgggaaggggtgaatctcgcagctgagtgggtgaaaaaaccgttaattcttgagacagactgtgccaacttggtatctatgcttacgagctctggatttgatcgagcgcagctctgccatgtcctccggagtattaaatttttactccaagcttgcctgattttcgtgtgcagaagattagaagggaatgcaatagagtagcccatgatttagctaaatttgccatgcgtacgaaccattcagctgtttggcgtatgcaggctccttcttgtgtttttggggctctggcaaatgattgtaatcacattgatgagtaatcaataaagcgttcccttcccccgcaaaaaaaatgcatgaaatattaaatatatgctaaaaaataactaataatacagattgtgactaatttgcgagataaattttttaaatctaattgctccatgatctgataatatggtgttacagtaaacatttaataataatatattaattaggcttaataaatttatctcgcaatataaaagcgaaatttataatttattttattattactataaatttaatattttaaatatatgttcatatatgtgatttgatacgaaaaaacttttaaacccttatctaaagacagccttttggagtagtactctccccgcaggcggtgcgcaagcacaagcagaagcaaagcggacgcgtggcgcgaaaggggggcgcgcattcactggcgcgccgcggcgagtagccccgcaaaggggtgggcccctgcgccgaccgcttctcggtccccctcccaatcctcccccctcactcaccgcgagcccccaaaccgaaggacactgaccaatggtccccacagggaaaagtggcccacacggcagcgaccggatgaacgcgacgagaaggtacgaggcgggggcggggccgggagagaaaagtggacaggagttggggagttgaggcctcccctgggtgccgccctcgcgcctcggcctcgcccgacgcgaccggtccacacgtgatactggacttccctttctctctctccgccgttgcttcctccgctgcttcttgtttgttttgttttgtttgtagcggtggatggagatggatggtagtgctagtgcgttgcgtaggcccgtacgtgcaggaaatgggcaatactcctcctacgacgatgctagtactgcagtttcgtccgtgacgattactcgttattattcctaccgtcctacgcactcctactcccgtattagtactagtattaagactcacaatgcatggatttcacatttttcgagtttgcctcggccggcagggggcggctactgataccacatcacagccactcgatccatgcatgcaccgatcgaatcccagggaaaaccacacacacatagagatctcgatcgggcggtggcacagtacgcaacgtgctccggttttgttgggtccccgttcgtacgatctttcgcgcacgcggacgcagcgtgcgtgcaccgcaccagtccctcccactctggtttcgcattgatccgttttgatcggtcgcgcttccccgatcgctacatatgcacgctgcccagcagctctctgtaaaggctgctgctagcgttaaatacaccaaaactgcctaacaacaaattccaactactcctacatccccaaatgatttatttcttctttttttttcttctactttttatttgaggaaatatcgcatggttaacttgttactccctccgtcccataatataagtgattttgatttttttcttgcaacatttgaccactcgtcttatttaattttttttgcaaatataaaaaataaaaagttgtgcttaaagtattatagataataaagtaagtcacaaataaaataaataataatttcaaaaaattttaaataagacgagtggtcaaacgttgtaaacaaaaactcaaaatccttatattatgagacggagggagtagttccctactgcaccgtgctcggagaattctgggctccatcttttgacctaaataagccaaagtcaaattcaaaattaattttgaacttgatttgaagacattttcaacacagtttattttatgttggcttttaaaacgttaagaacatacatatagaagttttactgttttattattaggaaatgtgggtaactgatgaggctgtctgatgcaaagtggtcgctgtttcactttgtgattttacatctgctgtcgtctcttctgcactgctgacctggagtgttggtcgctgcatttgcatccgacgaacgctgcgtgtatgctactccatgtttctgcagtttcagctggatgcctggatcgctatcagagtcgagtgggtttgcatgattaattgcgagaggcacccatcgttttccccggtgcagccaaggattcccctactgagctcgctactgattcgactagatcctcttaattctcatcgcttaatgtcgccgaatccaattattgccaaaaaaagataaatcatcattgcatctgtgaaccttattggacacccataggcaaattcgatggaggagttagcaaggccaggagcaaaaatatgtaagacaagcagggatatccttttcctcgccgtcgaaagaactattgtatgagtattacaaaaaaacttaaaagaaaaaaatgcgacgaatatgtgctttggtttctggttagaggctcaacaacaatcaactgaatctttcccggtccacccaacaaaagacctgaaaggtgcctgcattaatttgtttatcttctcttttctgcagccgtgaatggacaaatggagatggaaatgaggcgtaggagtactacatgcagatgcagcttcacacgagatggaaaaattagctgctgagtgcgtgctgactggacagccatcgatttcgatatgtacacatgacgacgagaccgattctgctaaaccagtcagcgcatgtgttccaggaagcgacttttttatttttatgtgaaacgacagtgtccagcttcagtgacgcacgggtcacgcaaactatgaatctgacatcttaaaacttggcgactctgctattaattgattattacgtgaagatacacgcgattcgccgttcagttttgtacagatactgcccaatatacaaagttggtcatcactcaccagcttaatcagtcgaccaccgatagccagccagaggagaattaagtaatttaatggtgaaagatactagcagctgatctcctggtaacagttcattcaatctcatacaggccattacatcatacaataccagctactaacatgtgcagttagcacaagagaaagatcatgatcagtggatgcaaataaagtaattaaagcacacgactacacgagcttggtgttaatttatggggggcaggagaatttcgatcttgagactgctgctaagtcttaaactgcactagctgccaatggcttgagacggcagagtcaaaatctatggacggcgaggagagtttttgttggggggtttgagcacagtacagcccggacagcccatcaggcccacggtttggagaccattttgtagtgggcttcgtcacagagcatgaccgttagtaggtcctgagcatttaaaatggggacgttgattgagaactgccgttgcaaattctacctgcaggtagcacactgaaaagccgaaatcatgcactgaattcgtaggattcttttctagtcaagatacagattttatctcgattatcaatagcatgctttttaaactattaaacggtacgttctatacgaaaactttctatatatagaagttgcttttaaatatgaaatatatccatttgtcaagtttgtaacaattaaaacttaattaattatatgctaatagctttctcattttacgtgcatcaacttaacattcttaatcagtttcaaacaccacagttacgtacacgtactactccattagtggtactccagttaggctcacgtcgcttgtatgtactactcccttcatctcataatataaggtgcccacacattttaagattttacattcaaaatattttgaccaatatttagtacaatatgaattgaattttacttgctaaaaattatatcattgaaattgaattcacatttgaatttactttcatatgattataattttgttactataaaccttatagtatatgagtaagacaaacattttatggagaccgtgttaagttcgaccatgtcttatattatgggatagagggagtatgatctaatataccttatacgcttatgcagactacacgacacaatctgcgttgatcttaatatattgaagtggtggatttatgtattttagactctgctgaataaactttgccggacagtgaactgtagtcacgaatacatcagcatcggtcgccaattaacgagttggtgtcaactttttttttttctgggtgggttgggatcagcttttcgatctgatcaatctcgcttgatgagttgcttcctggtcatggcgttctccaatctcagtcaggactttaggcaaccatataaattgccacgatccatctcaaattccatcacgaaaacctcaacatgccttccaaattgaaggcactcgttaattaagcagtagtgctaggaatgatggaatcgagtgaccaatcaatagtcaattaggacctgtttggtacacctcaaacttctaagtttaactctaagagttgggtttggagtggagttgtggagctgcctaaacccagctccacaactctagttcattttgtgagagagctctacccagctccactctcattttttggtggagctgtaactgtttagctgagctccagctcttaagctgtgataatcaggcctaatggcatcacacaactgagagagcgagagagccactgtgtgctggcgcggcgcggagatcgtcgatcgatcgagatggtgttcgtcagttttgtgcacgcatgaacaagtccatctgcgatgctgcggcccactatagcatagcatacacaagttgggccgggcccatctctgttttctttgggaatacacgaggggagtcccgtacatctcgtgatcgatgttgatgaggaactgcatcaaagcatgcaaattctacatgctaacatactgacaaagtctgaaattaaagccaaaaatcataagttgcaggttcggcaattgaggcattgacgttcgattcgaacaaccatgcatataaactgcctcacatctactaatctcatctcccatcgcctcaaagctcaatgctctgatagcgttcccgtggaggcggacgccgatcgatcaaggtcaccgaggagagagaggaggagggtcggaatttaattcaccgaagcccaccagctgatgaattgctggtcatggcgttctccagatgccgctcgtcctccgcgtcggtgtactgttcagcatgttagcaagcgagaatcatgaaatgtatccgacagaattgtcagaattggaattggctctttgtttgagtagggatcggagttttgttctccgaccaacaccccagtttgcgtgggctttgtaataatggcgcccttcgatcatctctgatcgagcgggccttgcacacacccggggcacaactgtcaacactgttgctctggaagaaatagaaaacgatacgagtgaaaatagaacagacaaatccacacatttcaaatcgacaagaaacctagatgcacatgtatttctaatttcatgatgaaactaggcggtgcacgtgtcacggacctggatcatctccaatacttattttggtgtgaaggaattgtggccaaactgacctctcgttcttttttcgcaggaggttcggagtttctttttccgaacccctgccttacatattatatggacaatgtgagggtttggagttttgttttccgaccccagtttcccgtgcttcttgtgatcgattttgatggacaactgcaccatctatcatgaaaattctacatgcttgcatactgaaagtctgaaagccaaaatcatataggctcaaattgcaggttcgggccattgacattcgaacaatcccaaattatatctactatatatccacgcaaaacggtgtgggggaatgatatagcgaaattggtatacaagagacagcaatctggaatttggtaaagttggagttttaagctttggtggtggttcgtgctcttcaaaattgaaggtctgtatatgtatattttatcctccactgattaaatttttgcatgacatctaggagtggcaacggggcgggttagagatggtttgggccagaacgccaccaccgagtgtgcgcgtgttatgaacaactatgttcatactgtattttttttttaaaaaaaagtgcatgatagtgaactgtagcgacgaatacatcagcatcgatcgccaatttaccagtatactttttttgtttttttggaaatcccatcttcccattctcttcgatctcgatcgcatcatgagttgctggccatagcggtccttccaaaaaccttttgatggtttttccagacaggtaagatggcatttcgctggagatgaaggagagcccctcagacatccttctggcagtagaagagcttcctttgttggaataaccggtacaatctagtagaaccttcttcttcatgtgcaccttgatcatccacgttgtggcattggggtcagcagtgtggtagcgctcgttcaacaagaagcaaacggcgtaagggttttccatatcaacaacggggaattcaggtcggacatttggaaggcggttttcagaatcgagttcccaaagttgggcagcatccaatgttgcatcttctcgccatgtctgatcctcgtgccacgaccacagggtgatgctgaagcttctgctgctgctgccgccatgttggttaacattgacgaacttgatgccatggtgggtggcacacagactacgggaggcttgagggcatcctcgcccacgatcaatgtcagcaactggatcgaccggaagtggcacgtaccatagaacaggctccggtgggtcaacccttcctggatgttctacattggcgacgatcatccctgctaccaagtagtccacccagatcatgtagcgatcgtggcacgacaacaccgcatcagtcgtccagcagcacaggtgagcgagggcgtcgccatggcggatcggcacattcctgaagactctccagtcgtcagagccagaagcgaagaggtagacgttggtttcggaagattggcatgatcttctctcgagctcagccacaacgaacgacgaagaattcttgctgccgcaggacaaaatacatgtgccttccctgctcatgatgcgcgggcggatggtgtctcccctcctccagtaggaaacgggcagccgcgtcaaggaggggtggtggttgctgctgctgctgcggctggcattgtagacgaagtagtcgatggcggaagggcgagcgtgcttgtcgggggagacgatctggaacaggacgacgttgccgtgcgcggcgatgacgtatgggtaggatgtggttcccagcgacgggcggggcccctgcggccagtcgagggtgaggagggaggtctccggcggcttcacgagctcgaaggagacggagatctggtcgccgccggaggtgtaggagaccgccgacgtggtgcggtcgcggtcgtcgcggcggaaggaatccctccgggcgccgtaccgattcaggatcgcccaggtcgaggtcggattggaggcgccggcggcgtcgtccaacgatagggttgaggaggatcgcttcagcggccgcccgggaatctccgtctccttggtcggcgttggtccgcgacgggatgcgtcggccctggcccgcgaaccgtcggacgatcccttgcgccgcctgtggctgggaatccgtgtccccgtccccgtctccgtctccgtggtggggatccgcatggcggcggcggcggcgagggttctgtgtttggttcgcgaaagagaaattaaacaaaggcgagacgaacataaacttggctcgttggaggagtatttgggttggggaaagtcgggttaaataactcttcagtgcaacccgattcggatacccgagtcggggagggagaagcgcgataggcaggactcatccaagtcgttagatcgaaacatccaacggtcaaaaaaaatccaagagctcattgctcggactcggatatgctgtgttcgggaggtaactctccagctcccgcgcacgcagaacggaacgactcgtattttgttataattcattaagtactattaattttattaaaaaatagattaatataattttttaaagcagcttttgtttaaaaatcttttgtgaaaaacacatcatttagcaatttaaaaagtgtgcgcgcgtaaaacgaggaatgtgacttattctatgctgtgcggagtcatggcctcatgggtctaggcggttcgtgtttggatcctaccctctctatccaaatatataccaacccaagaccaaatttgacgtatcataggcctacaaatctaaacatatatattcaggttcgcatttctcaaatccagtcgtatgttattatatatcacgatagagtaagattgcacgattgaaatttctcggggtgcgactctaatctaggtaaaatttttagcgcacataaaacgagaaacctcattagctgacgattgaaatttttattatttgtgtgtgcaactgacatgtgggtcccacatgtttttttttcagatctaattgccatgtaagcgctatgttaatgacacgttaggcaaagacttagtcaaaagaagccacgtaggcgttaaaaccggacacaatacggccgatggatcttatttaaacggttttgtaagttggggacctgttttgcaatgaagtgatgaaaatcggaatgggcgaaaaatagagggacccaaagtgaacttattcctctcctgaccgactcggactctcccaacctcccagccaggcccagcaattgcgttggcacttggccacttggggtcacccgtatccgtatcgggttgcactgaagagtagctgggactgtctatccatttgagagatggatagcaaaatcgagagtggtttatcttcgcctcgcctttgttttccctttcgcgcaccaaatacgtcatggccgcgcacgacgtgtgggtaggatgtggttcccaccgaggggcgggtctgccattgcttgatggagttagaagacagtagcattttcgtcaaaaaaaaaaactaaaaactgcatggatctaattaaccttcttttttttttcggtcattgcaaactttcatcgtccgattgtgaggccatacacgagagccacacgtcgttgccctagaagaaataggaaaaatatacggatgaaaatggaacagaatcgcatatttcaaagagacaagaaaccaaatgtgcatctaatttcaagaggaataagttcactttgacttccttaaaagtggtccgagtctaatttataacacttaaccgcaaaaccagatattttgacttctaaactgttaaaatcggtacaatttaactccttcaatggttttggaggacggttttactgacgtagcgtctacgtggcgatannnnnnnnnnnnnnnnnnnnnnnnnnnnnnnngtggcacttacgtgacaatagaattaaaaaatatgcgttggacccattagtcattcacgtaaaaagaaatgtgggcacaccctgtctccttccttcttcctcttccctctctccctttctctctctttctctcctcttcttcttcccctagcacggtggcggcggcgacgaagttgcacgacgcgtcggtgcggcggaggtggggcgcgaggaaggaggagaggcggcggacctggcggtgcgcgggggtgccgaaggagggagggcaatgcggtgagaattggagggggcggcgccgaacggcgggtgggggagggggttgaagggcgacaaggtcacagtcggagtggaggagggggtgtaggtgctggttgttgcgtcggcggcggcgacatggaggtgctcttcgagctcgtcgcggttggaggagcggagctcaatgctggctcgacgacgacggctccaccgacagcgtctgcggtcgtgcggaggtcgacgacggctccaccgccagcggcaggttctggagggtgaagaaggtactcaacctggggttagagcagcggctacgcgattccatcgccatcgtccacgacttcgtgaacgcatcatctggtagcggcaggagcagatccgccgctggtgccaacctacctccctcgtttcccccaaccccaagtatctccgccgccagcgccattctccactgacgccgtagctctatggccctctccgatggcggtgactgcctcgccccagcttgacggcctgcctcctcctatggctccggcgctgccattggtgccgacccacccaacttctaccatgctcgagttgaggccgtgacggaggaggagcaagagtggacgcctcggcctcgacctccctaggtcccgctggccgacgcccctctaccgccacccagctgacgcgacgccgccgctcccctcgttgtcccatcgtcgctgctgtgtagaagaggatacgtgccagcctgccaggggaggagaggagggggtgaagggaaagaggaagaagagagtgataaggggaagagggagatgacatgtgggccccacatgttaagtcagaccgggtcaaagcgccacgcaagcgaaaccactatccaaaacagagttaaattgtaccggttttaatagttgggggagttaagatatcgagaatacgaattagattggagctatatttaagggagtcaaagtggacttattccatttcatgaagctgggtgtgtgcacgaacacgtccatcaagcatttgagctgctaagcggcgaagatagctgtagcaggtggccgcttggctggtcggcacgaccgcgaccgttgggctgccaccacatggcgccccagttaagcttaggagtaagtctatcttcctctctcatttcttccccatggtcgaatccgatctttcaatcgtaaaaccgggtttaatatctcccttaccttcaaaaaccggtgtaaatcgacttccaagacagtatttagtccggttttagcttatgtggcgtccacgtggcagtaaaatttaggtggggcccacatctcagttacattatttatttctcctctcctccctcgcaggcagccacggagactgaaggggactggcacggcggaggggactaaagagcctacgggtgcggcgcgtgggccgctggtccgtcgcggacggagccagaacgtcgccgctgcgaccaccacagagaggtgcgcaggtgctgactaatcgcgatgcggccgccatcgctgtcgcggccactagccttcccgacgctggactcgtcggtggcgttggcatcctggggcacggcgtcggggaccaagacctcctcaacctctttcttactcgagctctccccgtgcgtgctcatctccgctgccatggcaccgccgctgtcgcagcaacaaaacgccgtcatccgtgctgtccatgtcgccaacgtccggatccgcaactggcacggcgcgctgctgatggagactaggcagttcctctccaacgacaggcacgctctcggagaatatgtgccctggtgagacccaggacgccggacctcgggtggtggcagcaatttttggagtagctcccagccgctgctcccacccttgctcccctgcaagctcgccgatgtcggccgccgtgtacctccccagcgacctcggtagccggggcggagaccgacgggtgcggcgctggggtcgcggaccgcgcatcactggttcgatgcggacgaagccggaacgtcgccgccaccgcgacctcctcaagctccggcatcctccatccggcattcgcccttccgcctccttcccgtacgtcggtacgtggccggccggcgagctccttcccacgcacgacgcggtcggccgcctggcaagctcctgcaccgtgcgccatcgtcgttgccctgcctctgtgttgatggatggtgaggaaagaggaagagatcaaagagagagagagagacagggagagaggtaagggagatgggatgaggtggaggccgctgacaaatgggtcccacctgatgacttgccgtgtcaaacaccacctcggataaaaccgcctccaatacaacagttttgggagttggggacccggttttgcggttggggaagcgattgtaacaagtgcatgagttgagggaggcaaaatagacttattcattaagcttattatgagcctgatatccagagaaatcgtacttgggcctcattttggcctaacaagtcatcatcagacagcgaggcagatgctcggcgacggcaggcgttagcctgagcagcctccgcctcgatggctctagagattctgcggaaaccgccgccgcttgttctcaaattatgcgagatgcaggtaccatcgctttgatgatgattgtagtttttcccaaaacctacttttctacctcaaaacgcgagacatttgcgacgatcatagagcagcacctcacgtgcgacgacaatgcaatatacttcgtacacgcataacaaaaatgactgtaccttcttcataagcctgatgttctgataattgcctggaactgatacaatgttcaggggttgtgagtagtatcagatagataacagggatttatggttggttttccatcgtagaggtgagtacgagactacgagaggacagtcgctggctgccgattggtgagagttccgtgaagtgcattctttacatttcatcacatatccaacaaaatagtgcatcgctaagaaaagaagttccagctagttatagtttactgatggacgattatgcagttattctgcctcactgctcatctggaggtatcgccatcaattccctagctttcctacaaaacatttggacgaataaaatgtcagttataacaacccaaagcgtaaaattgacccaaagaaggaagaatggcatataaaaccgaaaagaacagtcgagtgttgagttgcttcagttgcagtaaatgtgggcacaagcacaacggaatatgctagtactaatggtcatgttccctgcgcaaccacatttttatttggaaggcatactcgagagaaacggaagattgccttagttccctctcaatctcaacattccccgtatctattttttgcgcatccatgagagcatcacacgcatgtttgtactcctggttttagagtaaatcaggacacggaccataatacatggatcacaatacgttagctgcagtgagtcttaccttgggtagcatgtgagctgcaccctgacgatagcgagcttttgcccagttaggccgcatcattcagcatttgtaagcatcagatagagcaccttcagcatcacccatgagcaatctacagatgctcctgtttgcgtacaaaactgcagtcggtccgtgagcaagcctatgctcaagcatcagataaacaaatcattcccaagcttaagaataacgtacaaaaactttataacaacaataattgattagcgttaacaatcagaaataaggtgcaagaaattaccagatcatatatttttgctgcagcgccgtaattcttctgcttgaatagcaaatctgcctgtgccttcaaaacgacttttctactctccttctgatgttgatcctaaacacaacgtaaacaatagtatcctgatgcaatctgaagtaaacttttgaaattttgaataatagaacatttatttaggatgatttccattaataaagaaactaagcatctttatctccaacattcttcatgatttgtggttagtcctgtggcattcttatgctgtaatttaagcgtactcgatgatatcgataactcaaacagaactctaattttgatcagttgcagaagtcactaccactcaagtatagctctaattttcatcatttacataagtcacaatatgtgatacttacaagggaaaagtccccccccctctgatttatgtttcacatttgaattaacaacttaaggtccaaatttgactttctaagttgctgacaatcaagtcaacagacagatgggctagatgtattattatatatgaagagctcaagatgccacttatatttattattaaaatttgtatgtggaccagacttttaaagtcaggttattaagtactccagcgaaattgaagacttcacaactactccaaaggctgaaggacaaaacgggtttgttctacttcaaaggaatatgtatgataacaaagctaaaccagtactattaagacatgatccttctatctagtactattaaatgccattgatatgtaagctaacccagttttacagcctaacaacttaacaagcatcagagaactacgtgaagtggtgaaatagagctctgcaatgcaaagtgcatggtaagcaacacgaaatatgaacagagagcatagcagtatctttagtacaaaaagatcaaaagtgtgtaactgtataaaatgtaccattggctttgtatttgacttttgcatgagcgatattccattgacactccagtttgggacatttggaattgaagaagtcaatggaaatagcatttcaacttcttccctgcaatcatgtaatgcagcgctctattggcaaccaacccaactgcacaagcacaacaaaatgaagaaaagtcgcttcatacagtgtaattcagcaaggaacctaaaacaaacaatattggtgaaatcagtgtatggcctattatcacaatctgtggctttcaagtttcaaccaaacgactcattacgacccaaaaaaccatggtgttaggttcaaagctggccatgggatttttggacattgatatgaccttctatcaaaatggtcttttggatataggctggatttgagaactcatcggttactgaaaggtcatccatgctttgcacaactcgtaagatatacttacacatacaataatataaacgaacacaggttcagataatccataggaaactataaaatatgcaaatgataagtgcaatgtttttgttaacttaagccctgttcggatgtgataaggatgaagattaaatatggggtacgtaaaacgagaaaaccattagtgtatgattaattgagttttaattattttaaacttgaaaatggatttattttatatttcaaagcaacttctatatataaagttttcacacgaaatacatagtttaacaatttgaaaaatgtgctaacgaaaaccgaagtaaaatctgtatcttaatcataaagtaacatgaccttagtcaaaacagcctcaacttattgctaaaataactccctaaaataatcagagttgtaataaaacacacaagaatcacagacttatagaccagagtggagaaccaataactgactcagaagaatagaaaacatacatcatcaggaatattagggtttgctccagccttcagaagaaactgaatgaagttagtatagcctccttgcgacgcagcaagcatcaaaggggttacaactgtacccttgccattaacatcagcaccagcctgagaaaagcattgtgcaatagaatatttagctccataagttcatggaacaaatgtcttgagttagcaaaattaaaacaccgcattagttgatcaaatatagactcaataaaacactgacctttatgagtagcttcatacacttcaatgatcggtagataagggaactcatcaggggactaccggctccattattgacaattacgttagactgaaagcagaatataagaatttagcctcagtacaaccagaaaaatatgtgaaagaaaaagggaagcaatataatgctctaacctttttttttctgattaatgtttgccactttttataagtctaactgttgaagttagcaactttcgatgttgaaagaattaaagttgcattatgtgcatattttacagacttttaactaaaatagaaaaaatatattacacatgaaaccataattattataatcagagttcagatatatgtaatgccacatttacacaaatttcatgaagccaaactgaagttactgcattggaatggaagagattttagtggacatttagtgaagtcaatatcaaaccagaaggtcagcaatgagatagatggaggtacaaatatgccatgatgatcctaaagcatttcaatcattaagagatgagtagataaaagagcaggataatagcttatataagtgccatgaattgaacacctaaattctcatgctctttcccaaaagaacatcagccaaccttatttagagcatgccaaatggcaattttaggacttggaagtattactcaaaggtcagcggtataataataatcacaacgcaggtggaagatgctacgcgcgcggggtggctgtgtcgatcaggggcctctgtgaggcgcactacacaggttaagtagcacgctatcctaactctcatcacaataattcatttcataacaaaaaaaaaaacaatcctttttaagacctggaaatcccatatgatctaagatcctctataaaatgtctaaataaaaaccaaaatgatagattatgcactgcagtatctgagaatgggtcaatccaagcaaacagaacagtcccatgcaaacacgcatcagtgtacatcagctaatgagctaactatctaagtggaaaacaaaacaaacatctagctatcaaactagcagtgaaaaaaaaaaagaagaggaaataagaaatagtagcaactacatgcatctgccttgtgatccaacaaaatcttcagtgtcttatccttgccattgttagcagcatgaaagagtggtgttccaaggccacagtctatgtcaacaggtattccttttgaaagcaagaactctgttaccttacagcatcctgcaatgaatgagatgggccataaatcttgggggaaacaaatactatataaattgagttatttgaataaacatttaccaatacaatggacaaatcacaatagattgcatgtgagatgtgagcgagtataaacagagcaaaccaatacaactttgagtggtgatatataaactaaaagtatctagattagcaacacaataaaagataactgtgacgacatggttggattaaatgtaatctattaatagtaatgcagtatcgtagaatcttgtacaacaatataattggtaatataacaaggaaatggatagtgttcatatcaagggagacctgtgccagcagcatggtggagaactgtgcatcctctaacatctgcttttgttacatcaccactatgatcaagaaaatactccaccgtaggaacatcaccagactcagcagcggccataaacggtgttatatctgtaataaacagcacatcagtacacttggcacattatactgccaaagcatagacatggcaaccgtcaatttcacgaaaggatggtacagttagataatgaccttcttttccagcaatattcacgtcaccccccaattcctccaccaagaacttgcaaacattcagatggccctggcatgccgcggcgtgcagcaccccaatcccatgcttgttaagagctaagacggcatctagggatgcaagcgggccaactcgcaaacctacttatatgtaaaataagtgataacccgtgtgttttcacgtcgtggtccgatttgccgcacttagagatgcaagtgggtcgatccataaactcatttatacgggttacctactaattttgcctataagcgggttcacgggttgacccgcttgcaaccctaagtctttcctttctgaatcccaaggctctttataaaaccttctcccaaataagaacaaaaagaaaagtcatcacagtgaggaagataatctgaaaatgaacagattaactaggtagaacgtgaaaagaaaagcgacgaaaacgtgcaacgtgcaagaacctcactgagtcatgtgaacctataccttgtgacttgaaaacatttgtgtagagtactgtctgctacacatcacacattagcacttgggagaggtaattgtaatagaaagatgatcacaacattgtcgcatttatccaatgcaaggacttgctacaataaaagcctcagtcaggtcttgcaatttctagataagatggcatgcatctccagtaatccatagacctggctgttaattccttcacgcagggtgaaaaatccacgcagccataacatcaccgaaaataaaataaaatgtgggaaattcccaaaggcaacagcaacgcagcaagcgcccttccttcaaaaattccatggccaaattaattagcagtactacagccatcgccaagcgttccacacaggaggaatcacccaaacctaagggaggaaaatcacgcaacaggcgcatgcaaaagggggccaatgcgtagacgcatcgatcggggaaggggatcgacgcggcggagaagaagaaggggaggaggaggaggagaggtagtagcaacctttgaggcgtccgaggttcccgtcgaaggccgccctcaggcctcaggagagcgctctcacctgcgaacaaaccgagaaatcgccattagagcacatggccgaggagctagcaagccgatcgagctaagaggagatgcggggagagggcgtcggtggggcggcagtagacgaacggaacggcgccgccatggctcgcctcgccgcgaggagggaggaagcttgcaggaggaggagcggagtgggtggtgggttttgctcgtccaccacgacgagggcgagggtttggcggtgcacccgtgccccgtggactgtaggcctgtagctctcacgggtgtaccaagaccaggttcacggagccgtttgctcggtacggagaaagcggatagataggtagtctatgacatgggtggcccgcttacaggccagtactaccggaaaaaggaaattagtg

SEQ ID NO: 6988 - DNA, 28840 bp, Oryza sativa
  unsure (1)..(28840): unsure at all n locations
ccccccagcccccacgctgcctccgccactgcatctaatgcatatgttttataccaaactttcaataaaaaaagaaataaagttttttttcttcaaaatcctctggaatacttgtcttgaaatcttgggcgcactccaggaaaaaagatggagtaggaccaaatcagttctttttactcaaaacttaatttatggctatttgattgtctcgagatttgggcatacgagagcttgcttcgctagccagctggtatacaaaatacatataagttgcattctaattactatagttacatgtgaaagctttaaaaaactaacggatattgtatagctactctatttgtaagttaaagtgccttggaggtaaaggttgttcaaaacttaaaaaatatgctccctttgttcttagcttttcttttttaaaaaagtcaaagaaaatgatttgtgtttccagcctctatcgttaggcaatcaatttagttcggactttaatttaaaatatttaaaagatacgaggttatgtgacaagggaaagcatcctatatgcacataagctttctcatgtatatatcgtgcacatcaactaataaatatcataaaatattcttaaaaaatatacatatactttcaatagtactacatatgcgtatagtgtcacatcttcaaattcattatacacagagagagaaagaattctgacatatttatagtcttaaaactgtcaaaattccttttttaggctggaatataatgaacttaaggttaaaactttacacatagatgtaatactattgaaagtatatacatattttttttaatttattgtgatatttgttagttgctatgcaatatgcataagaagcttgtgtacacataatacatatacttccatgtgacaaaccccatctcccttcaaagaaatgagttgaactaataaaaagacatcacataaatttctataacagaagtttataggaactagctacgtacaccacctaaagtaggacgaaagactcttgatcatagatttattgcaccactgcataaagtatcctgcaaccctgtaataacaccatagatccagagtgaaaccaggtagaagaaatggatataacatttattgttggatagatcattttaggatgcatgcaaagtcgctaatatactgaatttttttgagagatttgaaaacaatgttagtagatttgtcaaaaaaaaatctttgatttacttgtacttttatttttttttatgaatatatgaataggaaaacaatgaaccaatgatcaatcattctcgctggaaaccttatatatgttctgaacaagtaaaaaattaatgcagagtatgtaagatagggagaaactattgaagcaattacttttctctgcagagtatgtaaaaatgatttttggcatctaccattcagatccacatgcaagcctgtgacttgtaaattaaaacgactgaggcgttttaaacttaacttcgcttgatttttcaactatacttaattgaggacctccattgttgtgacacgtgtataattacacgtagccgtccaatgtcgtcatttgggagattcgctgaggtatcgaagtctcttgactggctccaaagatacgccttcatctgtatctcccatgatgacgaactactaagagataattaagctaggctaatcagtgcctactaaatttaattgacgtcctggacagttactaggatttttcttgctgatatatatatgaccacgttaacttggtcagttatatcacacttcaacagtaaaaattttcaaaagaaaatgtcgctcctcgatcgtacgtacgtataaattttgactttttaaccagtttgtaacaaattccataaaaattccaccaacatcctcatcttatgtgttctatcaatttttattgttaaaatttatgtgtatttgtaaggatgagtatgcccatatgcgtatgtttatatgaatatctacgtttatactatattttaagaaaaatatcccccacagtaaattgatttttgcgaggcctcaacgagtagactaagagcaggtataatagcaggctataaaccagctataaacataatttaaagagataaaataggagagataagagcagcgggctacatatttgtagccagcagcagcacagactctaagacgtatgtgtgtataacaggtgggatcaaatattgattgtgttgtatatgtttatacgtaactattgtatgaattagctattaagttgattatagatgatttggagccagcagttagctatactattaaacttgctctaagtgttagagattaatcaagcagatatgatgttaatgaactgatgcatgcaaagccagaccgatcgatatcatatcgaaggtcatgatcatcaatatatgatccgaggattaaacacaaaactcaagatctcattaggtacaaggatcattagtgacaccgatcgatgaaccatcagaagaagccttctagcttgtttgacacggccaattttaacttctccagatctacgaagataatcgaagatctaatcgtgtaccgttgacgatctctcatgctgggactgtctgacatactattatataacgaactcgattatcatctggattaatacgcgagatttcagatcagaccgaatcgctcatgatgacgatgaggaaatattttgcttgacatgaatggcacgagtttcttctgtgtttttatgacagctggttcagaaatattgacttaagttgggatcgtaggaagaagtaggcacaacgtttttctggttggatggcactgccagtcacagctgcggccacattgtactaatcaatgtactggtcctatgctttgcatcaatgtagtccatttgtcatgcacatgtaaaaacaaaaataatatttttccccacaaataataataataattttgattgcaaatagtactacgtcatattcacagttaaatttgacattgcatattaatttatgaaatatatatcatgtattgatctatatgtcaatttttgttttagattgttttagctttttttacccatgtaaaaataagaagatatccctcgagggatgaatagattttccgcctgcatgactacattgcattttcatggaaagggtggtgattgtcaatgtcatggcaacttgggagatatcttccattgatcgtaaagttgacaattgttagcaagcaaatttagcttctttcaatgaactggtaccctcatgtatatgtatatatacctgtttggctgccttttcttctagattacaacacttttgccggccattgcctgcacaacaaggtcaaaggagaaagatgtatcaaatatttgcaagttcgtagggtatggggaattttttaaaattttgaatgtttctaaataaattaatgattactcctacttactaacttcctgctatttctgaacgttggcacgccagtgtgagtgacaatcacgacaataatgccgcggctatgatggtttggccacaaaactgtgggcagctcccaccatggcgaggcaacatggtgtgtatttcaaagtaatttcgaagtaagtttcgtgtgtgtgttttctttaaaaagcttaaaaaaattcctaagctatgtatgcacatgtatagctagttgatgccacttactctcttctcttctggcgatacatatttaggcccactttgattcaaaggaaatttataggaattttaaaggatttcattcctataggaatttttcctatatatccctttgaatcaaaggaatgaatcctatgggatcctatgaaattcctatggaatgcctcttcccatgcaaattttggaggaaatttaacatgagtttctacctcattttaagaatcctttgagtctttctctctcctcaaattcctgtgttttttctacggctcaatcaaacggtcattcctatgtttttcctgtgttttgcaatcctctgttttacacttgtattcctattaaaattctatatttttcttattcctccgttttttcattcatgtgattcaaaggggccctagcttgtttgttttggaggaaaaacaaaggatctagattcctaaggattaattcctatatgtgtcattcggtttatatgattgaagtataggagaaccaatagaaaatctcggttcctacaaattgtatagcgaaaacataggaatttttccatccactgaaacctgttggaaaaattcttatagattgatgtgtgcacatattcctatttcttcacgttttctattcctatggaatagaattcctctaaaccgaataaatccttacccctttgaatagcaggattgaaaaaaaacggagtaataaaaaaaacacatgattctgataggactgcaagtgtaaaacagaggattgcaaaacacaggaaaaacacatgaatggccgtttgattggaccgcaggaaaaacataggaatcagatgagagagataaactcaaaaaaaatttaccaagaggttagagtggatgttaaatttcctacgtttttcctctagaatcataggaataggaaagtttcctacatttttccttttctcatccctacgaatcaaaggcataaatagtgtagattttcaattcctttgtttttcctttatttttcctccaattcaaaggaggcttattaacatttaggatgagacttaatcaaaattcttggtcaaaagaaacagatttgatcaaaattttgaactttgattatcaatatatataactactcaaatgcttagtttaaaaataaaagaaatggtacgtgttgcctcggaaagcattgttatcatatcataaacttattagattttataaactaatataaaattgatgatagaaaatttaaaagctttaacccaataatatcctaaacgtgaaatatttatgaccagaaggagtaatagggaactcttttttcatcaaatagtgggggacatgtgttttactcctccctcggttataactataaatatttctagaattcaaattttgtatcacaatacaagcatttgtgtgtggattcccatgattctcattacttcaatgattcgaaaatcaatccaagtatgaagtatctaagcaattcaaaattcaaaaattggcaaatgaagtaactaaaaaggaatcatttgatctaacctctgctaaataatttagaaatccttatattttggaacggatggagtactagaaaagcattagcatttcttgtagacgatgcatctagcatcttattttcaaattcgcattcatttcattcatccgttgatgtctttctctattatgttttttttataaataaaaaatataatagagaaaaggatctgagctgagcccaacaaaataaaagaatcagagctgagccccaaaaaaatagaagattcagaggattaaaattattaagaagttcgcaatcttcacatctctatatgtgcgactatcagttcatatactactactaataagtgaactcatcacttgccaaaaagaaaatgtcaactcgtcaggtgtagtgacatatatatgcagggactagctagtaacacgttgtgcagtgcaaataaactactgaaaattaagttttatgcaccgaatttgacaagttaacttaattaacaaatctacattaatagccatggtcaacagctgatggagcatctccagttctccaccgtgattaattggctcaacacagaaaaaataactgcatactgtattaacataagggcgttggaagatcatatttttccaaggaacacaatttagttaagtttcagtttataaggcattgaccgtaaccgttccaacttccatttcttgaggaaatgacttcttcaaataataactcaggggagatgtaccacatctataagttacttgtccacaatttatccccatattttatcacgtcttccaatattcaagagaaaaatatttgattacttgttccttgagttttccataacatgtttttttatgttactcagagatcagaaaaatgtaccatttatgctattggttagaactcattaggatgtagtcagttaaaatatgtcataattttgaattcaatcaatcattgagaagaagaaaattagtccaataaatcatatcccaaagtcttgctgagtgctgacacaccataaacaaacttataacgatataaaaagaaagaagtatctattccttgcttttttttatttatctatatttccaattaagatgaataacatgtatagcagcactaggaaattcgtagtcaaccagtgaaacgtctgataaacaatatgcctgtattatactttgttaatctccagcagtttgactacatttgagattatactatgaatgaatagtaaataatttccttacatatataactatatgatccttttcttcatcatgttggcaaataaatgctaatctttgtacagaggatatcattttcttgtaccaatcagattatttatcccagtctaaatgaagggaaatagggcttgaaagtgtcagatgggcagaactcttggttatgcatctcttgcagagaccaagagccggtccttccattatctagatagatgtgcataagcgataagtctagtgtattgactagaaaattagcgtgccacattatagcccgtgtgtacttgctaagtagttttcaaaattcatgtctataaaaggttggtaaatgaaatattcaatggtgttattaaccgatgcaacaagttaagctaaattagcttccatggcacttatgctaaaaaaaagtaactattaccctttaagaacaaaaaaagtaactattaccctttaagaacaatcatcaaaaactggataaaaccatagataaatatatatttacatgaattcactaagaaaaaaagcctgatactaccatagttgtatacagtctttttttttaaagaatacagtcgtttccggtctagcttctagctacggcacaaagaagaaacacaacaatgtagttacacaaaaaaatttcagaaccatagtctttcacatattttaaatccggaggtcatgatttcgagcaccttgtaggcggcaacaatttatatctttggtatcttgcatatccctagaaatataaggaggtgaacacaaattagttggacctatactgactatagaaggagatcaagagcaagagacaaggttaagccagattgttctggtgggctagtggcacagcagcaaaagctatcagagacatggcagtaaaactatgactatttttagattgaaacagcagttccagatctaaaggaaaactattgtttgtcaattgttagttcttattatgggtgcattcaaatgataatggaacaacctgttgataggcccatcaaagtgataacatccacccaacagaacaaaaaggatgggggagagggatacagagaaaaaaaaaatctctttaggaaatattttatctttatatatttgtcagataatcgcaaaattccatgttcagataacactatattttttccatatatagagaatgtggatagaaatataacaagctcatgatgtattaacttaagaatgtggtcatcatgaacagttgcaatcgatcgcaacttcaaaatttctgaagtaatactcaggacaatcccttgaatagaacaattgcaagttgcaatgagcgcactaaccaattatgatgcaaatgtcagtaaattgcgccacttttatagatcattttcttttgtcaggaggagaagtactctcgaaataaactactgagcaggattgagaccaaagaaaaaactatgtatcaatgcagaattattttcatgattataaatgttattagaaagggtattcagaagaaaaaatcaaacttgagttttgtcaagaaccattcctgattatgttcttctagcgcattaatatttcttttccagattatgctaactgtatatatactaatagctctaactcatgtataattcgattgctgctacgatggaatcagtaatacataacttaactcattagtaatccatataagagtttcataacttagcatcaaattctgcaatttctagttgtgtgtttctcctggatttctgcagaagtagtatagtagcaatagagcaattaatacactatccaacaaaatagtcctaactgtgctatcaaatgcaactctaagaaagaacaagatatattctttcttggtcatttcatcgaacaccatgaatgcacagttcgcactacaaatcagcaaccacacgttcaggaaaataaattgaacaaacattacactgtagcttgctcaccactgccggccatggcgacgaccgataagcgcgctctgctggccgccgagaacggccatggcggcggcggtccagtcaccgtgtcgttcaacaccaatgccatcgtcctgctcgccctcctcgtctgcggcctcggcgcggtcgcgctccacgtcgtcctccagtgcgcgctccgcgtcacgccgtaggctgggatccctgtcgttggctcgccggcgccgttaccgggagcgggaggcgtcgagatgagatcgattggaaggggaagaggcatgaggtcgatcgacccttcaggagaggacgagaagctaacctttttgcattttactccttcgctagatcatattttacattttagcccttcgcgggaagagcgtatgcacgaaccacgcagcgccacgtggcctcgctaatcgcacgctaatctgcatagatttcgatatatagagatagagatggcttgtccgctattgattagcaaatatcatatgtatttcccatagaattgcacttaatactattatattatcactttcagtactaggattattttatataacacacatgaaatacatttccttgtcttactaaactaacagagaagaggacattgtagttctaaaaaaaaaaagaggacattgtacctgaaaatgggcctccatacactgtacatgaaaatgggccaccaaaattctgctcggcttgctacctcactatcttctggaatgacctgtagcactcaaaagaaaacggataaaaaggatatacattagcaacacagcattcagcaatgcggattcttgatatttcagtttgattcaaacagcaagcaaacacactacagctaaaacagatatgacaaacaaaagaaacattacagattagcagaactacatgcttttcagcatcttaagcctccaagcagaaaagggtactacaatggtgtggatataagatattgtgagcaaattcagaagtcaggaattatattatggaaccaatacaagattaccaaccctgatcaacagaagttaacagaccaacccactacatccaaatcatactaacagcaaaacaactttatacaagaaaaaccttcagatcatttttctccagataatgtgagaaattatagtagtagtagtatagcatcccaacaggctaccgggtgtcaatactgtctgactaaaatgcaggcaacatttacgcaccaaaactgaaaaccattttctccaaaggatggaggatgtattatcaaaggtatatgcatacaacatttttcattatcgatatcaaagaacataatatggtgatacaactcagaagctgctacaaaagtacatgctcaggaccttatgcaacattctatggtattggggaagtaatatataatctataagatttgacccagcaggccttttccatgctttctcaaactgcatgaattgggctgttgtttctcttatttaggtcaggtccagccattggtgggttcacatgaaaagctgattgtcttgtatttgtcggtccagtaagctgaagggaaagagcagagggttctatggagttagagctgccgtcacctatggtaagcttggacatgccaacaacctcatcagccttattgatcacctcctttccattcactggagtgggctttaggatttcatgatttgtgcctgattcacccacattagcaacatttggaggccaaagagttagtggaacaggtattaatgccgggtagaatgttggcattgtcagaacaaatttagtcttgaaaggtgcagcatggttcatctccaagtctagtgctgctagtgaaggttctgtgaactcagattcctcatgcttccttagctgcaaatccgacaggtgtctagcaaactcaggttccttctgtttcacaagatgtgatattggcaattgatttgagcttgtggcttcgtcttgagtactatggagcataagctgttctacgaccactggggattcgtccatgggctgcaggttgaagatgaaattcgaacataagatggtcgtgatatagaaatatcaggacacaatttaacatatatggagataatagacacctcctgtctcaagcgaaaattgcaagcaaaaattgcataccatttctgggaccatgtcaaacaagcttgacctcctcttccttcttgatgagtttgtctgtctaatgaagtacttttgagcatggctagccacctgagttggtgtcctggaaacaacaaaattacgagagatcccacgccagtctcctttaccaagcttctgcagacccattagaaacattctatgctcttcttcagtccaaggtgtacctgaagcacaacatcagcccttgagttgaaactggactgaaaaatcccagatggtttctgtgaaaaaataatccacgaccccatttttttagaggaaagatcattatattgatagtgacctggctttttcagagagccaacagtagttcaacaaagaggtaaaaccaactcacacaccgagggttacacccactggatcattccagctacggagtacatgacaagctcagccaaaaaacacactggaactgcagggaccagcactgtagcatactccctctaacaccagaatactccccattcactagcatgtattcattacaacaaagacaaagcatcaatcactacttttgagcttgactacaatctcaagctttgggtttcttactttgtttatatataataaccatcaaccttgatgcatctcaatctagtgagtttaatattagatcagtaatgctattctctgtagaataatatgcatgagtctataattgattcatctgattccatctcacaaacaatggacactccagaaccacaataatagctttgtaaagaagaaagggtagataagtttgccttctattcagtactactccctccgtttcaaaatgtttgacaccgttgactttttagcacatgtttgaccgttcgtcttattcaaaaacttttgtgaaatatgtaaaattatgtgcctacataaaaatatatttaacaatgaatcaaatgataggaaaagaattaataattacttaaattttttgaataagacgaacggtcaaacatgtgctaaaaagtcaacggcgtcaaacatttcgaaacggagggagtaacatagttgaattctgggtatgcataatctagaatctctgttcaccaagatcaaccgctcaagcagcaggtttttccagcacaagaaaaatatgaaaggggaaaggaaaataactttgcctctcatcattaatacgattaagctctgaagctgcccaacttggatgtacatgctgcaagtcctccatagaaagtatggatatagactaaataatacagcatagcacttgtggtggacactcacggttcaaaggcctttcaatttttaaccatgtaaaaagaatgtccagaaagcatgacaaataactattggcaaattcattgccataaagttttacagcagaatcagcatgatgctgtcatgtagtagggacaggtgcttttgtttcaactaaagatgttgctcatacaagggaactccattgtgagttcccttttgagatttgttcttaattcttttagatagatggcttcatcccataaccactagcgccagctgattcataataatcaaaacagactcaggctctagcttggtctataagtaaactaggaattgcccctacagtttctttgaagccaagtgccagtaaagtctcttctacatgtaccaaaaaaatagcatatcactaccaaaccaaatacattaagaaagtacatagtgcacacctaggactggtcaaaccaactggaaaccaatgtggctagattccattaggatcaggtgattaaattaaaggtcaaagagacgtggggtccttagcccgggccagtcagtgtccctctcggaatgtgatctatacaggtcttcttgcgatgcacatgtgcacgtaacttaatcagatgggaaaagatatttagctaggttgattagtgtcggccattctggacggttcctatagattgcatcttcagcaatgatagcggccataccttgagtctagcgaacaaaatagggaggcgtgactattaaaacatgtctccgaattcattacaagaagatagcttgatcttctctacaaaattgtcaatcatttgttaatttcttgaatcaaattgggtctttaactctttgatatcaaaaggatacatctttttgtttctgttgatgattttccttatctttaatgttgctatcttggttgcataaaggatccgtgaaagtagaggaacataccacataccgacaaattaaaaggaacagtacattatgcgattcaaccacaaaattttgttttccttgcgcacaagttgcgatacctgaagcaatcgaactagaatattttatttcacaaaaaggaaacccatatttttccttgtcttggcagcaagaaatgaaaatagaaaagattcctaccgctcgctgagccgagcgtgctccatgaggcggtaggtgcatggaacgcgacgcgttaatcagaagcaaacaaacgcaaaacgcagcatttctacttgctcagttgattcaccaagcagaagagtatgaacagcgcgcagctgtacctctcgtcgccgcatttcatttcaccgagcacgcagctagcatggacaggatgcaagctagagtgtatgtttgaacggaattacagaaggaagaagaaagaagaaaaaaggaatctaacctttcttccgctcgccgcggccattcgtcgagcaggaggcgtgcgtggggtcgtcggacgcgtacccggccgcgccctctccccctcctcctcctccccttcccgttcccgccggcgacgaaccccctgacccaccgccactcccgagcgacgacgcgatgcagctcatgctcgcgctcttcttcatcgccacctccggcggcgacgtgagccgcacgccgaacagcctcaccccgcctccgcctccaccgccgccgcgggcggggcaggtccgcgcgttgtggccgttgttgctgcagtgcgagcaccgcctcgtcatcgcacacgcaccgtgacaccacgagatcaccaaaatgcgtcgcctcgtcgaccctcgccgccgccgccgccgcgcgcggtgggttttctccttctctatctgtcttcttgttcttttccggggaagatgatatttttggccacttaaaaagagcggcgagttgaagtgaaatgacggaaaaggacatgggctgcggtggtggggggcgggggtattttgggaattggcggcttagctgtggccacgagatggacaggaagcgacgggggcgagcgtttcaccggcgagtgaagcggaggaggcggacacgtggcgcctcccgccgccgcctacgacaaagtacgacgcttaattaaccacagtaaaactgcctacggcccgtactcgtaaacacaactttaactttttatttctataaaaatatttattgtaaagtgatatatatacttttataaaagtatttttttaagataaatctattcatatattttttatatttttaaactcaataatttaagagatattcatgatttatattcctaaaatttgacttaaacattatcttaaacgacttcctttataaatatagagagagtactttctttgtaaaaaaaactaacttctgaaaatgagtctgaaaaattatttatctaaacttattcctaaaatgttattttttttaatgaatggtgcattactctgtcttaaaaaaaatcctacctacgaatctagataatacgttagattcataaataagattagattttttttatggaggggtaggtagctagcttgatcacaattaaaacggtactccctttggttttaaattggagtacaaaatttttaagctttggctagtctctgtttcttaaacactttaattaatattgtacgttttagccccttcatcccaaaactctctccatttcttttttatttggcattgcttagttaaaaaggaatgaagggatatatgcatttttagattcttagcaaacaaagtgttctaatctctacagatagagctagctacttaattcttcatttatagtgagcatgtttcccaaattgctaagcggtgcaattttttaaaactttctatatgaaagttttttaaaaaatataaataagttaatttgtaagtttgtaataattgatacttaattaatcatatcctaatcactcaccttgttttgtgtgcgaagaaaactctgcaaccaaacacaccttcgaacgaagcctaagtttaacagaagatagtttcttttagtcattttagtggtaaaattttgaattctgaatagcttatgttccctttccaagcatctcactggctgaaaatgcataaattccatgcatatattgaaatcaatgtcccagaaaatgctatattatgatataaattttaaatcttaaacatacttatattttgaaacatagggaatatcgtaaatataatcagaaaaagatactatatatacatactaatttattcttatagaacttttacaaacactaatgtgtatatagtgttgcaagtacatctaattaaattctctataactctcatattttatatagtaaaattaaatggttgagattattgtttggaagagttcttttagtttcgtgtagaaaaccatgacgactttcattaatagtagttttgatacgattaatatatagtcaaccgtgacaaatacatattaggatatactagtaacaattgtacaatgattttacatttaattagcatattgacttcttgattttaattaaccgcggctgttacttgctcctgcatcttcttcttcaccaagacaacaacacacctctgaattaattatacagtagattctgccatattcactgcatctcgttgtgtgatgaaggtattgcatgcattgcatggagatctcggaatgaacgatggctagctagctacaactccagcttaattaagccattgacttgatgatagttcatacctaggtatagcagcagcagctttttttttcctctcctttttcccctatttttctcgacgccgtgaacgcacgtctcttatcttgtcgtagataaagaagaaaagaagatccatctatccatccatgctacgaaacagaattagaaacgcgtctctctctctctctctctgacttccttgctagcttctcctaccactatgaactatcctatacgctatagctactatcagatcttctattcatgaaagtcatatgatctttcttttttagtttttagatatatttatgagagtgtgatattttttttatatatatagataataatatgagtgagatttttggatgttttctcttctccatccatctcttccattgcatccatgcatccatgccaactaattatactcactagctgctagctatctagttcctgtctacagaaaagaaaaccttatcttcctctctcagcagcttcgtagcaagctcacaattcattcattttatgcatgccatggaatgttccagaaacgtacgtgaacctcatggaaaattacacgacctgctgtgcagtcaatacgtatgtaatacacgctcgtgctattactttaactcaccgctggaatattattacaggattaagggagcacatcatgttcaacttgcagaaaaaaaactgacttaatcggctccacacaccccaattcttcagataaaacaggtataaattaccgatttatctctctgcgtgtgtactgcaaattcagatatataagtgttagctcaagagcataaacatgttcttgcatacttttgactctgaattatttatttttcttcagataaaaagggggcaagaaactttcggtatctgtctgaaagagctagctagctccaaagtctccaaagtaggtcaggaacctctctgcaactttggagcatctaggatagcaactcacttgctcactccagacgtccatgtcgttttcataatcttctatcttttattttggatctcatgtataatctgaactctgtatgcactacgcaaagtgcctgcatgctgcgtctgtcatttattttatcttatcttctctgcacaggtgttcgttcctagttaaaattgacagtttgcaagctagtagtaaacaaatgctaatcattgagacgcaaaaaggctcagatcgatctcgatcgagcaagtagctagggaatcgagattaattactgttctaaactgcatccgctgtatcattagtgcgctgcagaatctgatttgctgtcaggagcgttcagtttaccggtttcagactttcagtgattctgcttgttatattctggcttagaagagatgctaaatcaaaaggttattatatgtgcagattttgtcttctagttccaagaattgccgaataagtaaacatagtttaattaatgagtgaactgattgatggttaccgaaaagattgggatgctaattcgatcaacagctcgatcccctgtagatacagttgcatcaagccgaatatattacacgaactgttttacaaaagctataacattcagtgatatttgttccattaattgtcaaaaggaacattgatttgtcaaatcaaaaggggggcatcagttcatcactgaagcatgcatgccttcacttaaattagttctcatgtatatattcagttcaggaagcccatatgcatcttttctttatccatgtgcaggccggtttagcaaagcaaacaactaaagctgggtcagctactgggcaagtgtggtcacgtgttctttgccttatcaactaaggcatggactgatcaaacccatgaaatgataaaacgcatgtgcttttgcagttgcagtgcctgttcttttcagcttttcagtaataggaaaaaaaaagatgagatttgaagggagagacgtccctccaaatatttttttaaaaaaattataagcgtattgaggattgaacacaggagttcagagttgaaaccacacatgacacaatcgagtgcatctctagtagtagaaaaaataaaaaaaaatatgaaggaaagagatggagaaagtggcggtgtatgtgtgcgattgctggagatttcggcccaggtttagcccaatgatacaagagcgacccaatttgccaaaattatgaagcccacctagctatatccaggtttacaaaatgcgataaccacggttattattaccgatgaaaatcagcgaaattcgataaaaaattgccaaccatttaaattttgattttacatctttctgggctaaatgcctgtctacagctagaagacctgcttggccagaaaattggccacggcgtcgaggatgacgtaggcacgactgtggtgtcggatcgctgtcatgagctgggaaactgttttaacaaaacagctcgagtggatatatatacccatttattatatgtcatctaaattgttatgaaaaaatagaaaaaatatgaacaagatagatcaatatataatatatcaatgcacaaatatgcaagttaaaattcaacttctacaaattgtaacaaaaataacaaacaaaactcaaattactatatgtatatttgcaattaaatttgttgtttttgttataacttgtagaagttgaatttgaacttgcatatttgtgaagtgatatattacatattgatcaatgtttttgaaaaattttcgtaaccatctagttgacatgcaataaacgggtgaacgtccactcgaactagaatccatctccgtcgtgagctctccctacttgctgtacttgaggctgaaagccgttaggggatgacataggggccccacactatttttttaatttatgtgatgagtggtttgccatgtggactcaacgaaaaccgtctaaaaaacaattgagggagacgtttgaaaaggttttaatagttagtggggtgaggatatccggtttttagagttaaaaggataacagtaagattttggcattctaacctatattgagggactcaggttgaactttttgcaatccgaatcgatttgatagatcgagtccgaattgtagcggattctcaaggcccgcaaccatactagcccactagtccgagttgctagaatttgttgactttcaggcccagtagaatctggagatttcaacacgagctaagcccaaaatattgcggcccaaatctttcagctcgatagactggccccaaatggaaaacgtccactttgactcccttaaaagtaggccgaatctaattcatacccctcaactgaaaaaccaaatgaaaaaccagataagataactcctcgaactattgaaaccagtgcaatttgactcccttagcggttttgaagggtggttttgctgatgtggcgctgatgtggtggtgttgacctggtcttcatctcatgtgacgcctatgtgacaataaaattaaaaaaaatctgagagacccatttgtcattcaaataaaaaactattgtggagcccacctatcttcctttctctctccaacctttcttcctcctccctctctctctctcccttgtctctctcttttctttcctcttccgtggtgacggcggcgggcggcgctacccctgcagagacagcgggaaatggctcccactgtcggggggggggggggggggaggtggctggcgttcgggggcgtcagtgccgtccgattttccggcggagagcttcgacgaccggcggcagaagcaggtgttcgtccgtggccggatgcccagcgcggccgccgtcgccgggtacgtggtcctgtcggtcatgtccaccattgttgtaccgcgcctctacactgagctgaagtgccaccacgtcgccgtcgcctgcatcgtcgcgctggtgctcgccttctgcaacacgtacgtcaccagcgtcatcgacgtgaacatcgcgaccaccttcggcaaggtggtggtcctcgcattcggctcgtgggtggggctcaaggacagcggcgtggtcaccgggctcgccgcctacggcgtcatcgtggcgaccgtctccaccggctccgacctcacccaggccttcaggacgggctacctcaccctcacctcgctgcgcgccaccttcctcagccaggccgccggcatggcgctcggctgagtcatcaatcacgtcatcttctgggtgttccacaacggcggcggcgacggcatcgccatgctctgatccgaagaaatttggtgtcctgctcctgcgcgtgagcgtaacgacgtcaggaaattgctcccggatttggagcggattcttgccttgtaggaagatcctaacctatcatatcttattctacccgagctttgcgagcgtttcctgaaatcttcctgtgcatcttcaagaagtcatttatctctttccctaaaacgcattcggttccaaattaaggctgacttgtataaacgctactataagcccgtaataacacggtaattcttgtttggttcaaaatcttgggtaatgagtagtagcaagctcgccatcacgaggagacgtccgcgggactccaccaggtagcggacaactcggatactgctcgcctcgccggcaaaacgggtccacctcgacctcgccgtccccggccatcttccccgcacccccgcgccgtccttggcctcctcctgcagccgcacccgtagtcccgccccccgccgccgccacgaagaggaaagaaaagagagagaagagagggaggaggaagaagggttggagagagaaaggatgataggtgggctccacaatatttttttttatttgaatgacaagtggatccctcatatatttttttaattttaatgccacttagacgtcacatgggatgaagagcaggtcagctctaccacattagcgccacgtcagtaaaaccactcttcaaagccgctgagggagtcaaattgcactggttttaatagttaggagagttgtcttatctggttttccggttgatggatacgaattagattcaggctatttttaagagagtcaaagcggacttttccgccccaaattgcatctgtttttaggtgggctagctactcgtctgaatcatggatgctaaagattagcagagggatcaagcacactaatcacgttcatttgtgtcggaagacacgacaaatcaatttttgttgattgttattatccatcgccacgtgcagagtgacgtaacgtgaatgcacaggagactggtgtttggcgtagcagcatgtgattagttagttagccgtcgggattgtctacactactgctgatataatagcaaacacgaatatgtaaattcgaattcatatgtcaaccactgttgtcgcgtcagcaatattgcataggatttgcatccaaagttggtgatgaacaagcctcaggtacaccctggatcctagagtatttggtactacaagcagatgcagttttcgtttcttacttttgcaaagtcggaaaaaggaggagagtacttttggggttacaagtcaacatgagtcaacactactagagactgcgcacatgacaaaggtgacagataagagagaacaaagaacaaagaaagttcccctgcccatccatagttgatcagattcggacgtgacactaaaattcacaagaagaaaagaaatctataaagttcttaataagtactgctagtattctctctattttataatatacatatattataaatcgtttgtctttttcctattaaaactttgttaagtttaataatacctttttaaaatatattttgataatatgtttgttttgtattgaaaatactatttatttttcgataacttgatcaaacttaaaaaatatttgattagcaaaaagaaataaaataatttataatataaaacagagggattaataaagaaaaagaaaaacacaaatatcaatgaaataaccaaaaagaaaatccagaaaggggaggaatttttcttggcccaaacaccctgaccgtccgaggccaccaagaaagaaagagagagatccctttttgctttgcgcttttgcaaacccttttccaattcttcttctttgcgcctctccaaccttcctccgtatatatcaatcatcgcccaactccagctcccaactcccttccctctcctctcctctcctctcctcatccggagacgccacgccgacacgcagctgcgtgtgcgaggaggaagaaacccagaggagcagcaggagcgaagcaggaaggaagcagaggagagggaatccaaggtgagggagggagagcatggagtgctccatctcgaggacgaatctgaattgcatcagcctgggtgacccggacaccaagaaatcggtcgcgctcctcaagcaggtcttcttcccttcttggaattcgcgattttctttaggctgtactactactctggatggatggatggatggattgtcttgacactctggataggatagcagaaagcctggagctttcttcgttgagaattacgatcatcgctaaatttcccatctttgtgttactgctatgctagtttcttatctgtacctgtccagggttgtttttccacctccataaaacgttcttcgattttatttttctaataacaacaaggtactctagcatctaggaatctgcgtgttacaaccgtttcttttttttttttgggtccatgtagcagttcattgggttggtccgtagaagtagatttctggatttcagctatgtgcatcggttcaacaaagaaaacgtgtcctttgttattgtttactctgcttggtttagtagagttatttgcactgatttgtgctaccctttgtcaactgttgctttggcctggatgctaatacctcgtccttagcatgattgcaccttaaattaaggattagtagtactaaagatttgctgaggtgagatgagagtgacatgccatggcctgcctctctgatctactatccaactgccatggaagcaccactgaagactggcttctccgaccttccacccgatcctgggcgatcccggatcgagccagatattgcctggaggcccttctccctatgtttgactcatcctagatgggttcacacttgtcgattccggtcaaagaaaaaagctttttcacggtcccatcacaccaatctacgcaacttgcagtcgtcgagcttggatggaccatgttcggtgctacttgtttggtgtagtcatatcattacctggatttgtactacattcattttcgatcacaattccccactgtgcaaatttgacctcagtttctgttacatatgcccagttttagaagaatatcaaagtacaacgcgttgcgtggaattattctagctgtaccattacattagttatctcatctattagtcagttaatctgtgccatttgtctaaactattaatgttcatcttacctataggaactgaatgagaataagatggcactttgcagtcatatgcataaacttctaacatcatagtattatattcctagttctactaaaactgtccaaggactaccatttgtgccttgagaaacattttacaaggttagaagctgatatagctaagttttctattatcgtcagatgaaaaatatagcaactgaattacatgttctatcagtgctgtaagtgggtcattaggcatgtctttgatgtgaactttcagacttcattgtcactgtgctctgctggttctatgtattttaatagtttttaaccatattttttcctaaacaaatgtttcatccttcttcataggcatgtctggattcaggcttcttctatgtggtggatcatggaataagccaggagttaatggatgatgtttttgcccagagcaagaaattctttgaccttcccatcaatgagaaaatggagcttctccgggatgagaagaatcgaggctatacacccatgctagatgagattcttgatccagaaaatcaagtgaatggtaataatatttaactcctgcatgtgttgtttattattaaaattgcatgtcatgatgtactgacatactcttggttttgagattattagcaagctattaaaattggtagcaacagtacctcccaaagaaaagttgataaaaaaaaatgttatgcatagacagctgccttgagtaaacctcatttcattttctacagttatgtagtttttcctgctccaggtttcatactattcatacttgtgcattttcaggtgactacaaggaagggtattatataggtattgagataccagaagatgatccacaagcaaacagaccattctatggtccaaatcagtggccatccgatggtgagttgtctttcttctgttattagaaaaaagaaaagatctcttccaaaactgaatgctaatgaataaaatacacactgtctaagttattccatctatactatgctgttatgaacaacagtgcagtgaacaatatatacatgtcgaacttcaccagctcaactattatactcacttcgttacaaaatataaggtattttgattggatgggacacatcttatatccaaattcgtagtaccaagatatctctcatccaaccaaaataccttatattttgggatgaagtgagtatgttggtgtggcagtaaatccaccgaataagcttagcatccattagaagtactaaccctttgatctacaattcttatactttggtacttgataggaaggaaagttcctcggaattgcatggttttatttacttattttgcaaaattttcccttgcattatttcagaagtattgccaagatggaggaaggtgatggaacagtatcatagcgaggccctgtaagttttggacatgctgaacacacaatcaaattacactttgctatatatggatcagttcaacaattaatattgtcaagtgatcagtgatgatcaattaggtttaaacacttatcaactagccgttctctaaacctgactttgcagcaagttttggtgatgctctttttgtatgatttattactgtaatgatttgatttgcattctaatgaattcaggagggtggcaaaatcaattgcaaggattattgcccttgctctaaacctagaagaggacttctttgataaaccagaaatgcttggcgagcccatagccacattaaggctcctgcattatgaaggtggacaaaaaacaggtcatgcattcttgccgttcagtattttattacacaagaaacataacgaattctgtcgtttgatgttccttttttcatcaggtaaagtatcaaatcctgcagagggagtttttggagcaggtgcccattctgattatggcctaatcactctactggcaaccgatgatgtagttggtctccaagtaaatgcatcttgaatcgacaccttatcaaatgtttcattgattttcgtgacttctaataaaatggtagttttccatctgaattatgcagatatgcaaggacaggaatgctcagcctcaagtatgggaatatgtagctcctgtaaaagggtgagcttgctaatctaatcacttagcaatatttatgccaaattctgatttctgtgttggcagtataaaattgggatgtatcaatcataaggtattctacggcctatgccaactgttagtgaagatccttacatgttttccctctattttccagaggttttattgtcaatcttggcgatatgctcgaacggtggagtaactgtattttcaggttggccaaaccatcccttaaagcatgttctttggagtcattgtttttctttaggagaaccatcttggtgtcattgttttttttactaactgttactgttctttattataatacggctgtctgcatacctgtaggtcaaccttacatcgagtggtcttagatggacgagaacgtcattctgtaagtttcttctcatacataaatcttcatacaagatgagctaactcgttaacggcgctgcaagcctctacaaatcttacaaataaatcgaatggctttaattactccttttccaattcttcaaacagattgcgttctttgtggaaccaagccacgattgcgtagtcgagtgcctgccaacctgcaaatctgaatcaaatcctccaaagtaaggacacattccctttgatgatcacaattcagcccatgtccataaccattgttcatcttcaccggggcgagaaacataatgtgtgttccattgtccaaccaggttccctccgatcacttgctcggcatacctatcgcagcggtacaaggatacgcatgccgatctgaccgcttacagcagcaacaaggcctagaaggccaagcgccattttgatctcatccaagctctcagctgtacttaagatgtacaacctgcaataataatcccttaggatggattgatggtgttctatactaattaaattaatcccagtgtacctgtaaccccagtctcatagtgatatagtagtatactagtgatagtacattgttcatgaagtgaggagtgagcagtggcatctgtttttgtactaccatatgtgtgggtgagctccagggctcatgcttttcgctgtcgatttcccatctgctttggggcagatatagctttcgagttggatgtgtggataattctggtgtctgcatctgttttttggatggttggtaggttggtccggtccccgtttgtggttgtggccgggatatgcgtcgtgaacgcgtggctgcgtctcacgccaggaactgtgcgaaatgcgtagcgtcacggtgtcatgaggcgtcgagatctgggtaggaatctgccctttcttttggatcaataatttccagttgcacgctattgagcttgtggtgtgtgcgagagtaaacggaaaggatgactacaagtagaattgacacttctatttgggaatttaccgtgtacagtacttgcatgtgacagcgatttcagggtcactaagtagtagaattgacacttctatctgggaattcgatcagtagctgtcgtagttatttcattgatgtacacttctatttgggaattcgatcagtagctgtcgtggttatttcattgatgtgctgcaaatcgtactgatcatgcaaacggctcgttgcttcaaaggataaggatgttcaattttgattagttatatctctctttctgttaggtgccttaataaatgcttctggtggtagcagaaatcaaacaggtcagggaagggcttttgctgttggggaaaataggagatttgcggcccattacaatggggactaaaactatgtgcttattgcactcattataatcgatctaaagaatgacaaacactggtggtacacatggagattgcttccataatgttacaactgatgatttatatagacagataaaatgccttgcagcagcagcaacggcgacaatggcaacacaacatagcagtatctctactgcattggagacgagcgaacggagaaggctgcgccgtcgttgagaggcagcaagctataataggcgccatctttgtcgatgcagcacgcatgccacttcatcttgtatgaaccctgaggaaattcagacacatccagcaggcagctagagaatcccaccccactgtcactcgcttcgaaacgcgcaaatgctgtcaccatatccttctgctcaacatggaccttcttcctccttttcttctccctcttctttcccaaatcatcctgtacgaactgcataagcttggtattaagaccaaccattccagcagttttcttgcgtatctcaaactgtttgcttcttgttcctgttacatctaagcaggaggatgctgagcttgcagctaaaacgcagtatagcttcgagatatcaatgtcactcctctctaacacacatttccactgcaagcaaagggtcagggaaagctggaaactacttggtactgatatcccgtctctgttttctggatttgaatcatataaatgaagttcagcaccaaagcaaggcctgcatgatatatagtaaacaagttaaccattattacagatctccgtgaccgatgcattactgaaacacaaatttcagagaggaatggtgagatatacataaaataaaactctgtgatcatctacctaggcacatgtggcttctgaaaaaaaaaattaagttatccagcatggtgaacttctcatccacaactaattttaagagaacaacatgcatacgataccttactctgaagaagtatttgggtagaacaaatggcaattccataaccctctgcaaaatgttggacagaaattgcatcccttcatgcaaaggagatacactgtcctctccagtcgctattcctctggtgtccccacgtaagcgaagcaaatatgccacagcaaacttgcaaagacgataagaatccttttccagaatacctgaacaattcattcttgtgacaatctgtatggagtgcacttcatcacaacaaatgggcattaattgttgcagttgtgaaacaatttggctatcagtcctatccactctttcatgtaaatcttgtacaactgaagcatgagaaaacctctctggaagcctgcaaggctccacactactatgtacctttgagaaatccacagaaaatgcaatacaaaatgccagaagtgagcacatgaaagcaagcctggctatgctagaaaaactttggtgatccatgtccccatgggatacagcaagcagatcataactatgtgccagttcacttaatcctaacgaacgattcaccaaagcaagtaattggctgttattatgctctctaggtacacttgaatggtctccaatagcatcatgatgagattcgtctctctgatcagttaaatctgcagtaaggataccaagaaaatctgctaggatctcaagaaacgatgccctgagactaataaaccacctctggaaaaacagctcatgacttgaagaggtgtttgataagaggggatcagtagctaagaacgttctgctgcaaatatcggtaatctttgcttgggaaccatgcaactctgaagagtcagcaagactactgtcaacatttgtttcaacccagtaaaagttctcatgaagatcgcaatctgttttaagctcattgaccaacttaatgatagctgaagggaaaagcagtagcttcatctcaatctctccagctgaaataagcagcaatgatttgaaccaaaaactgaaagagcctgacccaaaatcatctgcaagttttctgaagacagacgacgccgcaaaccagaggccttcncgacaacagtacataaaaaatctataggcatcccaatacctctggtttctgaaaagcatttttgttatccgaattgcacacaactcct

SEQ ID NO: 6989 - DNA, 2499 bp, Oryza sativa
ggacatgaagaccgagtgcattgctgctacagtaattcggcttactgtagctagcatgtatcatgtgcacgtgtgctgccatgattgaatggcaaggagaccaacaggagctggccactaggcttgtgggctggcagttcggttggcaggaaggccgagccaacccggcctaagcacgttgctgactcaagatggtgaaggctaggccgagcaagccctagacatgacgatggcccagctcggctcagcaaatgcacaggtgtgtgcatgcgcgcgcggaagcgggagatcgtacggcacctggaggcgtggcggccttctgttcgtcaaggaagcgaccgggtcccacgcggtttttcgcatggtgcgcgcgggaacatggttttcgcgagcgcgcgcagaagcggctcggtgggaggaacggcgacgtggcggcttcggactggtggtgcgcaggcgtgagaggagcaggcacgcgctctctgggacgcgtggcgcggatgcgttggcttggaggagcacgacgcggatcggtgcacgctgattggcttggagtggaatcacgcggatcgcacgagggcgcgcaacgtggagagctcggatcaacaacgtggcgactatccaggaggcttccttcggatctaaggaacaatggacagccaggattacatcaaggctagggtttcgccctagggatatttgagacaatgtcttaggggtcttaggctataaatagagagatggatgcaagggtggaggttgctccttttgtaatccttttgagatgctcggtgagagagtttcggtgtgagtttggagtgtgtttgcccgagaggcttttgtattaggattagtttggagtgtgtttgtccgagagattttaagtttgtgttaatgttcctctgaaggaatatgtttgctcttagttgagcggttattttgcatcacctttgaatgaaatgatttgaaggatttcgtttttgccttgttcatttaaattccgcaatttaaattctacttgcaatttaaactttgcgatgatgagttttgttatctcctcctcacctctcttctagtttgggaaattccttttctctttctcttctagtttcgggaatttctttctctcttcttttctagatccggcttctctaatagccgcggttctagtaaggatttttgagaaatccggcttgatgagtattttcgggggtaagatttgaattgctatattcaccccccctctatagctgttcttggtctttcaattggtatgagagcaaggttaagttcattgtaacctaaccgtggcaacgaacgccgctatggaggaaaaatattctgcgaaaccatttgttttcgatggacacaattttgtcatttggaaggcacgaatggaggcctacctccagtcgcaagggcataatgtgtggaataaggttaaatcaccttacactgtgcccgatgatgctgacatcacgcctgcaaatgtggctcaggttgattttaattatcgtgcaagaaatgcaatcattggtggaatttcttctggtgaatttaattgtgttcaacaccacaagtccgctcatgacatgtggactgctctgtgcaatttccataagggaaacaatgatattcaattggttcgtcagaatcaatttcataaagaatatcaaagatttgagatgcacccaggagagtccattgattcttatttcaagcgttttggagaaattgtttcgaagttgagatctgttggaaaagaattttctaataatgataatgctcgccatcttttgaattgtcttgattatggtgtttgggaaatgaaagttacttccatcacagagagtgcacctctgagtgaccttaccatggacaagctttactcaaagctaaaaacccatgagatggatattttccatcggaaaggcctcaaacactcgatggctttggtagctgatccctctggtagtacttcttctaatgactcagcttttgtgtgtggtggcttctctcttgccgctttacactcagtcactgaggagcaattagagaagattcctgaagaggatcttgctctttttgctagaaaattctcaagagcttacaaaaatgtgagagatagaaaaagaggaaaaaccaatgaaccatttgtgtgttttgagtgtggagagcctaaccacataagagtgaattgtcccaagttgaagaagaagagtgacaagacgaccaagaagcccgagggacaagggcgaaaggggaataaggatttgatgaagaaggcgatccataaggtcttggcggctcttgaggaggtgcagcttagcgacatcgactccgacgacgatgatcaagaaaagggggacaaggacttctccgggatgtgctgtctcgccaacaacgaggacttcatcaacctgtgtctcatggcacttgaggataaggatgactcatcggagcatcctgaggtatgtcttgatgatatcccttccttgg

SEQ ID NO: 6990 - DNA, 2947 bp, Oryza sativa
attagagaagccggatctagaaaagaagagagaaagaaattcccgaaactagaagagaaagagaaaaggaatttcccaaactagaagagaggtgaggaggagataacaaaactcatcatcgcaaagtttaaattgcaagtagaatttaaattgcggaatttaaatgaacaaggcaaaaacgaaatccttcaaatcatttcattcaaaggtgatgcaaaataaccgctcaactaagagcaaacatattccttcagaggaacattaacacaaacttaaaatctctcggacaaacacactccaaactaatcctaatacaaaagcctctcgggcaaacacactccaaactcacaccgaaactctctcaccgagcatctcaaaaggattacaaaaggagcaacctccacccttgcatccatctctctatttatagcctaagacccctaagacattgtctcaaatatccctagggcgaaaccctagccttgatgtaatcctggctgtccattgttccttagatccgaaggaagcctcctggatagtcgccacgttgttgatccgagctctcacgttgcgcgccctcgtgcgatccgcgtgattccactccaagccaatcagcgtgcaccgatccgcgtcgtgctcctccaagccaacgcatccgcgccacgcgtcccagagagcgcgtgcctgctcctctcacgcctgcgcaccaccagtccgaagccgccacgtcgccgttcctcccaccgagccgcttctgcgcgcgctcgcgaaaaccatgttcccgcgcgcgccatgcgaaaaaccgcgtgggacccggtcgcttccttgacgaacagaaggccgccacgcctccaggtgccgtacgatctcccgcttccgcgcgcgcatgcacacacctgtgcatttgccgagccgagctgggccgtcgtcatgtctagggcctgctcggcctggccttcaccatcttgagtcagcaacgtgcttaggccgggttggttcggccttccctgccaaccgaactgccagcccacaagcctagtggccagctcctgttggtctccttgccattcaatcatggcagcacacgtgcacatgatacatgctagctacagtaagccgaattactgtagcagcaatgcactcggtcttcatgtccttgcacagtcctcttctccttccaattttcttcgcgaatccgatgcttgcacacttgaccttgtgaagcccgttgtaaagacctcctcacacggtgtccgcccaccgtgtgcaaccttgcgtccaatcttgtcacccagcattcttgatcgttctggacctcaactcctccctgagtctagtcccgatccgccgttgactaagattgactgcgatcacctgcacacacatgagccaaacaaccgttgtcttggcatagatgtcacaacctaaccaatgttagtctacgcacacacttcttgcacttccggtacttgtcaatttcccatcacaaaagaactataatcacacatggtttcacaatctcccccttgatgggaacattgacaatctcaagcaaaattttgaaaatttgatttttgacacaaagcaaaccattttgcaaaagtcgaactttggtcattttgaaatcgcgaaaaatcaagaccaagtgacaagaagaaaagggatgcaaatgcaaatgcaagaatgctccccctatgtgccaaactccccctttcaccaagatctaaagcaagttttaattttcaataagtgcaaaattctctccccctttgtcaatgatgccatcaagaccaaaaagagacaaaaatgcaaaatgaaaatgattgaaacttgcaaattccagagttctgagagctttgagagttatctaaaggcatcaaaaagtagacatggatcacacagatacaagcatgtgctcaagcctagctaagcatgtgcaaaagaagtatgaaacaagttatgaatatcaggatagtatcgccagcaagcaaacagctttcaagtggattagtgatttagtgtgcatagctatttctagaagaagcttaaaaggaagcaaaccagctcataatcatgcaagatttacataatcaaagcaatgaacccatgctaatgtgctaatgcccagttcataaagagtatcaacatggtaacaaagcatagaacatgagcttttaatcttttctcatgacttttctttttatgattttttttttaaattctttaaagacaatagcacaatcacgacggtccacctgatcttatcagtcagcaagtgatggttgtgccaaacactgccgtctgacctcaatcaagttttccagctagagttcccattacaggctgtctcagtgctatcttcggcactactcatgcgtaaacacactcagtagcccggacaaaaacagagataaagcttgtaaagcaagattgatacaaagtatggacgcataagcatgagcattcatgagcatgtactgacagttattgcaaaaagaatgaaaacatagcatgagtatgagatggatacttcaacttaaacaaacttctagagcaagcattgcacattgattaagttcaaatgaatagtcaatttaagcaggtttcaacaagcttgaacagcataacatgatcacacaagctacttaagcaaatgaaagctagacaaaagatcaaactagcataagagtaatacatgcatagcatagtgatgaccaagagataacaagcaaagctcaattgaagagtgtataatacaatgcataaagtaaacatgatgcaatatgttacaaatgcatgtaaaagaaaaacaactccccctcaaatcaagccataggggtggatcacccctaactcactccgcaagaactcaaaatgagagcgatcaagtggttttgtaaaaatgtctgccaattgattttcagattcaacaaactctagcacaatg

SEQ ID NO: 6991 - DNA, 5331 bp, Oryza sativa
tcctcctctaagttccaatatattattctgttcagaacaatagaacataatgtttatctgcgccgtgaaatttcttatcgtttttaacaccaaaatgcacttgcaattcattgcaccgtgatgttcatttgcaacaatacgaatcacaagagtgtgatgcgagctgcaaaatggctcatgggagggcattggcagcattgaggccttgatggctgatgccaacttgccaagctgctaactgttttacagataaccgggacgaatgtacgtcttgctaagaacagttgatcacaattcgaattttatttcaatgtataatgcttgttttggatactgtaacattctagacacgcctctgcatgcgccgttatcagctatcagagccccagactcagaactagtagttgcagagcaaatcaagagacataagcagaggaagaagaaaacagagaggagcgaatcgtactggagttggagtgtcgcggcggcgtggcaatggccggataggaccgccatgtcgccgctcgccatgcccgagtagaggctctagagcggaaggctctaacagccgaccaactcacaagcaagattgtcgatgagatcaacctttggatctactatggtgcaagagatatcgtgagaatcttgagatagcaatctgaaggggttgtacagtagagtgtttgttttatttttccctttttttttcaccttggtgaagttgtaaataacttttttctgctgcatatataacaccagcaatgcttggctcttttttttttaaggctgatttggtcgtattcaagagcagatttttttttctatggcaagatgaagagggccaaggtgaaggcatggtttggtgaggcctatcgtcttctgttaagagaaaaggaggaactaaaaatttggttttggtgattaatgataaatctaattatataagagtaatattgttataaacatttatttgtctactagactcatgtggatatgaaagtgaaatttatgagaggtgatttcatatgagttgagataaaaacgtttattgatggtggacctaaatcacaaggaacatcctgtagtaaggaacgcacggcggcggcggcggcggcgctccgtcttgctgctgctgcttttccttcttttccacccccctcaaacgcacgacaacctcgctccttcgtgtcgccggtggcggcaagccggcctcctcccgccgccaccgcgaacgccttcaccgccgctgtagggagcaggccgatgggttcgcatcacgcccgctcatagcaagcttcacagccacgcagccgcagggagcgctgccgatggcggcaaggaggtgagggagcaacaagaagaggagcacgcggtagggccggttgcttcggcgggaggtcaagctccatggctggccgagtgaggccgggacaacaacctctacttcgatggcagtcgtgccttcacgcttcgggtcggtcctccaccgccgcgtgaggcccgcccccaccggtgtggatggcggtcgagcctctgtactccgggccagtccttcgcctccgtcgcggccgggtcgctgtggccgggtccctatcggcagtcgaatggcggtcctcattggtggttgaatggtggacgcacctccgcgctcctggccgttcttctgcctctgccgctgcctcgtgagccccacggcgccaccaccgctcgtgctgctatcgctatcatcacaacgctagaagatgggaagaacgaaggaagaagacggggaaagaaggagatggatggaaaatgtgatgacgatggcatggttctagttttgtaaaatttgagtggcacgcttatgaatagacgaattgtaatagtatttttttaataaccatatttacattggcatggattgaattaacccaaatacttcttgttgcattgtgtagaatgtttttgtaagccctccatccaataataataacaatttactattagatgtgacatatcattttattaggttatgtcttatccaatactagttttttttacggagagagtatttgcttagtgcatttctaaaagtatttaatttatctctataatcaaatatataaccatgacaataatctcacgaataatctgtatcacttgttgaatgatttcgaagcatttctgttgctgggagtattttgaaggagaacattaccaccatcttttttagtgcaagggatggaagacataataatttggaaatggaatatttggttagatcacactacaaaattcaattgcacgacaattgaggactataacacataaatagcttggaaaactgctgcagaaggtaaatgctaaatttgcatggtttcattgcagggatgttcacatggttaattatgccctttaggcggccaggagaatgaaatgtcaaattacaacgattttaaggaagcttagccatgtggctgtaactttttttagatgcatttgcgatttgacagtaataacttagtaaggacataattgaaagaagtatataactttttttatgtcattctgaatttctggtttatacacattcgaacttagagaaggaacataatagttgaagttttgataatttttatcacggtttgtagcaggtaattgggaaaattgataagggtaaacatgagaggaagccagcatgcatagttgaactattgtagaactttttggtttaccaatctatgctatcctcgatgtacccttgtacgtgctcttgtttgaacatacacaaactttctctctctctctctctctctcaaactagaaaaggtaaggaaagcaatattccaattattaagatcattaaaaatcaccacacagaaaagaaaagtaagggtctgctgggaaggcgacgaaatccctagatgcccccaattcagtgtctgctgggacattgattccaaattgaaaaataaggctctgtttagttcacggctgtcacatcgaatatttataaatgtatggagtattaaatgtagaaaaaaaccaattatacagattgcgtgtaaattatgagataaatcttttaagtctaattacgccataatttgacaatgttgtgctacagtaaatatttgctaatgacggattaattagacttttcttctcgtagtttccaagcggaatttgtaatttattttgttactagactacgtttaatatttcaaatgtgtgtctgtatatccaatatgacacgccaaaaatttttcttcggaaattaaacagggcctaagttcatttgattcccttagctactggctaaatctgattcgtatccctaaaccacgacacctgatatctcgaccctttaagccagatgtgaggcggggctagccagcatgcagaggagaaggggcaatgggagagacatccacgatgctcttgacgatggtagcccgagtgaagctagccaccgcagtgagcgagctgctttgatgtgtaggtttcctgatctaaacatttactgatttaccttctcggattagttcgtctagtgcacggattgatgacccatggtgttgatccgttgtcagatatttatctctttgccgttttgattgttttgttcgagcaatccccatctgctcactgttcacctgctccatctgctcgaatccctcttcgcggattcacggattgcaggctaaaggcctctccgggctccggcagcttcacccgatggaggatctccccgtggggcggaacctggtggccagcctcaccgacgatcgacctcgtcgtcgacatcctccgccgcctccccgtccgctccgtgtgccgctccaagggcgtctgcccgtactggcgcgacctcatcgccgaccatgaccaccgcaagaagctgccgcagacgctgtccggcttcttctacacgagcttcagcgaggagcgctcggcggcggagcaccacttcaccaacgtcaccgggataggcatgcccctcatctccccgaccttcgccttcctgccgcagtgcaaagaggtcatccccttggactcctgcaatggcctcctcctctgccgctgcctgcagtttgatggtgttagcaagttccactatgccgtgtgcaatcccgcgaccgaggaatgggtgatgttgccggacgccaattgggctgatggcgagaaccgcattgcctgcttgtgctttgatccagccatctcatcgcatttccatgtggtcgagtatgtggagatgaagctgaatgcgtcacaggggtggagatcaattcgtctaaaactgggctatggagtgtccatgtaaatggatggaatggtgtagttcttgtcagcctttcggtcaatcgaagaagtgttttcctcaatggttttctgcactctgtcacgcctgctgatgagattgtggcggttgacatggaggggaagaaatggaggaaaattcctgtgccagaccgtgataatgacattggcataattcatcaaactcagggttgcctgagtgcttttaatgtcgatctgctcgatatcttcaaactgtcaatttggtttcttgaagactatgatacaaataattggatcttaaagcacactgttagctccttggacctgtttgaagggaagaattatcgacttgattttgagtaccaagtaattgcagttcatccagattgcaatttgatcttctttgtttatggattggacaatactttgatggcatatgaaatggatcgcaaggaagtgcgtgttatacgcaatctcggaatgactactgctggccatatctgccatatgagttgcgatcatctcctgtaatgcatgtgcagtaagtgccactgacatgtgggcccggaataggtgggacccacacgtcagtgaaacgtactgcaggtgcagtacagcagtggatttgcatccctgccatatgttccactattctctgagttgttaactgatgggcgctaatggccaacttgcagaggtgcggctccacttctgttgttgcaaaaacaacttttctcccttaggagaatcaggcttagagtgggccagccagtctctaataagaattatgaagttctgttttattgtatttgattaatcctcttcaagttattttgaagaacgctcttaaatcgtagatggtaagctaattatgtaagttctgttgttccgaaggttatgccctgtttttattccactgatgtaaccctatgctagttcccttcaaaaaccctatgctagttaagcttgatgtcatgttggaacatatgtactgtccttttttcccgcattctttttctctttttcttcttttctgaagtacctgtctgt

SEQ ID NO: 6992 - DNA, 19813 bp, Oryza sativa
tcacataatcgccacgtcaatgaaacgttggacaaagacctagtcaaaattagccacgtaggcaccacctcagccaaaactgggcacaatactgctgagggaccttatttaaacggcttcgtaagttggagaacctgtcgtacccggttttgcgatgaagggatgaaaattggattgggcgataaatagagggacccaaagtgaacttattccttcaaactaaggcccgaccgcccgattcaagtggaatttggagagtcttttacccctatgccattaagaaagttggaggttacgcgtgtgccacgaaaaagttttgagtcacctgtatgccatgacgcaaactttcgtttacccgcgtgccattccatccaccttctgttagagaatgagctctgacatgtgggacccacgtatgaaaatgactaaattgcccctgaagcattttcatctctactactcctctcccgtgccctagcctagccgccgtcgccggcacgccgccactgccacctcgcctcgccggcacgccgtccccgccgcctcgcctcgtctatccggcgacgcgcctcgtctatctgccgccgccgcctcgcctcgtttatccgtcgccgcctctctagtcgcctcgcctcgctggcacgccgccgccgccgccggtcgtcgccgtcgctgttggtcgtcgcctcgccggcacgccgcctcgcctcgtctatccggcggcgcgcctctagccgccgctgccggtcgtcgccgccgccggcacgccgtcgccggcatgccgccgccgccggtcgtcggcgccaataacgttgtctttcggcgctaatggcggcccttgccggcgtgccattaatgctgattccatccattagcaagggtaaaatagatctttgaaacctccgtttgtctccgttagtgctgattccatccaaagtggcgcataggcaaaagaaagtttgtctcatgccaggtaactcaaaagtttttttttggaacacacgtaatctccaactttcttaatggcgtagggtgactagaatttggaaccaatgtcccagcagacattgaattggggattttggggcatctaggggtctcggcgccgtcgccgccgccgccgcttctagctcttcttctccgtgacgggcgcacatcgcagcagggtagcgggcgcaatggttggccttaaccggcgagggcgctaggtttgccgtccaggtgtcccgtccgacgagctccacacaggtcagccgaggccgagcggcaagtcacgcgcgcggcagcatcgctcttccctgccttgatcggtaggttcctgatctcagattagttcgtttagtaggtggattaacgaacccatgatgtcgatttgtagccagatttttctttcttcaccattttgatgtcttgtttgatttaatccccatctgctcacctgcttgatctgctcttgccgcggtgaatccttttcccgcggttgcaggctgacgacttcctctcctccaccccacccccgatggaggagaacctccccagcaggcggccagcatcaccgacgagctcatcgtcgagatcctccgccgcctccccgtccgctccgtgtgccgcttcaagtgcgtcagcaagtcatggcgcaaactcatcgccgaccacgagcaccgcaagaagctgccgcagacgctatcgggcttcttctacaagagcatcgactacgagcgctgcccgcacatggcgcgccatttcaccaacgccactgggagaggcatgcctctcgtctgcccgaccttctccttcctgccccagtgccaccacgtcgtcatcttggatagctgcaatggcctcctcctctgccgctgccacgtgtctcgtgagactttgcagttccagtatgctgtgtgcaatcctgcgaccggggaatgtgtgatgttgccggacgccaactgggctattgacgagaaccgcaccgcctgcttgtgtttcgatccagccatctcgtcgcatttccatgtgctcgagtatgtggaggatgaagagtatgtggaggatgaagatgaatacgacgcactggtcacaggggtggtgatctattcgtctaaaactgggttatggagtctccatgtaaatggatgggatgatgaagttatggttagccttccggtcgatcggacaagggttttccttaatggttttctgcattctgtcacgacttgcgatattgtggctgttgacatggaggggaagaaatggaggaagattcccatgccggatcctgatggtgatattgggataattcatcaaactcagggtcgcttgtgtgcttttaatgttgatccaaatgatatcctcgaactgtcaatttggtttcttgaagactatgatacagataattggatcttaaagcacaccgttagctcaattaatctgtttggacgaaagaaataccaattagattttgactaccaagtaattgcagttcatccagaatgcaatttgatcttctttgtttatggatggcacaatactttgatggcgtatgaaatggatcgcaaggaagtccgtgtcatacgcaaactcggacatgagtcatgcctgccatacctaccatatgttccaatgttctctgagtcattacctgatgggtggtgctaacatgcagaggtgcggctccacttatgttattgcaaaaccatctttgtaccgtaatgagaatcaggcttagggtcagcagccaatctctaatatgaattatgaatttctgttttatcgtacttgtgtgatggctcatttgtgttgttttgaagaatgttgtgaaatcatagatggcacgtaacttggcctttcggaaggtatgtcctgttctgaaggttatgtcttgtttttcactggtgtttaccctatgccctatgctagttaaaatttatgtcctgtgttaacaagacataccttttgattgtaccagcagtcagcttatggaacagtgacaaatgctttggaagttggatcatatgtacttcttttatttctgccttcttttccccttttgttctttctgaactacttgtctgtgttgcggcaatgtgcccatgcagcttattgtctcctggatcatttccactcgtttttgtttggtcatctataatgctcattaatttgggcattgcttcccctgcccttacttgctggagaagaagagagtgcaaacaagagcacgtacaatggtgcaccaacaagaaactgcagaacattctagaaatgaaagataacaaagatgggtaaccaaaaagtgataaaatagttaaactattctgcactgtcttccttttatgatcacccttctgaaatttcccaattacctgctgcaaaccatgataaaaactagtattatgttcttcttaagttccaacaagtatcaatcacttcaattgtctccattctaaattacttccactttgaattcctctaagttacaacatgtttaaatcaacaatggcataaattttgttctaattctcttcaattatctctgttctaaattactgtcaaagtgaccaagcctcccaataattattgtggtgttgagagttgagacctggtagttacatccgattctccacttcctttcagacccgctgcgagaaagagcaatggataattggatattttcttttggccacatgaaagggcgtattaaaccatatttgggcatcccctgcaaagaaagctatgcaaatctagcattagttttcagttgtcaccgttttcccaaactatttctgtgttgtagagtagtcgcaaataaattgttctctgtaattgaatttagtatgatattttctccaaacttcccgtttgctgtcaatgtccaaactattatgactttgatcccttgcagtagaaaataagataacgatgttctcttttgaaaataaaactcccagcaacagcgatgttttgaagcctttcaagtttcaacacattatacatgtcatggtaaggtcaaagatcagctagtgtggtgtggtggggccaatagaacacgtcatcggacaattaacctaataatgcgacaccatcatctgcatccttcccagttcgcagtgctcgccggcattcacacttaggggttcagatggttggctggttgctcctccttcaaatttctatcgttccaacgacaaaaatgcagttgcaaaacctgcaattcattgcatttgcacttgcacaccgtgatgtttatctgcaatactcgtcacgatgatctgcagatgaggctgaggctcatcgaaggaggacaccggcggcgttgagcacttgatgatggctgatgccagctctaactgtttgcagataaccaggacgcatgtaacgtcatgctaggaacaacagaaaacttaattgcgtccaggaacattcgacgacatggtcatagtaaatactgttagtattcagtgcacaccatgtggtacagatgtatatcatgtagtactacctagttctgcagtaacatagaatcttccattgctgccaatctatgagtcaatatttagcacaacaattaggcttcagaaagaaagaacaaaaaaaacattttccagcaacagcgcagcagcctgatgatttgactaatacaacaaaacaaatcacggctacaattccatttgccaaccaccttcttaatttcaagccctttgacttgtgtgatcgcccaaagtacttaagcgagagatcgagagagcccataactacggagaaagctgagaaagaaacacgcactaatcaaacaatctcttcttcttcttcttcttcttctgttcacaagcaatcagaaaagaagaggacacgccatgtcccttctcgtcgtcttgttcttcttcttcctctcgccgccgctcgccgccgccgccgcctacacggagtactcgtgcaatggcacccggggcaacttcacggaggggagcgcgttcgggctcaacctggagctcctcgcggcggagctccccgccaacgcgtcgtcgtcgcggtcgctgttcgcgtcggcggccgtgggcgccgccgcggcgccggaggacagggtgttcggcctggcgctgtgccgcggcgacatgagggacgccgccgcgtgcgcggggtgcgtctccggcgcgttccagcgcctccgcgcgctctgcggccgggaccgcgacgcgacgtactaccacgacctgtgcgtggtgcgctactccggcgacgacttcctgtcgcggccggacgacaactcgccggtgatcaacgcgctggacgcgaacgcgtccacctactacgggtgggacgggcggaacgcgacgacgcggagcttcttcctgtcgctggtggggacgctgttcggggagatggccatgtacgggtcgtacaactcgtcggcgcggcggtacgcgagcgccgtgatgtatgtgaacccgcagctgccgacggtgtacgggctggcgcagtgcacgccggacctgtcgccggcgcagtgctggcactgcttccaggggctccaggagcagaaccggcagtggtacgacggccggcagggcggccggatcctcggcgtccggtgcaacttccggtacgagagctaccagttctacgccggcacgccggacgtcaggatcggcctgcaagacgtcgcaccctcaccaaccgcaaacaatggtaacaaccaacacatatgctacacacacgatcatttcttctcctccgaataaatttgctcaaaagctatagttggagcttaactactattgttgtacgttgttataaatgttaaacttttgaccatattgattgtgttttttttttggaattattggagcttagattgaaggaagggtccatatcaattaaaacttgctagtagtaattattaattttgaatttgggggttacgtttatatactattaataagagatttcatgattgtccagcttatatgcatggtattaattttaatgtcatctttttatttaactcaaattctgaatacaatctatggcatgataatataatccacctaatcaacaaccagatctttcattttaacatgagagatctcatagtgcttaattagtataaggtgtaaacagatagatttgttacataggggctgttcagattatatcattttcaatcataatatttttttcggtaaagttacttaaaaaatgcctatatttagttgttgccaaacattggtaaatatataaaaaatcctgctaaaattttagtaatattgtcaacttgccaaaaatatcaaattttggtaaaatttattttgactacgatctgaacgccccataaatttgtttgaattggcaaagacaaatcatattattattactattactgtcatgtttggttgtgagctcacaatggtcaaatacgtaaccacttaatggtggtgttttctgtcagtgcattatcttttctacaaataacattgaaacaatctctgtatgatcactactaattttcttctttatttatgcaggaaccaaccacaggaagaccttagttatcgttctatccgtgtcaatcacggtcttctgtttcatgctggtcggctgcctcctactgataaaaaaactacggaaaggagacggtaacaacacgatgccactaactccctctcataatgaacatcattttctccctccatttcagcatcacaaagttcttaattaatcaaccaaaccacaaatgtccaatccatcattgatcacagggaggaagtcgaatcggcagctggaagcacattccaggaacagctccaagacagaggaggcactgaagctgtggaggaccgaggagagcagcaccgatttcacgctctacgacttcggcgatcttgccgctgccacggacaacttctctgaagatcacaggctcggcacaggcggatttggacctgtctacagggcaagttatctgaaactcctataatttttgtttttacagtcgatttttgaccaaaatgtgtgaatggttgtcgctatatatgctaataatctgcggcatcatagttgctgtccctattgtttagcagtcaatgttgacgaaaatgcggatgacttggtgatgctaacatgcatgattattatttgctttgtctgttcgtgttttcagggtgagttgtctgatggagccgagattgcggtgaagaggctggcagcgcagtccgggcaggggctgaaggaattcaagaacgagatccagctcattgccaagctgcagcacaccaacctcgtcaggctcgttggctgctgtgttcaggaggaggagaagatgctggtctacgagtacatgcccaacagaagcctggacttcttcatcttcggtattattctctctttttgttcaatacaatcttcgtccaaaattatacttaacaatttacaatttagacatacagttgtgtagattcatatctataaatgcttatatttcggaacggatggagtagacaggggcggagctaaaattttctcaagcttaggactaaattagtgtaattttcatatgttcgtcgaatactaatatttgagatatgaaattgagtttttttatagattaaaaactttttatcattttcataactatgcgattaattaaaaacaataacacaaaagcaaatgccctgaatatataacaggtaaaaagggaaaagacaattacttttgtttgtagtccacttgatcaaacagcgtgtcaaactgctgttaaaaaaaatcaacgtgccaaaatttcaaaagactatgttaccgtcgacgttttactcatcttccgattttcctaatcctttctatctttttcaagtacggtttaggaaagaaaatgtatattgccaaatggtttccatatccaaatggtttccatatccaaatggtttcctaattaaacaagtaaaaaaaagtgaaatggattacttctgaacgactttgttaccgtcaacgttttactaatcttcgataatgttttcacgcatgtagaccaggagcaagggccattgctggactggaagaaacggctgcacataatcgagggcgtcgtgcaggggctcctctaccttcacaagcactcacgtgtacgcatcatccaccgcgatctcaaggccagcaacatactcctcgacaaggacctcaatcctaagatctccgacttcggcatggccaggatcttcggctccaacatgactgaagccaacaccaacagagtcgtcggcacctagtaagaaaaagaataatgatatatatcgtagcaatacttatcattttaattacactcctattttaaattacttagcattttaattttttttaagttcaaacattcgtaaatttaaccatcaattactaaaacattataaagtttagcatcataatatttatgtttttattcaccatgagatgtaatttttataatatataattgacatgttactaattaaactatataaacacttaaaatgactttaaataaactaaagtaacaagtaaattaaaacggagagagtactggtaatctggtattaagttttagcatgtcaactggctgggcaaattgattaatagccgtgatgttttccttcaggtgtttgtacctttatttttggaggataagatcaggtacctgcagtactgtacttactagctagtggtattgattgttgttttggtgttcacgtgtgcagtggatacatggctcctgagtacgcatcggagggcattttctcggtcaagtccgacgtgttcagcttcggcgtgctgctgctggagatcgtcagcggcaagaggaacagcggccaccagcactacggcgaattcgtcaacctcctcggatacgtacgtttttacgttgttttttctatcttaatttctttttctctctcgctgaaataatggcgtgttactattctagtacgacctttttgtgtgtgtgttcttaatcaaaaccgtacttgtcgtccgtggattaataaatgggcacgcggcttatcctgtacaattatcaattatgtcgaaacgttttcacgtctacactgtagctacgtttgacttacgctagctagcaacatgattagtcatcactaacgaggattaataaattggttgatcaacttggcatctttttcaataactttatcgtgctctctactgttacaattatattccgattatatatattatcatcagctgattcttctataatataatctgagctattaatttatgaattccaatactaataattaaaagatgtactataaataaatactactatctattagaatataaaagatttatatatttcaaacatagagtttttttaaaaaatatattattattttttgtcaggcgtggcagctgtggagagaagagagagggtgcgagctgatcgacccgacgctgggcgagtgcagcggcagcgaggcggcggccataatccggtgcgtgaaggtggcgttgctgtgcgtgcaggacaacgcgacggaccggccgacgatgacggacgtggcggcgatgctcggcagcgacggcgtccccctgccggacccgctgccgccgccgcactaccagctgagggtctccggcgacgactacgacgacggcggccgcgggtcgccggccggcggcggcttccggccgtcgcggtggcgcttcaccgactcgtgcagcaccaacgacgtcaccatcaccaccatcgaggaagggagataatagcggtcgatcgatctcaccggcatttcgatcattacgtttacgcgttcgctggctggccttcacatgtggccaacgcgtccttttcgtgagacatctgtgagtgagtgtactccacttgtggtcgatcgaagtcgaagataggcagggcgcaacagtggtggttggcatggttgcatcaccgtatggatgttacgtcgttgtacagagacaactcgtatatggggatgagtacctgagcggctgagccaacaaagagggtgttttttttttttcttttgtacaacttttgtgtgaagagtgtacgactaaagctggtacgtacagtgtttgttgatggatgaaaagaaagtacaaggatggttggatgcaaattggggtttggggtgtcgattgcatggttggtttccttttgccacgaacacccccatgttaggtgtggcgtgcggccgactattaattcaagccgtgttaatgcgaagcgaaacttgatgatggttgacgatttattcgcggggggagcacgtgtgagcttggtagttgtcgtcagcagaaaataatgcagtacagtacagactgatggaaatcgacggattttcccctttgtaaaaatgggacaatgtgtgtttccctttcaaaataatacacaaggtcatcccaccaccacctctcatctgcagcagcagcagtaataataataataataatttttttggcatggttaccaataaatatatgataacataacatggtcccagaaaattaggactacaaatttctttatattttaatccatactaatgctttctaatatatttaaagaccactcgttacatttttaaaaagttttgctcttcctactttactaagttggctaaaatgcgtttattttcttcagcttctttaaagtgttggatggtaatcatagccacctcaaagaactgtgctcgtgcccacaatgtgaacatgctcacgacacaattctatttagtgaaaaatatgagtctagctaagtctatttgtcacttcggtacgatccgtttatagacatcatctcaacagataagtcctttccacaaaatatgtcctaaacaaccatttgaaagatggtatgaatttcaacaattaaatctcaacctggcaatctagatttgttatttgcggtatataaactataagagtggtttcgtagtccttacaagggtacctatagttatcatattttctatatctaaaatttatttagtgtatctcggtaccttatttattaaaagctccaaaatttacatgaaattattttggtacaataaaattgctcaaagtggtctaaaccctaactctccttggttcttttgtctcgccctgctgctgctgccccctcacatttcttctccaatgcggacagtgggtggatcttgtacttgcctattgacaattctgcatcccaacagttccgtacttccgtagtctcggctttttagatcaaagatcgatcaccgaagtctcatagcaagtttgataatatagcccactactaactccaaatcatctatagccaatgtaatagctaattcttacagtacatagttgcttactatactattaatatctggtcctacttgtcatacacacattacgtcttataatccgtgctgcagctggctacagatctgtagtccgctgttcttctctctcttcctttatctttttaaaatatatttatagctggcttatagcctgctattatacctgctctcgatcagctaacaaattgtgttgcctcgggccaagagaattcgctggccacatggcccataggccatagtcatctgccgccatcggcttgcgcccttgcgtaagccttctgggccgaacatggccgatcacccaagctaactcgtatgggtcatcatttggaggtggcacacatcgcctccttttccctcatcaattgccgcgacgctccttctcccagccaaggtgaacggatcctcttcctcctcggccacctcgccggcgtccggcgagagacccaacaagatcgccgcctccgtctcgatcctgcgaccggtggcgtcccgatcgcaggagaggccctgccagtctgctctctgctgccataggtggtggagatgtggatcagtatatgtaagttcagttcaggtatgtatgtttcatctggtaattaatttggtttattcccaacaaatttgctaccaatttcactacaaatagtgtacaatatgtcgagttgtttacatcttatagacctgcatgtaacgtagacgaatcaggtctctcctttataacaaccagagatcactactccgtactgttttatcaacttggttagacgcttgttgactgatatgcgtattccaattgatatgatacagggcgttacacttgtgtgtttctaagtcgactgatcgctcacaaagaaagggcacattcttattgatgtatattttattttccatgggagatgtagccactttttccttctaagaagaatgtttaagggcctgtttagatccatttggaatggtaaatggcaaatggtaaaagttttggtggcaaaagttttgtcattgcaaaagtactagttggtgtttagatgcatgctaaagttttgccattctagcactaaagtgagagagagaaagagagagggagtggtcccaaagcactttttggcacaatttgctactatggactagcaaatgctaaatgccaaattgccaacttttgctactagtgtttagatccaaaatgacaaaaagtgctacaaaatggcaaaacttttgccattttggaggatctaaacagggcacatcttttcccatgtttgtcaggtggagatatataaattagagatcagacaatgaagggcctatttagatccatttggaatggcaaatggtaaatggcaaaagttttggtattgcaaaagtactagttggtgtttagatgcatcctaaacttttgccattctagtactaaagtgagagagagagaaagagagagggagtagtcctaaagcactttttggcacaatttgctactatggactagcaaatgctaaatgccaaattgctaagttttactactagtgtttaggtccaaaatgacaaaaagtgcttcaaaatggcaaaacttttgtcattttgaaggatctaaacagggccgaagtcacaacatacccctgatcgtggtcgcatgcattaaggcatccatgcatgtatgttatttcattatattgatatctctaatttcatcttttattgcattctagtgcatgaagtcgcgcatgcgtgtgactatcactatcttttctgattagtgtttaagaataatctattactgatattatgtcactgaagaatttgttgtgaaaatatataaaatatatgtttgttttaagatagaaatatatgtttttatcatttctctcaaccatacaaacattttttctttatttcttatgcgtctcttcgttgctctatatccctctcccacatatggagacatggaaagctctataacaccctcttttatccaatggctgaaatttattctcttgttttgtttgcttgttgatctaacggttattatttattagatgatatggctcattcttcttatgttttgggattctcttttcaagagttaagatatatgtgtccatccatccatctatctatctatacagacatatactaattagattagttacttctaagaagctactacttttattagaaagatctaaccattaatttgttagatcctattgtcgtgaacgtagatcatgtgtgtagagtccaaatgaaataaatcatgcaactagaaatagaatggtgattctatttaaaataacttattttataaatattatctgtcaaactaggatcttgatgactatatgaaaattcaaaaacactatattttaaaatagagagggtaagttgtaactgatgtgaactcttattttaatatgaacagccttgaaagtaaacaacacgtttaaaatactactaaaatattaatatctagcaatagcatgtgcaacccaaaggttacgaatctttgtctataggaatagtatatgtggagtatatatgcacatgttcatcattgcaaagatcaaaagtgatcgagttaataactaatataatgcattgtgaaagctctttagttggcagctgctgactagtcaatggacaatggaggtttgtagtcaacggtcaaagtcaacactaaccccgcttatctatgtatacctactgaactggagcagcctgtactactactccggctgaattatctcttctccggcgatgactctcgccgcgatcctcctcctcgtcctcgccctggtcgcgccgccgcttgccgccgccgccgtcctcgacgacggcggcggcggccaccgcccgccgttccacatgtgcgggatggtgcagggtcggttcgctcccaacagctcgtacgaggccaacctgcggcgtgtcgccgccacgctgccagccatggtggcgaacggatcctcctcctcctcctccggcgtcgatgtcctcgtcggcgagcggcccgaccagatctccacgtcggccttctgcggcgccaactcgtcggcggcgccggagtactccgactgcggcgcctgtgtcgaaacatgatttcggcaataataaaagggggtagcgcacgagacctaaaagtggatggatgcggagacaaaggatttagacaggttcaggccctctcaatgagaggtaataccctactcctgtttgggggtttgaatccgccgggtgtgtattgatctgacgatcaggttatgtcatatctgccccctagagggcctcctgcccaccttatataggatggggggcaggattacaagatagaaaccttaaccaatacggtatcggtttcctaaatcaggactttaggccgttccgtaatatacaaggaaacgtaacacccaagtcatgatctgttacatattacatagatataagttatcccctataactagtcggataaccatgccctgtgggtatggggtacccataatatccacagtagcccctgagaccttcgcagtcgaaaagataatcttctctcgaaccagattactccaaagccgagtgcttcaatcatctttgtcatggtctcccgagtacttttaccaaatctgaagactgtggagggctgaaaaataaagtcaggtgcatcgaatagatgcacctaataggtgtagccccccgacaatgtggttaattgaacaaaccaagcatatagtcaaggaataaataatccaaccaaccaagtggttttgataatcgtaatcaaccaagtgacttgatatcaatatatagtatatgcggtgtgaatcctccaaataacatgatccgagtgatataccaaaatagctataaaaaagctcgtatattgtgaataaagaaatttccaaagtattgggcatacgccatgcgcacactgctttaacagatgtgcttaagtccctagaagacacatggtttcaccacacctggaaatatatggcatatgtggtgtaaaatccgagtaaataaactcataaaggatttaccaaccgcctagaaaaatgaccataatatataatcagcctaagccataatattggtcaataaaaatgcacacttacgtggcaaaaagcaatgatattatatccaatcaattgcttgataaacccaaacagcaccttgactatataaaaaagtcagcggggcagctatgtaaagctttactgtttgacacattttaagatgcatcgtaccaactcctaaaaagtcgagtaactgcggtataaaaggattttaaggtattgggcacttgatcacgcgcactttggcctaagcgaaaagtgcctaagtccctaaaagaacgtgacaggccacacctgaaaatatgggctgcagacatattaggcctaggccaaaacatatgccttcgacaccctttaaaggatgacgcatataacatgctcccgagtaataaatcttccgggtaatatagatcaagcgtagctcatatgaatagcttctgatctaaatgattatcccttatgggatactccaaaataaatataataattgaatcccgactggcgcaagtattcggttgatagcccttacggggaataataattggtccagtctttgagcatagaaaatagactcatgactatgaatccatgtggaatgtatccggaacaagtccaaattggagatataatcctcacgcttgagttgatgagcccctgagcatatagcttgtccttctgtcatagtcaaaattgtttattggcaatagctgacgcagtcggcatggagatgaaatgaccaacatgaagacgaaattgctcatcaaaagtaacggaagatgtcattggtagtaaaaaacagtgacaccaatcaaagataatgaagttgcacagccgtggaggcgaagaaaccaatcggcagcagacaagtcagccaacagtgaagatgaaggcatccagcaacatcgacaaaattgagcggccatggtggcgaaataatcagtcggtgacagatgaggcagccggtgaagaagatgaagatgcccattagtggcgacataataagccatccgtgaaggcgaggataccagtcggtggtgacgaaagcaagccgacggtgaagatgtagacacgtatcaaaggcaataacgaaatccaccaatcatgaaaatgaagaaaatagtcgacgacgacaaaggcaaccgtcagtagcaacagagatgatcgactatgatgacgaaattgctcatcaaacagtagtagagtgggcaatgttgaagaggcttgacagtatgttgatgaagatgacgatgttggtgatccagccaatagcagtgtagcaaccaatgataatgacaaagacgctcatcagcatttgcatagtaggtcaaccatgaaggtgaaataataagtcggcgaaaacataatcatccattagcaacagcggagatgtcagggccgatgaagcagaggtgctggtgatgatgtcagtgacaataatccatcaaattaatgttatagctgttgtagatgcttcacttggaggagagttggtgttgttgtccaactcgtccaaaccgaaatatttgaagttgttgaagtagaatgtctgctccgaagcaaagatgaagataatgactcctggagttgactcgttggttgatgaattgatttcttcagcttgacataaaatttgtcaaattttgagccttatatttgtgtagcccctgactctttgattagttgggaaacaactgaacatagagtcgagaactgtagcttcttgtcgtcgaatagtcattgcttgattgaagatatgtgttgaagatgtccaagtagaaatcctgaatattggagagccacttgttgtagtaaaataacatggcattgcatgccgagatgtcgaggttcacaaagacgtcgtggttggtgaagtagtaaaacttgcgaagtagcaacaatagagtttgccggtgccgaagataataaagatgaagtcgctccaccatgatgacaaagttgtattgccgtaatgaagtgaacacaagtcggcggcaacagaagcaaaccggtagtgaagacgcgcagttgtgaagataaaagcacaagtcggcggcggcataatcagtcggcgacggaagatgatgatgtccatcagtagtggtagctgtataaaccagacgtagaggtaagggcactaatcagcaacagacgagacgaccggcgattaagatgtagatgcccaacaacggcggcataataggccagccgtgcagacggaaacaccagtcggcggcgatggaggcaggccggtggtggagtcgtagacgcccaacaacgacggcataataggccagccgtgcagacggaaacaccagtcggcggcgatggaggcaggccggtggtggagtcgtagacgcccaacaacgacggcataataggccagccgtgcagacggaaacaccagtcggcggcgatggaggcaggccggtggtggagtcgtagacgcccaacaacgacggcataataggccagccgtgcagacggaaacaccagtcggcggcgatggaggcaggccggtcggtgaagacgtagacgcccatcaacggtggcataataggccagccgtgcaggcggaaacaccagtcggcggcggacgaggcggccggtcggtgaagatgtagacgcccaacaacggcggcataataggccagccgtgcaggcggaaacaccagtcggcggcggcgaaggcaagccggtcggtgaagacgtagacgcccaacaacggcggcataataggccaaccgtgcaggcgaaaacaccagtcggcggcggacgaggcggccggtggtgatgttctgactgatccattcctagagcgtaagagataagcttaaagccatgaatcccttttatgcatatctggatctggatcctgcagaacaaacatataggatgagtagtatctgatataaatataatactcgagaaaaaatcaagtattttaaaatatttataaatatgtatttctcctcttgtcaattttgatttccccgagcagatgactcattacgtttaaacgctctgcccaactagtcatagccaccaagcactgggagtcggcctaagcacttcccaaacatgcatatgagtgacatgagttcgtcattaatggaacaaagtttcacggatcggagtttactactcgggtacttttgcaattattaagagcagaaaataaatttatctcatctctatgcttttgatttattccgaataatacttagcaccttgcgttactcggtccatccaacgagcccccgggtgctaggaatcggcccaaaggcaaccatccattggcaaaccaaacggaaagcataggaagatagaactccataactcgataggtacttttgtactcagattatgtcgcaagcaatcaagataaatattataaaaaatatgatataacatctgtagcccccgactcactactcaatggaagaccaattggtgtagtgaggcagaggaaaaggaaaaatatcatataaagaataaaataaatgatgacttagctttgtaatattccccttggtgatggcagaagtggccaatgtgggaacaaagtcgtccatcaataacaatgaagacaccagtcggcggcgacgaaggcggtcgacggtgaaagcgaagacgcccaacagcggcggcataataggccagccgtgtaggcggaggcaccagtcggcggcgatggaggcaggccggcggtgaagatgacgatgcccatcaacggtggtgtgaccaaccgaccgtataggcggggacaccagtcggcggcgacggaggcaggccggtggtgaagtcgtagacgcccaacagcggcggcataataggccagccgtgtaggcggaggcaccagtcggcggcgacggaggcaggccggcggtgaagtcgtagacgcccaacagcggcggcataataggccagccgtgtaggcggaggcaccaatcggcggcgacggaggcaagccggcggtgaagtcgtagacgcccaacagcggcggcataataggccagccgtgtaggcggaggcaccaatcggcggcgacggaggcaggccggcggtgaagtcgtagacgcccaacagcggcggcataataggccagccgtgtaggcggaggcaccaatcggcggcgacggaggcaagccggcggtgaagtcgtagacgcccaacagcggcggcataataggccagccgtgtaggcggaggcatggacgcccatgaacggtggtgtgaccaaccaaccgtataggcgaggacaccagtcggcggcgacggaggcaggccggcggtgaaagcgtagacgcccaacagcagcagcataataggctagccgtgtaggcggaggcaccactcggcggcgacggaggtaggccggcggtgaagtcgtagacgcccaacagcggcggcataata

SEQ ID NO: 6993 - DNA, 1018 bp, Oryza sativa
gcataataggccagccgtgtaggcggagcaccagtcggcggcgacggaggcagcccggcggtgaagtagtagacgcccaacagcggcggcataataggccagccgtgtaggcggaggcaccaatcggcggcgacggaggcaagccggcggtgaagtcgtagacgcccaacagcggcggcataataggccagccgtgtaggcggaggcaccaatcggcggcgacggaggcaggccggcggtgaagtcgtagacgcccaacagcggcggcataataggccagccgtgtaggcggaggcaccaatcggcggcgacggaggcaagccggcggtgaagtcgtagacgcccaacagcggcggcataataggccagccgtgtaggcggaggcatggacgcccatgaacggtggtgtgaccaaccaaccgtataggcgaggacaccagtcggcggcgacggaggcaggccggcggtgaaagcgtagacgcccaacagcagcagcataataggctagccgtgtaggcggaggcaccactcggcggcgacggaggtaggccggcggtgaagtcgtagacgcccaacagcggcggcataataggccagccgtgtaggcggaggcaccaatcggcggcgacggaggcaagccggcggtgaagtcgtagacgcccaacagcggcggcataataggccagccgtgtaggcggaggcaccaatcggcggcgacggaggcaagccggcggtgaagtcgtagacgcccaacagcggcggcataataggccagccgtgtaggcggaggcatggacgcccatgaacggtggtgtgaccaaccaaccgtataggcgaggacaccagtcggcggcgacggaggcaggccggcggtgaaagcgtagacgcccaacagcagcagcataataggctagccgtgtaggcggaggcaccactcggcggcgacggaggtaggccggcggtgaagtcgtagacgcccaacagcggcggcataataggccagccgtgtaggcggagg

SEQ ID NO: 6994 - DNA, 151003 bp, Oryza sativa
  unsure (1)..(151003): unsure at all n locations
gcgagggtggttttggtgctgtatacaaggtaagttagcacgcaaaaatacaaagagaaaattttcaaatggattgtgcattactttccaaaagatggattatattgcttgctccctgtgaaaaacaatatgttcagggagtgctctcagatggacaagaagtagcagtgaagaaacttttaggaactggtcatggattggaccagctatacaatgagatcaagttgttggctgagcttcagcacaagaaccttgttaggctacagggattttgcttgcatcaggagcagactctgcttgtttacgaatacctcaagaacaggagcctggacaactttctatttggtaattttgccttctcattcatctgttcacaaatgacaaacatatatactcaataagtaaatatcctcagtatcactaaatatgttctgtagcatttccagcaaacaaatcacataactaagaccagaatttgcactttgccactttctgaattctattgaatgtgggtaattatgattaagttgaagatttgtcccaatagatcccagtagagggaatgccctaaactgggatcaacagtacaacatcattctgggaattgccaaaggaatattgtatcttcacgaggattcaagcttgaggatcattcaccgggatctaaaatcaaacaacattctagttggagatgatatggaaccaaagattgcggactttggattagcaaggctgctaggcgaaggtcatactcattctaagacaactagagttgttggaacattgtaagctcataagtataataataccttcattaatagcacatattaattggatgtacgtttccaagtgtaatgcttaccctctgcagtggttatatggcaccagagtacgcaatagatggaaatgtgtcaaccaagatcgacatttttagctttggtgtgctggtcctcgaaattatcacgaggagaaggaactggcattctgacgatcatgatctcgttagtgatgtaagtgcttaataacccttagctcacaccaatatggttctacttttagtgtattggggagaacactgctatattgatgatttttacgtgaaagtaataatctcttaagtttgtcaacatgcctaacaggtttggaattgctggacaaaagggactgctacaaaaatgatttaccagtcgctcaatgggtactctgaaagccaagcattacgatgcatccacattggactactttgtgtccagccagaccccgatgacaggccacacatgtcatctattattttcatgttgaccaaggaaaatatgaagcttcaaccaccagcagaacctgcattctttttgggtagagaatcagcttcctctcctccatcctgtgggcaacacggctataactgtgattgatctggtttagctaaatctagtcattaacatgtgattcgcccggcaaatagttctgaaagaatttttagtataaacattcatttttttctagctagtttggatcataaaagtcatcatgggatttcaaataaattgtgaagtgtagttttttgcttgttttattatttatcatatacttttttctactataattttgtactgaaaattcgaattatttttagtcaactgtaaaataattatatatatgttgccctggaattctcaaacgaatgtaaaacacgagctttgagcatatgtttaaaatcctttcttaaaactgaataaatggaagcaatccatttttatcctctatggacttgttcgatagggctacaacaactaaatgtaactctaaaaattgattctgaagtggagttgtgaaacaggatgaagccggcttcacccgtctagttcgttttgtaaaagcgcttcagctgactccactcttatttttgaatggaggtgaaactgtttgactgggcttcaatttcagaaaagttaaagttagagttagagctatgctaaacagactccatatagctccatattgctaatttgctagtggtaagtttggagcttgatttttcttttctttttcatggccatatgcccattcatgtcacggtcttggatgaccactggtgagccgaataccttgacgagtccaattagcatgcctggccacttggccagtcgcctacaaacttgcaaagtttgcaaatttgtggataattaattcgctactgatgcgatgcaacattgccacttgattacaagttgcaatacttggattattgcgaattgcattgcacattgggcgtgattatcgctgccatgcaagttgcaactggaagcctgtgaatcccaaggccggtgaagtcatcgactagtctttggtctttggcttttgcgactccatcgcctccttttccatagccgcctgcgcactactgtcacttctttccgctacgatgaatcgatgatagaggaggttggtcagttggtggcccgaatgaagcgtgttcaccttgaaatttgaatacgttttccctgatttcaacaattaattgctaatttcaaacaaattcaaaagagtgattatacagtttttatgaaagtatcgggagacactatgttttctaaaagatttgctccggtctaacagaaagtatctcgaggtaccgatacctcgtgataccaaatcgtttctgatcgttggatctaacaatatccatcctgtccagttagatccaacgatcggaaataatttggtacagtgaggtaccggcatctcgagatactttttgttggaccggagcaaatctcgttttctaatataaaatttggcgcgatagctaattcgcgcttgcgcgttggcggcgcgcgtttcaggcctataaggcctagcgctggcgcgtatgcgtgcggacagtgtccacatccgtatatttttcccataaaaaatctaacgtccgctttttttttattttttcctttttcgtgattttttaattttagaagttgaaatctttcatcttcaattttagttgaaaattttgaatttgagttaaaaattattaaaggtaaaaaattgagttgaattttttttaatttagatatgaaagttttcaaatttgagttaaatgttttgaatttttagacaaaaggttttaaatttgaattgaaaattttcaaatctttagttaaaagtttttaaatccgagttgaaagttttcaaatcttgacttgaattttttcaaatctagatttgaaagtttcaaaatctaagttgttttttttgaaaaaaataaattgaaggtgttcaaatcttgacttgaattttttcattatctgagttaaaagtttttaaaaaatcttgacttgaaagttttcaaatctaagttgaaagtttttaaatctgaattgaaagttttcaaatctgggtcgaaatttttttatctgaattgaaagttttcaaatctgggttgaaagtttcaaatctggttaaaagttttccaaatcagagttaaataaaaaactaatactaacaattatcagtatcgctaattaatgacatcaacactaatcagcgttgttagcgctgaggagaggcgagatagggggcatgcgcggctgcaccagttaggcagctagaactcacgcgtccattcggaagacccaaaatttggtatctctggtacgactagatactaaatttgtacttaaaagtttgggtatctcatggcacctcttaaaaactataaaatttgctcaattcaaaaactttgagcagagatactccctacgctatattcaaattcactgctaaaccggtatcttggttgtactagtgtgtgcaaggagacatggattttctatatctcgactagctggatgcaatcgtatccattgttaagcgacaaagttggttcaagaatcagggacgacttgtatggtcgtctctgtctctctgccgtgttggacggagattactcactactatagtccatccccgtgggaacgaacatggattgagctcctctttgcgcacgccggaaataccccgatggatcgccgtctcatcctgtccgtcgccgtcgccgtcgcgctgctcgcgccccgcgctgccggcgagccatggccggtgtgcgggcaggacttcggcaccttcacgcccaagagcaggttcttcgccaacctccagctcatcgccgccacgctccccggtaacgcctcgtcgtcgccggacctctacgccaccgccgtggacgttggcgccgtcccggagcaggtcaccgccgccgcgctctgccgcggcgacgtcagcgccagctcctgcctcggctgcctcacccaggccttcgccgacctgcccaacgcgtgcggcaactccagggaggccgccacctactacgaccggtgcatggtcagctactccgccatcaacttcctctccggcggcgccggcggcgaagacccggcgaggatcgacgcgtacacggtgaacaacgagaacaaggtcacgtcggagcaggggcggtacaaccgcctcgtggcggcgctcgtcaacgccaccgccgactacgcggcgtacaactcgacgcggcggtacgcggccggcgaggccgacttcgacgcggcgctccccaaggtgtacagcctggcgcagtgcacgccggacctgtcgccggcgaggtgccggagctgcctcgccaagatcgtggcgcaggagctttggtcgtacaaggacgacatcggagggaggaccctctccgtcaggtgcagcttccggatcgagaccaagcctttcctcaatggcacgacgatggtgcggctaccggcgacatcggcgccgtctccggcgccgccggtcaacgcgacgccttcagcggccacgccgggacgaggtgagtcgaagtgtgtattactttcgggcggcattactgacattattgcacaattagtcaactacacgtttattatttccaagaaaacccggcaaaaattatttccaagaaaaagctatattttaagtcatttaatttttttctgagtacttgtaggttgtaagtcatttctattatctaaaatgattatttaggtttgatcacgtttgtagaaaaatttagcaacattaacattgaatatattttagtaatatgtttgttctatattgaaaatattaatatattttttttatatattttgttaaatttaaaggaatttgactaagaaaaaattaaacgacttgcagcatgaaataaggggagtagtacagtacagtagtacggaatctgtccatacaattcgacatgttttaacatgataaccttggaaatttgtgaattggtcaattcgcagagacaaagtacaaggttccgcgcctggttcttataatactgctccctataatagcagccgtaaaccttgtcgtttgcttctgtgtctggaggaggaagcgtccagtaataacaaaagcaaagcagacaagtacgtcctacaaaattctccattttaatcatttcagctgacaatgcaaaaaaaaaaaacttatccaattgttgtgatgctgacgtttatgcagatgccaactattacgctgaagcagatgacgttgacagcgtagactccatgctcatggacatttctactctgcgagctgcaactggggattttgcagagagcaacaagcttggtgaaggtggatttggagcggtgtacaaggtactgaaaaagggaaaaaaaaaacaagtctctgaattacaaaccaaaactaatttaattagcatattttgaatcttttcacagggtgttcttccagacggcaacgaaatcgcagtgaagaggctgtcaaagagctcaacacagggagttcaagagctgaagaatgagcttgctctggtcgccaagctgaggcacaagaacctcgtaagctttgtaggcgtctgcctggatcaacacgagaggctgcttgtctacgagttcgttcctaaccggagccttgacctgatcctctttggtaacaatactactactaattgagtctacattaccaattctctcctctgttttctctgcaaagattgatgtcatatcatcgcattgatctattaattaacaccttctctttgatcattgtcagacactgagaaacgcgagaagcttgactgggaaaagaggtacaggatcataaacggcgtcgctcgaggcctgcaatacctccacgaagactctcagctcaaggtagtccaccgtgatctgaaggcgagcaacatcttgctagacgcgaacatgaaccccaagatctcaaactttggcctcgcgagaattttcggtcaagatcagacccaggctgtcacgaaccgtgtcgtcgacacatagttagtaacaacataaactgtagtagttgttcagtcatccagtaattaagtagtgactaatcatgacttcaaattatctttgctgttgcagtgggtacatggcacctgagtacatgatgcgtggcaactactccgtcaagtcagacgcgttcagcttcggcgtcatggtgctggagatcgtgacgggaaggaagaacaacgacttctacaacaactctcaccaatctgaagatctcctgaacacggtgaacatacaacatagtagttcatatctctgaacatctgataacctgcactctgcagattacagtgcagtttggctgatctatgtgtgatgctgcactacaaaaatgatgcagatatgggagcgttggatggccggaaccgtggatgagatggtagacccggccatgagcaggtacgtctcggcgagcgacgtgcggaagtgcgtccacgtagcgctcctgtgcgtgcaggaaaaccccgcggatcggccggtgatgtcgtcggtggtgatgatgctcgacagcgagacggtctccctccaggtgccctccaagccggcgttcttcgccaggaacggcggcgctaaacccggcgtcgcgtccgacgagtcgaccgcgtcagtgtagaacctgtcatagagagagcttcgatcggtccaggatatggaacttcttgcgctgctgattagtggctcccactctgaaaggaggattgtgctactgtacggacaatgtaagaatcatgaaaagtttgcacaatttttgtacaagcccacgtgcattacatggagcatcggaatgaaggaataagtacatttgaggttacttaatttgtcaatgaattcgattttcatccttcaaccaaaaaaccaaatacagcgggtctcttaactattaaaaccggtgtaatataggtcccatgatggtttagatggcgattttagttgacgtgacgcctacatggctaatttgacttagtcttcgtatgacatggcatatatgaagtgaaatttaacaattttaaagataaaataaaatatatgggcccacatgtcagtcaaataatacatactaaaaatagtgggacccacgtgtcagtgggccccaacttcctccacctcatccccttttctctatatcatccccttctccttctctatctcagcctggttaggtagggggaggggggagggtggcttcgagggcgcggctctggcagctatagcctatgggtgacatgagggggcatggctccactggctatgggcggaagaggagggggctgttggaacagaactcacaagtgtgcaataagtgtctgtctagcttctatccccccttccgagggtaacatttacatatttatactaggttgtatgtaaaggaaattacaaccctacccctatctccgtagctaccccgaggtggctgagaggtgggccgacgaatggtccgagggtccattcaccaggccgagagttggcggtgcccatcaaggggagcggtatggcgctagcatgatgctagcctttactcgggtaatagctagcatcggccttcacatcgctagtcgtgccgtaacatcggtggtggatgggagatgagtagtgcgcttttatggcaccccatactcattcccggtgtcctccctaggctccgggcccggagccatggcaagagccccggaacacttgagctggctcctggacctccgaggcccttgaaccggctctggggctccgggggccttgactgggctccgagatccccgaggccctttggttggctccgaacttctcggagccgactgccctcttcaggctcggtcagcttcctaggcgttcgatcagggccctccctgtggagatgggctccgcagggcgttggcggcaggcccctagaggccctacctcctccggagccaataggggttgaatggtgcaaggtcgcaatccttccccaataggggcgctgggaagtggcattggctgtagcggcgctggggttggagcacgggtggttccaaggaatgctgtcggtggtagcagtggggagaatttgagggaagagatagagagggtggaagaagatccgcgccagtctcaagcgttggggaagagcgacggtcggcggcattggggaggagtggcggccggcggaaaggatctgagcgtcggtggaggcattcggggaagcgttcaacctcggcgagcttgtgggcgtaggagcggccgagagccaccgccgtgttccttccccgccagccacaaccacgttcaccgcaccagtccttgtcccaattggcaagtcaagcatccacgacaacatatgtggaggaggctagcgagcggcacaccgacgaggctggtggagtagtggaggaccgtggcaccgggcgctcgtcctttcccggtgacggaaatcagatgacgatggcgttaggggcgggggggagaccaacgggaggtgctaagaggattgcggggaggccgaggggaggcgggaatcagtgtgggtgacggcggaggaaggtggtggtggcgacgggtgaccgtggaggttgaggaaggcgaggtcggcttccgggatactgccaccaacaagcgccgctacctctacctctgccgcctttccatcacgcacccaccattgctcgtccccctttgcgtgcgctcactagcggaccgtgacacccgcgggctcagcagcggtggccagtgcgcgaagaggcctggccggtgacgctcctccctccccaccccatcccctctcaccggcctccgccgattcggcattcgttgacaagttaagggaccttaagtgaacttattccgctcaatgcaggccaacatatctctaagattactcaccttatacatgggattttctgttcgatgggccataatcaatatttgttcggctagaaatatccccttggatgaaaagaggcccattacacacaagactttagattttcaggcattgggatccgtgacctggaatgctaatactatgatacgctagatgctatactctttctagtctaaaatataagtatttctaaattatttcacagagattaaaattgaggagaaaagattttggtgcctctcaacaaaaaagagagggttagagacttaggtgtgggaggatggttgggattaagatggggaaaaatattgaatggaaaataatttatgtgataaaatgtagtgtaaatagtggtacaaatgcttatattattgaacaaaactgaaatcctagatatacttatatattgaaactgatgaagttattaataaaatgcaaccaaactcacaaccatacattaatatattcaccaaaaaaaacccagtactctggcattcttatcatcaagaagaaaatctcaagtggtgcacgtgcaaccagacaggctagacgcagggtcgtaggcggcagtgcggcacaagatagtcaaccgagaaaaatcaatgaaggcggcatatcaaagcatatgccgggatacacgaacatagatgattgatcgaacaatgacaaattcaacttattttacgtgaaaatgtggcaacacatgtatatcaaaattgtactaccttcgtcccaaaatacttatcgttgtgagtttttgtttgtaacattttgatcattcgttttattaaaaaaagtatgaaattattatttattttgtttatgacttgctcaatagtactttttaagtaagacttatattttttatatttgcactagttttttaaataagatgaatagtattacaagtaaaaagttaaagcgacaactaatttggaagggaggtactattattttccttgtatcgcgctagctcctaaacgacggccatatatactgctcgttataaatttactgctcacacagtcacacagtggaattcgactatcctcagtctgccacggcgccaaacaggactagagatggcgctcactcatcacctcctccgcgttctcttagccaccgcattaccgttgctctttctctcccatgcaggtaattaactcgatcagagatgtacaaactacaaattaaggctgaaaggtaattaatctcactttcgtaattaacaatcacaacgacgtcgtttgtttgttcttaatttgcacacagcagatgcgggcgagttgggcgtgtgctacgggagggacgcggacaatctgatggacccgcaatccgtggtgagccttctcagggcgaacggcatcacgatggtgaggatcttcgacgccgacccggcggtgctgagggcgctggcgaacaccggcatcaaggtgatggtggcgctacccaacaccgatctgggctccgccggctgggatccgagctacgcacagaggtgggtggagagcagcgtggtgccctactacccggccacgctgatcaacggcgtggccgtggggaacgaggtgttcgatcaggcgcctcacctgacccagcagctggtgccggccatgaggaacgtgcacgcggcgctggcgaggctgggcctcgccgatgccataagggtgtccaccccgatcacgttcagctcagtcgaggtgtcattcccgccgtccgcaggcgctttccgggatgacatcgcgcagtcggtgatgagccccatgatcgacttcttgcagcagactgactcgtactttatggtaaatctctacccattctttgcatatgcggatccttctaccggaatctccctcgagtacgccacgttccgtcccaatgctggtgtgttcgatccggtgagcggcgtcacatattacagtctctttgatgccgagctagatgcagtttactatgcaataaacaaggtttctggtagtaacgagagggcctcgttagcccaagcaggaggacgggtgcccatcagagtttcagaatcaggccacccctctggtggtagaatccgctcaggggtcacagaagccaatgctgatggggactcggtggcaactaaagctaacgctcaagcatacaacaatggccttgccaagcgagtcttgttcggggcctccaatatggaggatgtttctgcgtacatattcgctttgttcaacgagaacaagaagggtgggccatctatagagagcaacttcggcctgttctatccggatgggacgaaggtgtacgatgttgactttcatggtggtggtacatgtcccacaaaggagagctggtgtgtggcaaatgcagctattgggaatgcacggctacagggagcactggactgggcgtgtagtaacggcgcggactgcagtgctatccaacagggaaaagtgtgctatgagccaaacaccatggttgcacatgcatcttatgcattcaatgactactaccagcgtaatggcaaggcaagtagcgcgtgcaactttgccggtgctgcttacatcgtctacaagccatcaccaagttagtttccattcaatggccatcttttaagatcaataagcttttgcaattgtgcattcaattcatattgtgatatccatcttattatgttttacatgttctatatatgaattgtttgttgggatttaggcatctgtgacccgaacccgagttggtgcgtggcgaacgcagaggtcggggacatgcggttacaggcagcactagactatgcatgcagtagctgcgcagactgcagtgccatccagcctggtggacggtgctttgatcctaacaccaaggtggcgcatgcgacctatgcattcaatgactattaccagactgccggcagggcaagtggctcgtgtgactttggtggtgctgcttccatcgtcaaccaggcaccgagtgagttcacacgcttatgcatacttttatttcgtgttgttaattgttatcttattagcgtttgttcaatcattcataggaattggaaactgcgtactcccaccaagcaagacttcttcaatgaacatattttactgaagaccgaaggtagcttaccagaagctcaataatgaaagtgggattgaagaatagccccgtattactgtgctgagaaaataaggatgatattgtatttagattctggttaagaattttaagtgtattccgttcgctcttgttgaataaaattcctttctacacaatgcagaataaaatgtacaataaactccatcaaactcctagagtgcaatggaaaatttgggaatgcaaatacacttagctgcctaaatagtccatattctgtgctcaaactatgagaaccagcgactacatactttagaaaattaactaagccaaaagttggaaaaacaacgatttctaataattgctccctctcccaaacaaggccttacactgctatacattatattgttaatgtgtccaaattacctgtttcgatggttagttgttcatttatatgctacaaatctagaactctacctactgcagactgcagacaaggtgtttgatgatatgccatgtttaggaacattagttcagagtgtgcaaagaacataagataactggccatataagaatataatgtaatgacaacaactagaatatttaaatgtgccttctaaggtgcagatcaaaccatacgcagatggttcaatgaagttgacaaacaatggtgacaattgcgccactgggaaaggggggattaggaatggggagggggaagggttatctggggtatatgtcagtaactgtcatcctattcacggagatatcctcttcatagattgcattaggccgattatacacgggttgctcaaagggttgagaacatgagtttgagtctccatcaaagaagaatgcaggttgtgccggtggctgaagattcatgttttccctactcaacatgaaaatgacagatgacatgtgaggcctgtcatcaggatctgactggacacacagcagcccgatatgaatgcatcgcagtgcttgtcttcggaattgctcttcaagtgattggtcaattagttgtgtaaccgtcccttttgtccagcaattccagacctgttagacgatttgaaattagtttgttatctaaaacttgatatagagtactttcgggtatgatatcatgaatattgcagtatgtaaatgcactaaaagtatatatgtacaggagcaagctcaaccttattgagcacttacatcactaaggagattcccgcgatcatgatcgtcagaattgaggttccttctccctgttacaatttcaaggaccaacacaccaaaacttaaaacatcgatcttggttgacacatttccgtgtattgcgtactcaggtgccatataaccgctgcagaggataagcattaggcttgcacattcaatatctctatgagtgaaggttttattatgcacatgagcttacaatgttccaacaattctagttgtccgagtattagtatgaccttcttctagtagccttgccaatccaaaatctgcaatttttggttccatgtcctccccaagtaggatgttgtttgatttcaggtctcggtgaatgatcctcaagcttgagtcctcgtgaagatacaatattcccttggcaattccaaaaatgatgttgtacagttgctcccagtttggtgtgtttcccctactggtatctgttgagatgaaatgtttaatttaatcataatcactcacctataatacgtcaaattctattcttagccatgtaacttgtttgtcagaaatgctacagtacatattcagtaccccacactaacttgcagttgtgcattgctcagtttattcttattgatgttagtgtttatagtacagcgactccactattataaatatgtctgtgcatacagaaaagggggagtttttgtacttgcaaagtagatcagcactgcaatctttttttacattgacaaacgaagatagagttatgattatgcttctgaaatgataaattagaagggaaattaccgaatagaaagttatccaggctcccgttcttgacgtattcataaacaagcagtgtttccccctgatgcaagcaaaacccttgtagcttaacaaggttcttgtgttgaagctctgccaataacaacacctcattttgtagctgatccaatccatgctcacttgttcccaaaagtttcttcactgctacttcttgtccatctgagagtactccctgaacacaattggtgcaggcaatttaatcttcgtttgatcactaatgcataatacatttcaaacatttctcttacatttttgggtgctaaccttaccttgtatacaataccataaccaccttctccgagcttattattgtccgagaagttatccgttgcctcttgcagagctggcaggtcaaaaatcaagcattgtgctcttgttatcttcctcaactctgttgccatatgacaaggattatgtcagtgaacagtaaattcgagctactgaacagaggctgtatgctactcacggtggtcagtctcagtaaccttggaccttctcctgaagagaacaactgcaaaaaatgaaaggatcaacaataccacaactgaagaagcgacgacggcagcgattccagctgcactctttttcttccctgcaaacaccaaacatgaacttcaattggggaaaccttgatttcactgtaacttctgttatttttttttcttcaggaaaaatgaagaacagagtaggtcatactccatacctgctccaggctctagagatagaaccggagcctcggctgctggtggtggtggcgccgacagctgcagcatcgcccggcctccgtagaacggccgcacactatacatcagtctgcaccacaccgaattcataccaacccagctaaggctcttgccaaagtacacttgttttgcttgaaaaaggaaggtgttgaggcattccttgcactgctcctgcgtcaggtccggcacgcactgcgcgaacccgtagatgttggggtcgaagtcctcctcacccgtggcgaaatacttcttggtggtcgagttgttgcccgtcgccgtggccacggcgtggtcgaccagggcggcgaggatcttcgcgatggcggcgttgaaccagccaaccgccggcgcattgacgctctccgaggcttgctcgggaacccaactgtttgtaacgagctactcgaattagtctatctgattctagcaggaagagatcgaaagaagggagatatgtagattgtccgtacatcatctcggtgacctgccactgatccggactgaggaaatccatgaacctctggccggagaagcgaactacgcaggcgtcctcgtacacggtgacgccattgatgccggggcaagcattcttcccgtcgacgaacgccgccgcgacgcacgcgcggcaggctgtggcgttcacgtcgccgcggcagagcgccagcgcgaacacctggtcgggatccgcgccgacggtggcgaccgcgaagccgccggtatgcgccgtggagacgttgccggggagctccgcggcgaggtggttcaggttcgcctcgaacgtgctgttgcccacgtacgtgttgccgacgccgaggtcgcagtcagcgatcccagccggcgtggccgacggcggcaggaggacgaggacaacggcgaggatgccatagccggcgagcatcatcgcagcaaaggggggaaggggagaatttttttttctttttgtcaagtaaattggaacaccaaaatggagttgcggcggccgacgtcaaatcgagtggcgtagtctagtcggtgcgacatcatttagcacgttgcggcgacttgaacgcgtaagtggagtcaaacatttcctttccgccagactggctagctatggatggcatgcatggcgttggagtcttggggcgaaattccggtgagactttaggagcatcagcacgatgggggcgaaagccaatggtgggtttgtgatcgacggatgcgaattggattacataagcccatagtcgagactgagagaggtaaaattgattttttttggaaaaagtatacccaaggtccctcaactagtcatcgagttacaaaatcgtcctccaaccacaaaaccagatatatgacatccctcaacttacaaaaccgttcgcttgaggtccttcgatggttttgaccctgattttatttgacgcggctactgagtcagcgtgggacccacgtgggccccacatgtcaggatgccacgtcacaccctttctttcccctcctctcctttcctcccctctctctctctctcttttctcctcaatgggcagctagccggtgggtgggagaaggtccggccggtggatgggcaagaggctggcgagccgagacgggagaggaggaggtccgacagctggcgaccgacaacgggcgacgcggcggcagcggtgacgacaacgaagcaagaggcaacagcggcggcagggatgaggtgggggaagggagaagagagcctcccctcatggcgacggcggcctcctcactctcccgttgcactccccgtccctgctgctcgttgccgtgtcggccccaaggcacctcgccgtcggcatccccatcccgagtcctggctcctccggcggcaatggggatgaggtggggcaagggaggagagggcctccccccatggcgacggcggcgtcctcactttcccatcgcgctcacgtccccgctgctcgttgccgtggcggccccagggcacctcgccgtcggcatccccatcccgaggcatggctcctccgggggtggcggggatgaggtgggggaagggaggagagggcctccccccattgcgacgggcaacatgatgacgatgacgtcctcgctcttccgtctctgctgctcgttgttgcggcaccctcaggccttaggccaccttgccgtcactatccctatctgatgcttggctcctccggtgacggcagggatgaggtgggggaagggaggacagggccaccattcgcaatggccttcaccgcacaaccctttgcagccttggcgtccaccacacatgcgcggccagccatcccacgccgctgtccttcgtcgcctctccacctagagcgacggcgcgccacccacctccgccagtgctgcacggcctcccgcacccgccctcccacaccgcccggcctccccgacgagccaggcgccgtcgcgacgacgcggctgatggagaaggcgtcgtgagtaggctgaggggaggagaggggaaaggggaagaagagactcagatctcactgacatgtggggcccacgctgactcaactgccacgtcggataaaaccagaatcaaaaccgcctgaggatctaaagtgatccggtttcgtaagttgaaggatgatatatatttggttttgcggttagaggacgattttgtaatcgatgacaagatgagggacctctggtgtactttttcctctttttttttcacctcagaaatatcctcctccgatcaaaagtggcccattactcgtatgggctgttctgtcaaatgggccttccgattaattttcatgggctgtaagatgggcctaccaactaggatatcatcgatcgagcncggcgaggagggagaggagggccaaaaggggggggggggggggggggttcgccgttcgccagggaggcgacggggtgatgcgccgccgtggaccggaagggctatcggcagcaccactggaaatgcagatcactagacaaggaggagagttggagccacgtccatgagcaagaagaagggcggcgtgccgtgggagcccgggatgccgggacaggctgagcagagcaggtgcgggttttgcattccgtaggatatgatatgaatatctcttgttgtgatatttttttctttccaggttgcctgtttcgttgattatagctggtctgaatgctacaaatctagaactcaacctagtgcagacaaggtgttcgatgatatggcgatactctggaagatcactaatagctcgagtctgcaaataagatgagataactgaccatataaaattacaatgttacctcaataggcagaatatctgcatctgacttcgaattcaaggaccaaacactagcgaagttcgcctttgatcactttagatgcatacacatttcacttatctatgaaaaactaaaaactaaaagggttatctaggatatatgtcagtaagtgtgatcccattcgcagagatatcctcttcatagatcttaccagaccgatcgtacacatagacgcgctggtcagatgtttgagaagctgagttcgagtttccgttgaagaagaatgcaggctctgttggtggctgaagctccatgttatccctggtcagcatgaaaatgactgatggaatgtccggcctgtcgtcaggatctgattggacacacagcagcccaatgtggatgcatcttagcgcctggtttcgaaagtgcccttcaagtgattggtcaattacctgtgaaatcacaccttcggtccagtaactccatacctgtcaggtgttcttatcagtttttcaatcttttctgaaggagtttttcatgttccttgaagttattgagagttagaagtatatactatagttaattttgcttccattttattctgatcctcacatctcttgtccctcatgattaacactaggacatactacctcttaataccttcaaggagcaattaaagatttccttttgaatatatttcttcaattatgtttgttttagaaatgggaatgtggataccgcaatgtagtatgtaaaaatgcacttacatcacttaggagattcactgtgtcagtggtgccatcgccatagctgcagttctttctcttggttacaatttcaagtaccagcacgccaaagctgaaaatgtcaatctttggtgacacatttccatgtattgcatactctggtgccatatatccgctgcagatgatgagaagttaggcatagaagcacacattttggtcccagcgatttgaattgaatacataagcttactatgttccaacaattctagttgtctttgtgtgagtatgacctcctcctatcagtcttgctagtccaaagtctgcaatttttggatccatatcctcatcaagcagaatattgttagctttaaggtctctgtggatgatccttatgcttgagtcctcgtgaaggtacattattcccttggcaattccaaaaatgatgttgtactgttggtcccaacttagtgcatttcctctactagcatgtgctgcaacaaagtggttagtttgtatcaggcagtgactctgattgataagtagagaacaactttatgatccttttgcaacttggttcttagaaagaaatcctgagaaaatgtttactgaatttttcagtcttagctatggtcctttttgcaacgtcgttgttagaacagtgattacttatttggtttgcagttctgcttgtataactgtatggaaaaaccatttagtactgcaaacattttgaccatgcatgttgcaatttgcaaaaatataattccaatctccaggttgcaacagtttcttaaacttgataaagcaatgggaaatcttatgaacacgaaatcaattaacattgaacaaaattcaggattagtattacttggagaggaaatcagggagaataccaaataaaaagttgtcgaggctcccattttttatgtattcataaacaagcaacatctcatccttatggacgcaaaacccctgtagcctaacaaggttcttgtgctgaagctctgccaacaccagcacttcattgtgtagctgattcagtccatgcccacaactttctatgagcttctttactgctatttcttggccgtctggtaattttccctgaaacagactctttctcataagaaaaaggacctgcaaattttactcttcattttgcttgcataacagtaccttatatacagtaccaaatccgccttctccaagcttatgcttctctgagaagttctcagttgcctctttcagtgtagccaaatcaaagatcgtgcattttcctcttgccattttcttcaatactgttgttgtgttttttttttaatgcaatacatatcaataaatgtaaaataagaaaacagttcctgaacaaacatcaagctactcatcagttacttacagttgtctttctttgcagccttctttctcttgaaacgaatgaaagcataagctgacagtatcaacatcaagacaacgaagcaagcgacgcctgcagagatccctgcaactctccttctcctcgctgcatacaacaaacagacattcagagaagttgaattgatatgtgcagtgtcaaagtttgcgagaaaaaagtatcgtttcttcaatggaagaagaagaaaaagaaggcaattcttttacctgttctagtcggcggagcagcaagtgaaggcatggccggcggcggtggctccggcggcgcagaaatctgcagcattggctggccctgatagaacggcttcacgctgtacctcaggttgcaccaaatcccaagaactctccctccgggcttcccgttcaagaaccatgggatcgacgagacgaagccgccgaggcagctccggcactgcgccgccgtcatcaccggcgcgcactgcgccatcccgtaaatcttcgggtagtgcttcgggtcgaagtcctccaccgccgtggcgaagtacttcttggtgttgttgctgccgctgccggcggccacggccgtgtccaccgtcgcgttcatcagcgcgacgacggcggcgttgaaccaggccaccgggacggccgtgatgttgctgtcggcgtcggagtagagctcgctgaccggcgagttcacgccgacgaagtcgaggaaccgctggtcggagaagcggacgatgcagccgtcctggtaggtggtggcgtccttgctgctggggcagtcccgccgcgcgacgcggaacgacgccgcgacgcacgcgcggcacgccgtggcgttcgcgtcgccgcggcacagcgccagcgcggacacctggtcgggcaccgcgccgacggtggccgtggcgtagccggccgccgccgcggtggacgcgttgcccgggagcgccgccgcgaggacggcgaggttcgcctcgtacgtgctgttcgccgcgtaggcgccgctggcgcatgacgagaactgcatggtctgctgcgccgcggcgagcggcagcagcacggcaacgacgacgactacaactgcgagcattgccgcggccggcagaatgcaacgtacaattcctctttcccttctttgacggacgaaccttgcgcggcaactctgagcctgagcttaactaacaattttttttcttttgcaggaaaaaaacgcgcaattggcggtttttgaccgagacaatgatcagtagctctcgcccgccattacagttgcgctgtttgtcgtttgagaatattcatttcctctgcgttgccgctggtacttgtcaagttctcgtcatcagataaacgtacagcaacttgcattgccaattggctgaggtcggcatttccgtgtcggaaggtgaggcccattctccccggcgaactccggtctcgcgtcggtctccctacataagtcgcctgcctccacctcttgacagtgtcagctgtgtccatggcgcatcgcgctggctgcctctcgatgctgctcaccgccgccgtcgtgctgctggcgctggcgccgcgtggcgcggcgtacccgtggcaggtgtgcggcacgacgggcaacttcacggccaacagcacgtaccaggccaacctcgacgccgtcgcggcggcgctgccccggaacatctcgtcgtcgccggacctcttcgcgaccgccatggtgggcgccgtgccggagcaggtgtcggcgctggcgctgtgccgcggggacgccaacgccacggagtgctccggctgcctcgccacggcgttccaggacgtgcagaacatgtgcgcctacgacaaggacgccgccatctactacgacccttgcatcctctactactccaacgtccccttcctctcctccgtcgacaacgccgcctcgacgagccgcgtcaacctgcagaacgtcacgtcggacccgggcaggttcaacggcatggtggcggcgctggtgaacgccaccgccgactacgccgcgcacaactccacccgccggtacgcgtccggcgaggccgtcctcgacagggagtcggagttccccaaggtgtacagctgggcgcagtgcacgccggacctgacgccggcgcagtgcggcgactgcctcgccgccatcatagccaagctgccgaggttgttcacgaaccgcatcggcggcagggttcttggagtcaggtgcagctaccggtacgaggtaaaccccttcctcaatggcctggtgatggtgcatctgactgcgccaccgattccgacagcatcaccgcccgccgctgccgcggcggcggccggagaaggtgagtcaaagcatgcttcttttttttctttttgcttactctagattttgcacgtgcgtgatggctttcaaatgattgaaacattgtttagttcatccattggtgacaaaaatgattagcgaagtcccctgaagttggtttgatgtgattgatcttccgttgattaattcaactggtagttaaccttgtgagagtcgttaacgaacactgctagcattgtggagtactatacacatataggctgcgtttgtttcagggtgttcccaacccctgttcctcgttaatagactgctccatttttcgtgcggagtagatgggttcccaaccccatgtgtcgaacacagccataatcggtaggtgatctatctgtgttgtttatttgtgggggtggtgtatagggacagtgtcatttcattttcagtatgtcagcttcagtgtatctacaaaaaaataacaataaaattaaagaatggaattcgtaggccaagtgggattagagatgcagtgcaccaagtagataagatgtcacatttgttggcatttagcccttcacaatgttcctatcatcatacagcctgtggttttgttcttcagtcagcgcctgtaggtttgctccaatacagaggcacattctgaaggcaacacactgtattggctacggcattagcagttagaagcaatgtttgtttaaagagtaaatttcacaaaactatatgtgttttgcacaatctatctatctattatataataattatataattaaagtaatagaaaaaggagccttcacgttcgctctcacggcttaggaattctcacattaatcgaaagaaaataagagaaaaaaacaaaacaccaagtgtattaggattaggtcatgcaaacggacaagaaaaattaaaagttaaaatggacagaacaaatagaaaaaaaaacaaaggatattataatgatagtgtgtaaacagataatgattctttggaatccgtatgagagaatttctgcatgcccatatcacggtaattgacttatcccttttttaattgtacacaatacatgtcatctcaataaatacatgtcctagaaaaacataaataacaaaagtaatcgcatgattttctcgccgcaaattagcacatcagtaatctttttactacaatccacttcatcagcagattaacaaacataaatcttttcatgcaatccgcttcgtcaactagcagaccgaaaatatatataatttacaaataactaaaatttgatattaaaaataattaataaataaaacatatataaaataaaatatgaatattacacatcagtagtttcgtaaagttattgcaaaatttaaaattatgttgtcattttaatatatttaaataatataatgagaaaacatatatgctattatatgagagaaaatataatgatgctagccgcgcaatctgcgcgggccaccatgctagttaacttattaaaggaatagaaaaaggagcctccacgttcgctctcacggcatagaaattctcatattaatcggagaaaaagaaaaacaaagtccatatagaaatacaatttataaataactgaaattcggaattaaaaagtaaggaatattagaagtagagtatagagtccatatagaaatacaattatgaaataatagaaattcggaattaaaaataaggaatattagaagtagagtatagagtccatacagaaatacaattaggaaataatataaattcggaattaaaaataataaatattagaagtagagtatagagtccatataggaatttaaaactaactaaaattcggaataaacataataaaattaaaagtagagtttagagtccatataaaaatacaatttacaaataactaaaattcaaaattaaaaaaaaacatgggaagaagattctaaagtcaatatagggatataatttagaagtaactgaaattcgaaattaaaaattaaagaatattgaaagatgagtttagagtccacatagaaatgcaattagaaataacaaaaattcagaattaaaaataaaaaaatattggaagaagagcctagagtctacatagaaatacaatttacatataacgaaaattcagaatttaaaaaatattaagaataattaataactatacagaacaaatagaaaaaaaaacaaaggatattataatgatagtgtgtaaacagataatgattctttggaatccgtatgagagaatttctgcatgcccatatcacggtaattgacttatcccttttttaattgtacacaatacatgtcatctcaataaatacatgtcctagaaaaacataaataacaaaagtaatcgcatgattttctcgccgcaaattagcacatcagtaatctttttactacaatccacttcatcagcagattaacaaacataaatcttttcatgcaatccgcttcgtcaactagcagaccgaaaatatatataatttacaaataactaaaatttgatattaaaaataattaataactaaaacatatataaaataaaatatgaatattacacatcagtagtttcgtaaagttattgcaaaatttaaaattatgttgtcattttaatatatttgaataatataatgagaaaacatatatgctattatatgagagaaaatataatgatgctagccgcgcaatctgcgcgggccaccatgctagttaacttattaaaggaatagaaaaaggagcctccacgttcgctctcacggcatagaaattctcatattaatcggagaaaaagaaaaacaaagtccatatagaaatacaatttataaataactgaaattcggaattaaaaagtaaggaatattagaagtagagtatagagtccatatagaaatacaattatgaaataatagaaattcggaattaaaaataaggaatattagaagtagagtatagagtccatacagaaatacaattaggaaataatataaattcggaattaaaaataataaatattagaagtagagtatagagtccatataggaatttaaaactaactaaaattcggaataaacataataaaattaaaagtagagtttagagtccatataaaaatacaatttacaaataactaaaattcaaaattaaaaaaaaacatgggaagaagattctaaagtcaatatagggatataatttagaagtaactgaaattcgaaattaaaaattaaagaatattgaaagatgagtttagagtccacatagaaatgcaattagaaataacaaaaattcagaattaaaaataaaaaaatattggaagaagagcctagagtctacatagaaatacaatttacagataacgaaaattcagaatttaaaaaatattaagaataattaataactatcacgtatataaaatacaatatgaatattacacattagtagtttcgtaaagttagtacaaaatttaaaattatgttgtcattttaatatatttgaataatacattaagaaaacatatatgctattatatgagagaaaatataataatgctagccacgtaatctgcgcgagccaccatgctagtttatcataaaactaaatatttaagagcttgtttcacaaaactaaagatttagtgtctccgtttatcacaaaactacaagtactttgtacaatagatcacaaaactacagatttaagaatttgtttcataaaactatagatttagtgtattcgtttatcacagaactacacatttagtgtctttatttatcacaaaactacaaatttagtgttttaaaacctatagttttgtgataatggagacactaaacctgtagttttgtgataaatgaagatattaaatctgtagttttgtaaagcaagttcttaaatatgtagttttataatatattgtgtaaagtacatgtagttttgtgataaacgaagacattgaatctgtatttttgtgaaacaagttcttaatctgtagttttgtgataaatcgtgcaaagtatctgtagttttacgaaagagtgaattgcattggcggtacacgaatttgtcaggtgggtgcaatctagtgcatgaacttataaaatgctcatgttggtgcatgaacttgtctagtgcgtccggaggaaggcgaaaaggacattatatatatagctaatcttattgatttaggggctaattaggatattatgtaaacatatatctgagaaggttgctattagacatacacctcttcaataaaaaaaatagaatatgatatagtgatagtagaaaaagatgaaaaaaaccaagcaaatgatattttggtcctcgttcgcacgaaatagacaagtttgtgtactgaaatgaggattttacaagtttatgtaataaattgtacccacctaacaagtttgtgtaccaccaatacaatttactctttacgaaatttactcttgtttaaatgatcttgacagaataaaaaaatattttttccttcagttttctgaatatacatgacaagaatatggcaaatgagattgaaaatgactgaaaggcgatgttggtacttgcctattagcttctggcagctcttgcacgttgcttgcgtaatgctattgattatgtgtttagttgcaacttactcatttgatctgaaattagtctacatctgtcaattcacagggaaagattacaatgttcctcgcttggttctagcaattttgctgcctactatagcagctttagtgctaatcaacattctagtttggctctgcttctggaggaggatggagaggctacgatcaggagcaactcagccatgtatgccctgcaaaatttttcaaggagaatttgaaacaaattaagttgttagcttacattggcatttatacttgaacagattccagcaactctgctgaatcggagaatatttcaagtgtggagtcgatgcttatcgacatttcgactttacgagctgctacagggtgttttgcagaacgcaacaagcttggcgaaggtggatttggtgcagtgtacaaggtgctgactctaacataactgaagaaagtatcactaaaaatatattcattactaagtgttactattgatttggtctgaacagggtactctgcctgatggcgatgaaatagcagtgaagagattatcgaagagttcagcacaaggagtgggagagctgaagaacgagctcgcattggttgcaaagctccagcacaagaatcttgtcaggcttgtcggtgtctgcctggagcaagaggagaggcttctcgtctatgagtttgttcccaaccgcagcctcgatcagatcctctttggtaccaccaaacttactaatccactcaattttagctaaatatcttcaccattttctctgcaaagttcaataacatcaagctgatcattcactctcaacatgtttttttatcaatatcagacgccgacaagcgtcaacagcttgattggggaaagaggtacaagatcatcaacggcattgctcgtggcctgcaatacctccacgaggactcgcagctcaaggtagtccaccgtgatctcaaagcgagcaacatcttgctcgacatgaacatgaacccgaagatctctgactttgggctcgcgaggctcttcgggcgagaccagacgcagggggtcaccaacctcgtcatcggcacatagtcagtggcagtaacccaaatacagagaacataacaatttgttgaaagctgttgcttggatggtcagttaatgaatagtactttacgctgttgtatttcagtgggtacatgtcaccggaatatgcgatgcgaggcaactactccctcaagtccgacgtgttcagcttcggcgtcatggtgctggagatcgtgacggggaagaagaacaacgactgctacaactccctgcaatccgaagacctcttaacccttgtgagcactaaccatatgatcctactcgtctgttcatggaaaaatgaggtgattgcttagctaaaattgactggattactcgtttttgtgcaggtgtgggagcagtggacggcgagggcggtgtcggaggcggtcgacccggtgatgggcggcggtttctcgtggagcgacgtgatgcggtgcatccacatcggtctgctctgcgtgcaggagaaccctgcggatcggccggtgatgtcgtcggtggtgatgatgctcggcagcgacacggtgtcgctcagggcgccgtccaagccggcgttctgtgccaggaggaacggcggcaccggcggtgccggtgccagctcggggggcacgtcgtctggtacgtcgacggcggcgtcggtgcaaggcaagtaactgtagaagtgtgcaacggtgaaactgtgctcgctgtgtgggatctgccattccgctgaagcattctttgccaggttaggttaggctttcataagtatataacgcaatgtaccagactgattaccaaaagaatcaaagacagcaaaatatactgaaaacttgtggttcagtggctccatggagcctgagttcctgtgctacaaaccagtgatttcaaaatatttgtaaacttttgtaatagagagtaattttacggtccttgaagagattacatgaggttttactttttctattgtaaatttgttacctaggtaatatgaggtaccaaattttacattaaatttttggtaactcatggaacctcctcaagcactgtaaaattgctctttttaatagaagcgcatggagaaaagggtaaagtttttgttgacaaggttttgctaaattttggttgcttgaagttttattatcttgtagtcaccaaaaattgcaaggctaattttagttaaacttcactgcaattttgtttatgtacttgggtttacgttacctcagtattctgtatttacatttttgtataggttcgtcattttgaaatttattgtatggttagattaatttgttcaacctgtataaaaagaaacaatgagaaaagttgtgggaatgatgagcatagttagatctcatccaaaggataagaaaagtgggaggcattgaaatttctgtcacttgatgaatagcccttttccaaatcgtaaacaaatgtgacgtgtactaacaattaacgaataaactaaaacataatatattgactcaatcaatggagaaatgcattcagaattcagtaatacaaattatcgaaggctttctccctgtaagtttgacagatagcaatctgattgtccttgcaattgattttcctatctttcattcagaaaattgatttatttatcttggttcaagctctgtaacagacacatcattaactgacatcatcccagacctatgggtcggttgggaagtttgtgggtatgattccgagtatatatttgagtctgtaccactcttgggaatgaaaaatgatggcttggatggggattgaagagacactgtgttgctgctaagcatgatattcactgttgacatcataggtcgatctgctgggttatcttgaacacacagtagcccaatgtgaatacacttgagcatctggtctcgaggagcatggcttgtaagagagggatccatcatctccaaaattgttcccatggtccagtgctcccatacctgcatcatattggcaaagatgattcagaatttttgtaacaagttaggagatcattctgattagctttgtagaatagtccaggaaaaaggacttacacggcttaggagatcatatgattgatcaaagctatatgaaccactgcttcttcttcctgtcacaatttctatcatcaatatgccaaagctaaagacgtctgattttacagaatagtggccacgcatcgcgtactctggtgccatatatccactgcagtaagagaataaagttactcatgccagcatactatttgtatctgattgggttagtttagacaatacttactatgttcctaccacacggcttgtgacttcccttgtttgatcaccctcaaatagtcttgccaagccaaagtctgaaatcttagggttataatcggagtctaataaaacattgcttgctttgaggtctcggtgaattattctcagttgagaatcttcatgaagatactgtaatgcgcgagcaattccatttattatcctaaatctttttccccagtctaactccttccttttctcaagatctgtcaattgaacaagaaatgtcttagtaaactacagttttaccactaatatatattcatgatgacaagggcatgtgaattccaagtgtttggcttgggttgaagacctgattcaagaaggttggggggggggggtgtaaagaaacacattttggaaaggaaatgtacagttcagatctagtagtgcttgtgcaattgttgaattctgagaatagtaccaaatagaatggtgtcgatacttctattgggcatgtattcatacacaagcaatttctcatgttcttgcaagcagacaccaacaagcctaacaagattcttctgctgaagtttagcaaccaaaacaagctcattttttagctcttctattccttgtcctgaactcatagagagcctctttacagctatctcttcaccactaggaaggacgccctgcataagtgcaagcactcgcttattgaagctgtacatagttatgcactatataaagtgaatgatatatatgattgcattggcaccttataaactgaaccaaatcctccttcaccaatcctattgctctcagaaaagttacccgttgcagcacgcagtgttgatagatcgataaaaagtgaatccgtgctttcaatgtcctccgccatttgaattgaatctatcaaaagagggcaacaacattatgatgcaatgtaactgaaatattaacttttcctgaaatataacgtcgacatttccaactatgaaacccttttttcatttctagggaataaaagaattcaaataatcaaagggaatcactgtttccctctcactataatcaaaattgttggtgaacttacatgaagattgctgttttgaccttgatctttttctccacctctgaacagaaagacaaatgacaaccgtagccaacaatataacaactaggggcaatgcaatggctagagctgtgccacttttatttttctttcttcctgcaggcaagtgatttcagcttcagacagataaaacttgtttttgttgcgaagacagacatatagaagtatagaacttaacaagactaattcataacctaaatatgatgacacatatccactataattaaggtttctgttcaaaaaggtacatgctacgaagtcacaccagaaacttatttagtgcaggtcaacactttgacctatacagcacaccgcaaagctagtaaagtcaagcaattttcaatatattataaacgactattttttactgttaaaaaaggtattttagaatatggtttcatcttctcgtgtcttttcctaattaaacgggaaaacatggaggaaaccaaaatcattgttgaactttacatgtaaagcacatacatacaagttgcataatggaagtgcagttaattaccaacactacattggaataaatgtgtgaactgaccaagtaatcaggctcaattggaaaagacacgagaagatgaaaccatattcacctagctctggcgctggagtgatcagatctacaattctttttattattactggtggtatccacaaatctcggcaaagtagacaaccaggataattgaatacaaataaaaatatgaaagattgtggggaaatttatggaaagtgacggagacgtgatcaagtgataaggaaaagtacttctaaaagtattcctgaaaacatcatactagtattatttattggtaaataaatgcattgcagttggaaatgttgagtaagacgtgcttttcgccgtttctggtcaagaatccgatagaaacaggactaaagaaatgtcaagatcaacccaaaaaaggaagaaaagtgtacagggttataatatgtgatagctaccagcgtaccaggctcctttgaccagtaatccccatgcaaccagttgccatgattgagatatttttatatttccccacatttttattttgttatttttgcaattcaacagtactgcaaagcaaaccacaattcttaacgcggtaacattttttacctaaacagcagaaacaatttgaagacatagtacaagtttgtttagagttttcttcttcaatagtcgtttggttgtcttcattttgtcaaaattgatggaaaattaattatgagcagatgttgtcgcgctaattaaataccaagataaattactgcaaaagaagtggatcccctttgtctgcaacacacctccggttggcgccgtcggcgtcgagttcgccggcgccgggagccgcagcatcgagcctccggcgaagaaaggacccacctcgtacctgaaattgcagcgcatcccgatagccctcccgcccttcctccggctgaggtaccgagggatcagcgcgattatgcgcccgaggcagctccggcagtcgtccggcgacatgtccggcgtgcactgggacagcccgtagatggtcggagtagcggcggcggcatcgaaggcctcctcccccgtggcgaaccgcctggacgagttctccgccgcgtagctgctggtggcgttgaggagggtggcgacggcggcgtcgaacacctccgccggcgcgctcgcgttctgcgtgttcatcaggaacctggggctcccgtcgtcgtcggcggcggcggcgaggatgttcctgttggagaaggcgaggtagcagaggtcgtagacgatgaacgcgtccttgtcgtaggggcacagctgctgcgcgtcctggaacgccgtggcgacgcaggactcgcaggcggtggcgttggcgacgtcgccgcggcagagcgcgagcgcgtagacgatgtccgggacggcgccgaggctgtccttggcgaagagcgtccgggacgcggaggcgttcttggggagggtggcggagagcccggcgaggttggactggtaggtgccgttcgccgagtagttgccgccctgcccgcagaactgccacggctgggccgccgccaccggagcgaggaggagcgccgcggcgaggcggcagaggaggacgcggtggcgcgcaaaggtggccatggctgcggactgcggagatgctctccgtcaagctaagtactgtcgcttcgtttgaccgggtgcgggctgtgactgacgtataggacccctactgctctcaaggtgatgaagctgcagagacaaaattgaagaagaaattgaagtgatgtgacttgtctcttgtttgacctcggacttcttcatcagctcagcaaacaaagaaaattcaggatctgtttagatccactaaaatagtaatttttttttgtcggtttggacaatattttagcaaaatagatctaaacactagtagtaaaaagtagacaaattgacatttatcatttgggagtccagagcagcaaatttggcaaaaaagcgttgggccccatgcgggacgcgcactgcccctcactcgctctctctctctcatccgctcccaaaaatttccctatccgctcgctctctcacccttgctccgctcgcgccgccgctcatgccggctctgcctccgctgatctcacccgtcgctgccaccactcatgcccgcatccgcctccacctccgccgaactcgtccgccgcaccagtccaagacctagccggagatggacggcgacggctccggcacgagggacttcatgtcgcaggccgattcactttcccccgccggcgggtaagaccctttcaccaacttcccgtaccactttattagatccgacaacggtagtgcttcaggataggcatggcccccctcgacgtcaactccgacgatgatgggtggccgggaatggaaagctacaagggcctccttcgctccggcacaaacactagcagcagcaagagagattgctagagtgcagagacaacagcaattaataaggtgccattaatatggacaaatcagtttttaatggtaaaatgaaaatactttaccatacatctaaacaccaacttgtaaaattgcaatgtcaaattttttgctatcaaaacttttgacaaaaaaaaattaccgcatcaaattgattttaagaggccctcagagaaaaatgttcttaggtgagggttaggaacccttacctcccatacggaaaacagagtgatggattagtgcacgattaattaagtattagctaaaaaaaatttaaaaatgggttattatgatttttttaaaccaactttcctatagaaattttttgcaaaaaatacactgtttagacatttaagaagcgtgcgcacggaaaacgagggaggagatgataggaaccagaagagccgaactctagtaacttgcgaccaaattcgtacaaaaagcggacggtgaaaaccaatcgattttatcatgtagggaaacgtgctccatctttttaatttttcccccgaacctgcaaaaaagttacgtatcattataggcttgtttaaattgatggtattttaaactatatcattatttgataaaattaataattatgtagctatatgtagtttgctatctaattttggtaatgtccatagaattttgataatattatggccttgtttagttcgtggtaggaaaagttttggtatgtcatatcggatatacggatacatattttaagtattaaatgtagactaataacaaaacagattacagattctgcctgtgaactacgagatgaatttattaagcctaattaatccgtcattagtaaatttactgtagcactacattgtcaaatcatgaaacaattaggcttaaaagattcgtctcgcaatttacacgcaatctgtataattagttttattttttttgtctatatttaatactctatgtatgtgtccaaatattcgatgtgataaaggtgaaaagtttttccctaggaactaaatagggcctatactgagcacatcctagtagaacttggcaatgttgccgatttaccaaaattttaacattatcaaattccgaaaaggttcattttattatcaaactgaacagacctatatttagaagaaaaaaaagtacttcctccgttttaggtcacaagacgttttgatttggtcaaagtcaaactgctttaagtttgaccaaatttctagtaacatttttaactcaagataaatttattatgaaaatttattcaattattgatttgatgaaactaatttagtattataaatattattatatttgtttataaacttagtcaaacttgaaacaatttgacgttgatcaaagtcaaaacgtcttataacctgaaacggagggagtacccgtacaagcccttaagagcaagtttaatagtatagcccactacgagctccaaatcatctatagctaatgtaatagtcaattcatacaatagttgcttactatactattaatatctggttcatctgtcatacacatattacgtcttagagtccgtgctgcagctggctacagatctgtagcccgcttcttttttctctctttctttatctttttataatatgtttatagctggtttatagcctgctatttacctactctaaggagagaaggatccaggaggctagcgcttcgtccctaatggctgcacatgggcactgtttggtatgtgtttgtgccatgcgggtagcatcttctgttttggtcagaaagattggttggtaattgctaaagtcggttctagtggatacaaccaattgtgttcattttattcggacatggcacataatactagtgattaattcagggtgaaaatcctgatgtagtttatctcgatttggcaaattcggtgctggtttgtcacttttttttttgttgacggtatcatctcagtctttttttcgatggcagatgtaagcaagcgttgggtccttcctcaaaacgttgttttggagtagatatataaaactttatggttttgtcttggcttgtcttgactgtatatattttggatgtgactaaccatatatttttgtaatgccattttcaatggaagatattatttttatatttccaaaagttccacataagcaaaaaggtatatagttgattaaaatagctcatacaatttattgttttgtttttcttgtttcatagacaatacatacaagatacaagttgtattaaaaacaatgtcgacatggttttatcatctgaccatttcattaatttcttgccacatcataaataatattgacatgacaccccgtttaatgagaatgaaactcatattgggattggcctaaattgttataagataacataatatatttatgtttgtcttaggtttttttttctaagttgtgtacatgcctggttgatgcagaggtcgtgtgtaatttcagtcttaccactatctgaagaaattgaaaagctagatttattcgcagtatgccaccttagcatcagtaaaaggtttgcaacaaatttttattttgtgtgtatagcttctacataaatttttgtcactggatgtgcaaccaaccaattttcaaactataaaataaacaagggtggcttgtacgaacaaacaaaaccaaccaaaatattgactcagccaatggagaaatgcactcagaattcaatgcttctcctacaagtttatggccttctccctgaagtttgtttcttaaaagtaacaattcaattaccgttgtcactgattttcttatcttaaattcgaaggatttggtttccttatcttggttcaagctctgtaattgacacatcattaactgacatccctcccgacctaccggtcgaggcagtcgattgggaagttagtgggtgtgattccgagtatatatttgagtctgtgtcacttttgggaatgaaaaatgatggcttggatggagattgaagagacactgtgctgctgctaagcatgacattcactgttgacatcataggtctatctgctgggttatcttgaacacacagtagcccaatgtgaatacacttgagcatctggtctcgaggagcatggcttgtaagagagggatccatcatctccaaaattgttcccatggtccagtgctcccatacctgcatcatatattcatattggcaaagatgattcagatttttgcaagaagaagtaagctacttaaatttgtagaagagtccaggaaatgagcaaggactcacaagacttaggagatcgtttgattgatcaaagctgagtgaaccactgcttctccttcctgtcacaatttctatcatcaatatgccaaagctaaagacatctgactttacagaatagtgcccacgcatcgcatattctggcgccatatatccgctgcagtaagagaataaaattactcatgctgacatactatatttgtatctgattgggttaatatggacaatacttactacgttccgacaacatggcgtgtgatctcccttgtttgatcacccccaaatagccttgccaaaccaaaatccgaaatcttaggagtatagtcggagtccaatagaacattgcttgctttgaggtcccggtgaattattctcagctgagaatcttcttgaagatattgtaatcctcgagcaattccgtttattatcctaaatctttttccccagtctagttccctccttttgtcaagatctgccagttgaacaagaaataccattagtaaaccacagttttaccagtaatttgttgaattctgagtagagaatagtaccaaatagaatggtgtcgatacttctattgggcatgtattcatacacaagcaatttctcatgttcttgcaagcaaacaccaacaagcctaacaagattcttgtgctgaagtttggcgaccaaaacaagctcattctttagctcttctattccttgtcctgaactcatagagagcctctttacagctatctcttcaccattaggaaggacaccctgcatataagtgtaggcactcacttattgaagcagaacgcgaacataattacatgaagtgagagatatatatgattgtaccttataaaccgaaccaaatcctccttcaccaagcctatttgtctcggaaaagttacctgtcgcagcacgcagcgttgatagatcgataaaaagtgaatctacgctttcaatgtcctcccccatttgcattgaatctatcaaaagagggcaacaaaattttgatgcgatgtaactgaaataaatgtgacgtcatttccaactaaaaattgtagggaagaataaaattcgaattgtcaaagggaatcactatttccctataataataatcaaaattgttactgaacttacatgaatgttgctgttttgaccttgatctttttctccgcctctgaacagaaaaacaaatggcaaccatagccagcaatacaacaactaggggcagtgcaatggctagagctgttccacttttatttttctttctttctgcaagcaagtgatttcaatttcagacagatatgaacttaacgagactaattcataacctaaatatgatgatacatttccactataattaagtttctgttcaaaaaggtacatgctacagttcaacacttttcagtttttgacctgtacagcacatcgcaaacttttcaatatattatacagggctttcttcactgtaaaaaaatggcattttagaatatggtttcatcttctcatgttttttcctacttaaatggcaatacatggaggaaaccaaaatcgttgttgaactttacatgtttaaggcacatatatattgcataatggaaatgcagttattaccaattctacatggaataaatgtgtgaagaaacaggacaacagaaatgtcagatctatccaaaaaagggcaaaaagagcacagggttatctatattaatatgtcatagcaaccagatttctctgaccaatgttcagtaatccccatgcaaccaatttccctgataaagacatttttgtctttacctaaaaaatttgcaattcagccctactgcagagcagccacaattcttaacgcagtagcatttctaacctagacagcacaaaacaatttaaagacatgcaaattagtttaggggttctttcttcctttttcttcgaactgattgtaagtttctctctttctctactcaaaactactactatattggtatcttcggtaaattttttttcctagttttctcaaaattgatggaaaactaattatgaggagttgttattgtgctaaataccaacaccccatctgttttaaattactcatcgttctagctttattttaagttaaacatttatctttcaccattaacttttagaaattcatataatttaacatgtgaattatatatattatgaaagtatttctcatggtaaatcttaaaaacataaatagtgtgatgttaaactatatgattttctacacatcgatgcttaaatatacaaatttttgactaacaacaaaggtaaaacgacaagtaatttgaaaaatggagggagtgctataaatttactccaaacgaaactgatttttgaccgcaaatctgcaactcacctccggtgtgcgccggtggggtcatgtttgctggtccaggtgcaggcggaggcgccgccggcgccgccggcgccgggagccgcagcatcgagcctccggcgaagaaaggatacacctcgtacctgtagttgcagcgcgtcccgataaccctcgcgcccctcttccggccgaagtactgaggtatcaacgcgattatgcccccgaggcagctccggcagtcgtccggcgacatgtccggcgtgcactgggacagcccgtagatggtggggtcggcggcatcgaaggcctcctcccccgtggcgaaccgcctggacgagttcgccgccgcgtagccgctggtggcgttgaggagggtggcggcggcggcgtcgaacacctccgccgtcgcgctcgcgttctgcgcgttcatgagcatcatggggctcccgttgtccgtggcggaggcgaggaggttgcggttggtgaagcggaggtagcagaggtcgtagacgatgaacacgtccttgttgtaggggcacagctgctggcccccctggaaggcgttgtcgacgcaggactcgcaggcggaggcgttggcgtcgccgcggcagagcgcgagcgcgtagacgatgtccgggacggtgccgaggctaccggccgcgaagagggcggcggaggcgttcttggggagggtggcggagagctggcggaggttggactggtacgcgctgttcgccgagaagttgccgctctgcccgcagaactgccacggctgggccgccgccatcggcgcgacgaggaggagcgcggcggcgaggaggcagcgtacgcggtggcgcgccatgaccgcggagacccgtcgtcactcgtcacctgtgggttggagaaaagttgtcccgcaagctatgtaacgtgcggctttagtttgaccaattgaccgtgtggtgctggctgagaatgacaggtggggcccagcttctcggtgctcaactgctccagaacctgcagagacaatcatcgcagaagaaatttgctgtgatgtgacttgtctgccgactctgacctcagcctcagcgtcgaagacttcaagaaactgttgatcagctcaactaaaatgatatcaaagacttctctcaactgaaagaattcgtagtttagtttgaccaatttcatacaagtgaaattttccattatgaaagaattcgtacaaataatgaacaccaatctattctggcagtcacattctgagtttcagatcatctaggatagggatcagtattggtgacatcatttacagagaatttatcctcaacaatcacgccactcttatcatacatgtagttgcgatgtctgtgttgttgttgataaactgaactgaagtcccctccaaagaagaatgccggttgccgcggttgctggagttttattctgcgtctggttaacattagaatcactgaagatatgcttggcctgtcaatggggctctcttggacacaaagaagaccaatgtggatgcatcgtagcactttgctgtcggaatatccatcaagtgattgatcagccagctgcagtgccgtcccctttgtccagcaattccacacctgttatatcaatgtagtcatttttttttcagttgaaacttgaaagtctcttcagattatcaagcagtagaggccaccataaaagttctaaatcaagtagagctgaaaatagggcttacttctgtcaggagattcactgcgttgtatgtggtgtcgaaaccgctattccttctcccggttacaatttcaagaaccaaaacaccaaagctgaaaatatcgatcttaggtgataccttcccaaatagcgcatactctggtgccatatacccgctgcatgtagaagatcagcaataagtctacactttggaactgggaaacttacatttatctcattcaagtttcagttatgtttgtgaacttactatgttccgacaactgtagccgtcttagtctgagtatggccacctcctagtagccttcccaacccaaagtctgcaatttttgggttcatgttttcatccaacaatatattgttcgctttcaaatcacggtgaatgatccttatgcttgaatcttcgtgaagatacaatattccctttgcgattccaagaatgatattgtaccgttgctcccagttaagtgtcttcgccctactagtatctgtttcaacaaaataaattatttgaattaaacattttttatcatatacaatatatggaaggccatactacaatcatgtcatatctaaaaaaattactacaatcatgtaaatggagattgttaattgtacattctagtattagctaatttctgtagcaactcgtttgccgaaaatgctacagtgcttggattatccatcacactccatcactacttatacaatactcatttaattcttgtcaatcccttggcatagctggttatagtatagctttttagaggaaaattaacaattttgtgctcaaatgtaagcataagtttcaaaagagatcagtttgcagtgtgtcaccagacaaaatactggatcagcagccatagaggaaggaaagtaccaaaaagaaagatgtcaaggctcccgttcttaatgtgctcataaacaagcatcatctcatcctgatgcgagcaaaaacccagtaatctgacaaaattcttgtgctgaagctcagccaacaactgaagttcattgtgcagctggttcagtccctctctggtgtactgtgcttgtgacagcttcttcactgctactttttgcccattaccaagctttccctgcaaaacgaacctgttatagagaagaagagaaaatggtagtcaggtctattttttttttatcttacatactatggttatttaccctgtacacagtaccgaaaccgccttccccgagcttattactgttagagaagttatcagttgcaatttgcagtgttggtaaatcgaagatcgcgcaatttcctcttttgattttgttcggtgctgggatgattggagctggcattggggtaaaaatggcatcaacagactgaaactcatgctaattctgaatgaaacataaaatgtgtgccactcactgttctggtttttggaagccttcctcctcttcaagcagatgaaaacagaacctgaaataatcaatacaaagacaatggaacaagcgactgatgcagatattatcacagctgtcctctttcttcctgcatgaatcattatttacaaacagaaaatagtattagtactcgcagaaatggtcaaggaaggacacctccgcgttaaatttgtcattaactggtcaattaagcaactgattgtgacgggactgataaattaagaggtagcagatccggtttttatgcaggcgatgtgtagtttggtcgtgcctacccctaccaaactttgttgacaatggtgaaacaagttaaaactggagataatcttttcgatatgagaggaggcaaacccatggaaaacgatgtaactaacgagatttatcgatctaataccttgagcttgactaacaaccatatgataatcataaagtggacaatttataccttgagcttgactaacaactataagatgtgcatggctaacgcgctttgaaaatatttccatcttcttcttttgatgtctttgtagcctgacttttcttatttgacctcgtaaaactaactagaacattttaaaaaaaaacagagaaatgtgtataccacataacttatgttatgaaaaaatgactcttcagttactcgctagtcgctaaactatgcgctccacaggttattggtattagtactcccttcatatcaaaatataaaaacatattttgtttcggcaggacaaaattttgatcaacaattgctctattaggatatcttatgtgatacatattataaaagcataatgataactaagtactttcgaatacgaatataataaattcaattttgtgtcacctaaatatattataataaagtattgttggtcaaaaacttgtcctaacaaaataaaatgtgccttctctttcgaaacagaggaaataatgtacaaattaaaattttaatcatatggtgactacattttgaatcatattgaattactagatggaaagaatagtctacagcagttactacctgtcaattattaatttcaaattatagaataaaataaaatactgattttataatccatcctagtaatatagtttctgtgtttttttgtgttttatttaatattttggagttttggaattaatcataagtaattagtgttggggtttcaatttaatatttcaaaattaaagattaataaatatagggttgtcctcatattggactttggaggcttataattagcacttttatgtcttttttttttgctcaaaattcggatataaaaattagtaaatactccagtttgtaattgatatagccttttgttttatctaaactacagtattataagtaggagtaaagattaaagagtccaccatatttctataattgcatgttttattgaacataaactctaaatacgatatacggtcacaatcatataatccatccagggttgacggcacggcagagactaacttgagatgtaaaccattttgtcactgacactacaagaaaacaaaatgcccttggcggtcaatttagttattccgtcggccgaccttcaaatctagagagccggagatattaagaatttcttggtagctaaccacttcctccgtttcacaatataagtcattttagcattttccgtattcatattgatgataatgaatctagacatatatatgaatgcgggaaatgctagaatgacttacattgtgaaacagagaaagtataagaaaaaaattttagatctctatcaactgtcaaaaaaaaaaagaacaaaaaaaaactcacctgctctgtccgccggtggtgtcgtgtccgccgccaccggagcgggtgatggcgccggcggcgatacatcaaacgccggcgcgtcgagacgcagcagtgggcttcccgggaagaacggatgcacgtcgtaccagtagttgcaccgcaccccaagaaccctcccggtcgggctcccgctgaagtagtcgggatcgttcacccacgagattatgccggccaggcagctccggcagccggccggcgacatgtccggcgtgcactgcaccagcgcgtagatgtcgcggacgccccagccgcggaacgcctccacgcccgtggcgaaccgcctgggcgagctcgccgccgcgtggtccgcggtggcgttgaggagcgcgaccacggcggcgtcgaacacctccgccggcgcggtcacgttccgcaccttgctgaagtaggccgcgaagttgtcgccgtcggcggcgaggaagttcctgccggagaagcggaggtagcaggggtcgtagaacacggtggcctccctggcgtacgcgcacagctgctgcccgtcctggaacgcggcggcgacgcacgcgccgcaggcggtggcgttcgtggtgtcgccgcggcagagcgcgaggccgtagaccgtgtccggcgggtcgccgaccccgccggcggcgaagagggccggggaggcggaggcgttcttggcgaggccggcggagaggagcgcgaggttggactggtacgtgctcctcggcgcgaagacgtcgccgctgctgccgcagaaatgccatgccttggcaccaccgggtagcgcgacggcgaggaaggcgaggaggagcgtagtggtgcacgggtgcatcgccatgagttgagatgagagttggtagtgatcgattatccccgcgtaatcttttttgtaaatgatggagatggttttttgatccgggtcagacgacaaagaatatgattatataaacggtagtacatgtgttcacaatatcctttgatccggaatgaaagaaaggacgaggtttaatgaaatagacatgacgtctatatatgaacacgctgactacctacaatattccaacgaattttgacactacaatgaaagcgtgctaaattttcgtcatgaaggggttgttcaaattgaagtcatttcaaactatacaatttttttaagttgtcaaatatgtgtatccatttagtttcttactaaactctggtaaatatataatggtaaatatataagaaattctaccaaaacttagcaatattgtcaaattgtcaaaatttggtaagatttattttagctacaatctgaacagacttgaattcttaacccaaactaatttagcaacatatagaattaaataagtaattaaagtcccttaaaaaaactaaacagcgaaatcccgtagaatatcttgaattaaataagcaattaaaagttaaaaaaaaaaccaagaatcctgtagagacaggaatagaataagtggaaagccatctagctttccgctctatagtttgtgtttttgcagcgtgtggtgtcggggcatgtgttttggtgtatatccttcctcgatgaaaaaccttattgtaaccctttttccctctatcttaataatatttgaatgacttctttcggtcatcctagcaaaaaaaaaaaagaaagaaaagaaaagaaaaaaaccatctagccttacctattccccttctgtctctctagggtttagaaagagtgtcacaccccaatctgataccgccgtacaacggcacctgacaggagcgtgtcgtagggaaaacggcgcgaaccgcttcctacgaaaccgcgatctcggtaccagtcccaggacatagtgctggtacccacggtgacaaatatgaatcatagcaatccttaaaataaatagaggacttatttaccttaacttaggttgcagctcagacagcccgagaatacaaccgacgacgcggacgaggaagcaccaacagcagcagcagcagcggaaccaacggtctaacacccaacaccacaggcgacggctgggaaccaggacgaaaccctaatcttcacttcaccttatcttctcttcagggcgggggaactatatatatatttatagagcaagggtgagtactttcgtactcagcaagtcacgggaatttaggtgtttaatgcaagcttggaagagaggcaaggttgttttgcaaatcttttgtttgaaatcattttgaaatcactaagtgatttatttctttctatgtttgggcgaaaagagacttgcgtctcgattcgactttaagagatgcttttcaacaactcaattggtaatgtaccgacctcccgggtcggatcattacttctcggctcccagagccatttcacttggttaatcggctcccagagcctttttcattttctcggactcccagagtccagctgcccagcagcacaacaatccgcttccactcgggaagcctagtctatgatgcccacagacatcctgaatcacacagattcgtttctgaccactcaggtcatccatctgccacataggctgattctggttacgattcccacaccacaacaacttttcacaaagcacaggcaaacaaatctacgcaacgggaaccacctcacatccgcccatgaccgtgggcacggctgttcgaacagtttgttaacctctgcagaggggtacactttacccacaagacacgaacttactctagacactggccggtgtcagaggttcgcgacaaagcctttcccaagccgacccagggatacctcatgccacatagaaggatcaaatcctcacataaatataggccattttaggcatacacaaatcaaactccaaccacctcgatcggtaatctggcaagcttcgcgttcttgccttaccaggaacccggtttggctccaaccgaccccgccccggcgttcccaactattggcatgcgaggtttccctgaaccgactagctacttagccagggtgtcccattccaccttgtggttgcactttgattatgttcgatgagtttcccacaggaatcggtccttatatgcgaatacgggacagtgccacataggcacaacccccgcatcgcgagttttcacaattcattttattttcaaacacaccgacaccacatgtcgggtttcgaaggcttcacaaacccatttcccaagtttttgacaagcaacggtgtatgtgggatatttggtatacgcgctcagagagcacgaataccgaggtaccacaagggtggagcgacaaggaatcagggtagtacgacctacggaaattagtgcgactactgggtaggtccgtcggtttggcacgcaaaccgaggccaagcaagttaagtgtgtgattctaataatgcaagttaccaacaaaataataatgattttccaattataggagcaattggtcaaagggtgacttgccttgctcaaggtcttcacgaagcttcacgaatcttcgagaaaacccgcgatcgacgaaaatccgataaccgcagctatacgcaaacaattgaaaacctacacaagacccaaaagaaagatcctatttagcctaattaatagtgccattaaatagatctcaattttacggaattactggaagtggaacggagtcaatcggaagagcggttgggaagatatgaattttggaagtttgatttggattttctggtcaaggaaatgatttatcggaattttctagaatacgagaaatggtttatgggatttgtagaaataatattcccaagaatattattgacagtcactgtcatgtgggaccaaaggaaatggtttatggaattttggaacaaggaattgatttatgggacaaaggaaaaaggatttattaaatcactgaaaaagaaaaggatggagggatgtatattagactttttcgggcggcaaggacgcggcccaagggtcgaaggaggctcggccaagccatttgggccggcgcggtcgcgggaaaggcggcccattagggcgcgcggaagggggagggagcggtccggtggaccgggtgcacctcgcggggtcccgggtggggcccacatgtcggcggcaaggttcacggtggggagagcgcacgcgggtgtgttgctagggtttggtgggtgcggtgtgcgggcggtgcgccgggtggatcggatggcagcgggcccacatgcagccggttggcgcaccgtggaccgcgcgcacgggagggggggaaggaaggaggcggctgaccggctcggctcggtcaaagccgaggtggcgccgacgtggcgcctacgtggcagccacgcgggccggcgggaggaggaagaaggggcggccgagatggacggcggacggcggccgagttcaccggagctcatcgcgacgattcgagagagagggagtacaccggaacgatgggacggacgagaggaagtgagccaccggatcggattcgccggaaagaggccagaggcggcggattgcggcgacgcacgctggcggcgagaaaaaggggaaacggcggaggggcgacaaggattaaattcaaggtggtgggagtatctccggggttcaaggagttcatctccggcgtcggatggggcagagcgacgccgtggagatctggcgacgagcggcggcctccgggagcgagcggcgatggtgacaagcctatggcgggtgacggcattgctagggaacggtttggggagaccctagggagctcaaggacggtgtcggtgagggtggtcgatgagctggggcccgacgacggcgcgcgactgcgcgcggcggctgaaacagagcaacggcgaggcgcgcggcgcattgtgcggcaggaggaggaatacggtgggggagctcaccggcgagggaggagcggcgttggcgacgcagagggagtcgtgacgaggcggtcgcgacggcggggaggcgcggcaccgagagggcgcggccgggcaaggagggaggcaacgaggccgaaaggatgatgtgtgcatgcacacgctcttggccacggcagtgcggcaccgagcttgacgaggccgacgccgaggctcacgcggccattggcacagcgcggcagcgaggaggcagtcgcggggcgagcagctagcggctggcaacaatggcgcgggtggttcgagcgaggcgaagacgaaacgagaggggagggcgcgggctttataggcgaggaggagaggtcggtttggaggagggaaaccgacattggtggtcaagcttcttcggctggcgcggcgcttgcggtcaaggagcggcaggtggtgacagcggctgtggtcggggaaaaaggcaaaaaggggagggaaaagagcttggctcccttgccactttgggaggaaggagaaagagagaacgagggagaggagcacgagctctgtctcttggttttggaaggatgcggcatgggggcatcggggccgagcgatgacagcggcgatgacggctaaaggcgagcggggccgggcggctgcgcggcgcaggcgcggcagggccgacgcggcggcgaccgggcggtcggccacgcgcgagcgcgcgcgcggacgtgagggcgtggtcggattcaaacggcggcggcgggaaatcgacgccggggagagggagagagagagaaacagagagaacgagagggagagagatagagagaaaaccgagagagaaggagagagagctctctctcccgagcggctcatgtgcggcgcacgtgggaagggggaaggcggctgagggagggaggtgggctgagggagaggaaatcggtccatccaaaatacagggaggtaaagtagacttttacagagaaaactgatttggatagaattggagagattttagggtttggactcgaattcaaatttgatattcgaactcgagggtttggggatatatcaagggggattcaaggagaagtcatggaaaggattcaaaaggaatacttgggtatttgttctcgggaacatagggtggagtcaaggaaaggattcgaggcgggatttgaataattctggattcgtagaagtatttggcgaggattcaaaggaaggatttgaatttcagaatttgatttcagagactcgaatcggaaaaggaatttggaggtggaggattttggtttcgatgagagggaacaacgggattaaattgagatccttggcacaacttagactcgcacacaaagaacgaaaattttcgcaattaggattttgccgaattagtttttaacgactcacgaaaagcggagcgttacaaagagctacaatgaatttgtgctttatatatgtgtctaaattcatacttagatgagatatgaagataccaaaacgtcttataatatatgacggaggaagtatgtaaataacccttcaggaatgagtatgcgtatgtgaagtaacatacagagggttacaacttacaattatctgcttatactatcattttgctagtatacatattatattaccgtgccctactatatgtggatcatagctaatatttctttgaagtctgatggtgtaataatacatatgatcggctgtgttcggatagcagggatgggaacccaatctcccctcacggaaaacggagcggtccattagcacgtgattaattaagaatcagctaatttctttttaaaaaatggattaatttgaatttttttaagcaactttcgtatagaaactttttacaaaaaatacaccgtttagcagtttgaaaagcgtgcgcgcggaaaacgagggagaggggttgggaacttggagttccaaacacagccgaagtaggtctttccctacatcagcattttttttttttttttgcaaaacaaaaagggtacaatatgaattcagcatcacattggatttatcttggctcaagctcagtgatcgaaacctcatttggtgacataggcgatctatctgtggactatagttggccatgtgggccgcccggcacggcacggcccaggcccggccgtgcctgggccgagacttgtcgggccggcacggcccgaccgacgcaccgggccgtgccgtgccagcccacgtgccgcactcacggcccaggcacggcccaacacgcctcgggccgtgccgggccggcccgaaggcacgatgggccatcgtgcttttcctcagaataagtctaaatttcctccctcctattgggctgtgacatatgtacagctacaaaaagtctattttacctccctcttctttgggctggggtatataaatagctaaaataagtctatttaaggtccctattctttagacagttacatttatatgtctatttttagtccctgtactttatgtaccgggcctggcctaccggcccatcgtgccgggccggcccgaccgtgccgggccagcccagcgtgccggtggggaggcccaggcacggcccgacagtcgggccgggccagcacgggcccgacccaagtcgggccgtgccgtgcttgggccgggccaaaaaggcgtgccgtgggccgggccttcgggcctcgggccttatggccaactatactgtggactgattagctccacggaatggctccgagtacgaatctgagttgacactactcttttggatgcaaaatgccggcctagatggagcttgtaaagacacggtgctgctgctaagcatcacattcaccatcgacatcattggcctctccgtggggtcttcttgaacacacaggagtccgatgtggacgcacttcaagatctggtctccaggacaatgccccgccatggatgaatccgcaagctccacaactgttcctgccaaccagtgctcccacacctgcatattttgataggtaatgtaaatgctctgatattaatacaaaacattacttgggtgtagagtttgtaatatatagctgatctctcctgaggtactcactaaagttaagagatcaaccgattgctcggagtcgtaggagacattgtttttccttcccgtgacgatttctaaaatcagaacgccaaagctgaaaacatctgatttgatggagtaatgcccgcgcatagcgtactcaggggccatgtatccactgcagtgagaaattctgttatgtcaaggactaatgtgtactaccgaatatattagtagccaataatatcatcagaacttactatgttccgacaacacggttcgtgacgtcttgtgattgatcattcccaaatagccttgctaagccaaaatctgaaatcttaggattaaaatcggaatctaacagaacattacttgcttttaggtcccggtgaattatcttcagctgagaatcttcgtgaagatattgtaagcctcgagcgatcgcattgactatctttaatcttttccaccaatccagcacattgcttctatcaggatctgtcacatagaagaaaaaacttcaaaattatacataaaaaagtttcagttattgattcactgttgaaaaggctgaagagtacccaccaaacagaattgtgtcgaggcttttgttaggcatgtattcatacacaagtaatttttcatgttcttccaagcaaacaccaaggagtctaaccaaattcttgtgttgaagcttagcaaccaaaacaagctcatttttcaactcctctatcccttgtcgagaactttgcgatagccttttcactgctatttcttgatcactagggaggactccctgtacagatagagaatttttactggctgaaactgtaaagtattgaatataaaaactaaaatggaatggtataattagcaccttataaaccgcaccaaaacctccttcgccaagtttattgctgtcatcaaagttgtttgttgccactcgtaaagttgatatactaagaataagtgaatcaatactttctatgtccgctgggtctgttggatctattgtttcagaaaaaaaatacaacaataatggtgtaatgcattaatggaattcttgcttttgtatgagaatgaagtcactgcatagacaaaaacttaattttgccatttcaagtgtattgagaacacgtactggaaattaatggaatttgaatgaactacaggaacttacctgctattgatggctttcttgctcgttccgtcttcctcttccagatataaaagcaaattactacagcagccagtattgcagcgactataggcaatgcaatggctaaaaccctaccagtggtgttccctgttcatcccgtaaacggaatgcatcaattaatgtaagacataagacagaaacacaagtataaataattttgacatcattaaccagtatacactaaccatctttttttttttgaaaacttacactaaccattcttaaaggagcaattttacgatcctttaggaggtatcaattttttattgtaaatttggtacctcacagtacgtaccaaattttacactaaattttttgtacttcatggtacctcctcaaggatcatagaattgatcttcttaaaaaagaaactgcatggactacaaaagaaaatgacaaatacatatttacttacacattatttttatcaaaattacagtgcacttacatatcatatcaactgaatttacaaatgtaattttagttacatagatctataattttatattttaaagaaaataacaaatgcatatttacttacacaatattgttataaaaatacagtgcacttacatgtcatattaactgaatttacaaatgtaattttagttatataggactgtaattttatatgtttttaaaaaaataacaaatacatattcacttacacagtatttttaatcagaattacaatgcacttacatgccatatcaattaaatttacaaatgtaattttagttatgtaggagtgtaattttatattttaaagaaaataaaaaatgcatatttacttacacgatatttttatcaaaattacagtgcacttacgtgttatatcaactaaatttacaattgtaattttagttatataggactgtaattttatttttatttttttatttttagttgtcttattttttcaatggttaaagaaatcaatttttacatagaaaatcgaaagaaagggagagagagaatgagaaaagaaagcgcatgaaagagagagcgagaaggaaggcgggagagagagagagagtgagaaatacgccgtaacagctagaaaatggccagaaaattcggaccagaccggcccacgtggctccccacgtggcctcatagcgctaaatccaccaccaatctagacgcacaatccgacggccagaaaaacgtcaaatttcagacgagaaatcacgcgacaaacgtttagcaaaattgatcattagcaaaattgatcatggaaacatctggtatatgactagtctaaaaggaaactcatagattcatgcgattaaagatgtgaacatcagaccagtccacaaaatgacaaagaaaatattttcttccaaattaagttgttcgtactaaaaaacaaatcatgaaagactaatctaacttcaaaaagaaagacgagttcgtaacctctacacagggccggccctagccctatgcagccgaagcgaccgccgggggcccatgatggtggggggccatgttagggggggggggcatctaattctagtagtaggggggggcatctaattctagtagtcgagtacctcatccgatgttgagatcaatgatttttattcagaattaaaggtgttgcaagtgagtttaccagattcttcgatgtctccgcgcctgagattttaaagtttgttatggatgcagattgctatacaaatgtttcagctgcctatcgaattcttttaactgtacctgtgactgtagtttcagctgaaagaagtttctcaaaaattgaagttgttgaagaactatttgagatcaactatgtcacaagaaaggttaaatggcttggctatgcgctcaatcgagaaggatatcttgaacactattgatcttaataccgttcttgatgattttgcatcaagaaatgcccaaagaagtatcttttcatgggaagcaatggatatgatggggttctattcttcattaagttaatgaataatgatattagttccaagttacaaatatattgttattttgatcgattttatttcttgataattaccatacatgttaaatttaatatatggatgtttttgtttttgttttgcaagtaaaattagcatatatatatatatatatcataaaattttatatataccttagagggtccatcgtgatgagtttgcctagggccctcaaaatcataggactggccctgcctctacaacaacttctatggctaggaatcagtcacgatggacaactcgaggtttacaaatgccattttcaccaaaaacaggtccctagaggttttttcaatagccacgacaatggaacggttatcgacaaaaacaggtagaatttggacaaattttgccaaaaaaataaattttttttctgtatttggacgattcagtttcttcatgtggaccgactcaaagccaataacagtgttgtggaactgtggaccaatcgataattagattgctgatagcatacttaggtaccgaatcaaatatcgtttcaaattcctacggtgaaatcaaacaccacttctattcaaacccatcgaactaaaattgctgcacacatgcatggactgatcctctgtccgtgaccaacacaaaattcaggccatttaggatatcaggatactgttttccccccttttgagtttagcatatcgcattgttgaaatgagatctacttcgtatatcagtttcacccaactcacctcgtcgtctggtaccggtggtggtggccggcggcgtgacgtttacggccgccggagatggcgccggcggcgctcccagtgatgccgccgggagctgcagcagcgagaccccgtcgaagaaaggatatatctcgtacctgtagttgcaccgcagtccgagaaccctgccgccctgcttcccgctgaaatacttgggcatcatcccgacgattccccccaggcagctccggcaggtggccgtcgccatgtccggcgtgcactgcgccagcccgtaaatcttgctgccgttgaacccttcctcccccgtgccgaaccgcctggacgagttcgccgccgcgtagtcggcggtggcgttgatgaggacgcccacggcggcgtcgaacaccttggccggcgcggacacgttctgcgtgttcatgaggatgaggaacttgttgtcgccgttggtggaggcgaggaagttctggttggagaagcggagcgcgcaggcgtcgtagaagacggtggcgtccttgttgtaggggcagagctgctgcgcgtcctggaacgcggcggcgacgcagccggcgcaggcggtggcgttggcggtgtcgccgcggcagagcgcgagcgcgtagacgatgtccgggacggcgccgagggtggcggtggcgaagagcgtgcgggacgaggaggcgttcttggggagggtggcggagatgctccggatgttgccctggtaggtgctgttcgccgtgtagttgccgctgtcgccgcagaagttgccgaggggctggcccgcgacgggcggcggtaggagggaggttaggagcgccgccgccgccgcgacggcggcgacgcaggcggggagatggccacgtggcgtggccatggcgcgagggtggaggtggtcggcgagcaaagagggataaatggagaagagatgatagatgagcggtgggcccttggttgactcgagtggagcttgcttgactcgtctatgttgcgctgtcgtcgatcctgacatcatgggacccaggcataaatgctggtgggcccacgtcaagctgccgtgacgaccattgcatggccggcgtgagggcaaacaatggggattttttatattttagatttttatttacaaaaacttattttataaatagataggctagacagcaataagtagtgtcgagagcctattcgtgaaaggaatatttttaattaaaaaaggatttacttgtaatataaaaatatttacatatagctctcagtgccatgttattggcattgaagtcctatttgtaaataaaataggtccttaatactaatatcattagcacctatacaacactatcatgtttagacgggataatatcttaaaagatattatacgtcgatacctaggaatcgcatgatacatataagtatttcgaatgggatacatcattataccattatcctcagcaataatatccagtgcgcttccatcacggcaaacaatgtgccgaaacatgaattcggcaataataaaagggggtagcgcacgagccctaaaagtggatggatgcggagacaaatgatttagacaggttcaggccctctcaatgagaggtaataccctactcctgtttggggatttgaatccgccgggtgtgtattgatctgacgatctagttgtgtctcatgccccctagagggcctcctgcccaccttatataggatggggggcaggattacaagatagaaaccttaaccaacacggtatcggtttcctaaatctactttacaatcttatcaagccaggactttaggccgttccataatatacagggaaacgtaatacccaagtcatgatctgttacatatttcatagatataagttatcccatataactagtcggataaccatgccgtgtgggtatggggtacccataatctccacagtagcccctgagaccttcacagtcgaaaagataatcttctctcgaactagattactccaaagccgagtgcttcaatcatctttgccatgacttcccgagtacttttaccaaatctgaagactgtggagggctgaaaaataaagtcaggtgcatcgactagatgcacctaataggtgtagcccccgactatgtggttaattgaacaaaccaaacatatagtcaaggaataaataatctaaccaaccgagtggtttcgataatagcatatgatgtgtgaatccctgaataatatgatccaagtgatataccgactgctttgtaaaatatgatgcgtgtaacttaaagtcgactacattattgaaaattcacatagcaaaacagctataaagaagcttgtatgttgtgaataaagaaatttccaaagtattgggcatacgccatgcgcacactgctttaacagatgtgcttaagtccctaaagacacatggtttcaccacacctgaaaatatatggcatatgtggtgtaaaatccgagtaaataaactcataaaggatttaccaaccgcctagaaaatgaccaaaatatataatcagcccaagccataatattggtcaataaaagtgtacacttacgtggcaaaaaacaatgatattgtatccaatcaattgctttatgaacccaaacagcaccttgacttatataaaaaagtcagcgggcagctatataaagcattactgtttggcaccttttaaaatgcattgtaccaactcctaaaaagttgagtaactgcggtataaaaggattttaaggtattgggcacataatcacgcgcacttttgcctaagcaaaaagatgcctaagtccctaaaagaacgtgacaggccacacctgaaaatatgggctgcagacatattaggcctaggccaaaacatatgccctcgacaccctttaaaggatgacgcatgtaacatgctcccgagtaataaatcttccgggtaatatagaccaagcgtagctcatatgaatagcttctgatctgagtgattatcccttatgggatactccaaaatagatataaaaattgaatcccgactggcgcaagtattcggttgataacccttacggagaataataaatagtccagtctttgagcatagaaaatagacccatgatcatgaattcatgttgcatgtaaccggaacaagtccaaattgaaggtatgatacttgtgtttgaactagtaagcctctgagcatatagcttgtccttctttgtagtcacaattgtccatcgatggtagctgacgcagttggcatagagacaagacgaccaatatagagataatattgcccaccagaggtggcaaaaatattggtggtagtgaagatagtgataccaatcaaaagtactgaagtcgcatagccatggaggcgaagaaaccagtcggcggcaaacagatcaactaacaatgaagatgaaggcgcccagcgataaagttgtgtagccatggcagcgaaataatcagtcggtgacagacgaggcagatcaaatgcgatgacgaaatccaccaatcatgaagatgaagaaaatagttgacgatgacaaacgcaaccgacatgatgaagatgacgatgtcgatgatccagtcaatagcagtgtagcaaccaatgataatgacaaagacgctcatcagcgtttgcatagtaggtcaaccgtgaaggtgaaataataagtcggcgaaaacataatcatccattagcaacagcggagatgtcagggtcgatgaagcagaggtgctggtgatgatgtcagtgacaataatctatcaaattaatgttatagctgttgtagatgctttacttggaggagagttgatgttgttgcccaactcgtctaaaccgaaatatttgaagttgttgaagtagaatgtctgctccgaagcaaagatgaagataatgactcctggagttgactcgttggctgattaattgatttcttcagcttgacataaaatttgtcaaattttgagccttgtatttgtatagcccccgactctttgattagttgggaaacaactgaacatagagtcgagaactgtagcttcttgtcgtcgaatagttattgcttgattgaagatatgtgttgaagatgtccaagtagaaatcctgaatattggagagccacttgttgtagtaaaataacacggcatcgcatgccgagatgtcgagattcacaaagacgtcgtggttggtgaagtagcgaaacttgcgaagtagcagcaatagagtttgccggtgccgaagataataaagatgaagtcgctctaccatgatgacaaagttgcattgccgtgatgaagtgaacacgagtcggcgtcaacagaagcaaaccggtagtgaagacgcgcagttgtgaagataaaagcaccagtcggcggcggcataaccagtcggcgacggaagacgatgatgtccatcagtagtggtagtggtataaaccagacgtagagacgagggcactagtcaacagcagacgagatgaccggcggtgaagaagataaggccaatcaacactggcagaatcatgcagccatggaagtgaataaactagtcggcagcagacgtagacagcttgcgtttgaatatgatgacgcctattagtggtgacggcgacgtagccggccgtgaagaagatagcatcagttggtgtcataacaggccagccgtgcaggcggaaacaccagtcggcggcggacgagggcaagccggtcggtgaagacatagacgcccaacaacggcggcataataggccaaccgtgcaggcggaaacaccagtcggcggcggacgaggcggccggtcagtgaagacgtagacgcccaacaacggtggcataataggccagccgtgcaggcggagacaccagtcgacgacggcgaaggcaagccggtcggtgaagacgtagacgcctaacaacggcggcataataggccagccgtgcaggcggaaacaccagtcggcggcggacgaggcggccgatcggtgaagacgtagacgcccaacaacggtggcataataggccagccgtgcaggcggagacaccagtcgacggcggcgacggcaagccggtggtgatgttctgactgatccattcctgcagtgtaagagataagcttaaagccatgaatcccttttatgcatatctggatttggatcctgcagaacaaacatataggatgagtagtatctgatgtaaatataatactcgagaaaaatgcaagtattttaaaatatttataaatatgtatttctcctcttgtcaattttgatttccccgagcagatgactccttacgtttaaacactctgcccgactaatcatagtccccaagcatcgggagtcggcctaggcacttcccaaacatgcatatgagtgacatgagttcgtcattaatggaacaaagtttcacggatcagaatttactactcgggtacttttgcaattattaagagcaaaaaaaaaattatctcatctctatgcttttgatttattccgaataatacttagcaccttgcgttactcggtccatccaacaagctcccgggtgctaggaatcggcccaaagtcaatcatccattggcaaaccaaacggaaagcataggaagatagaactccataacccgataggtacttttgtactcagattatgtcgcaagcaatcaagataaatgttatgaaaaatatgatataacatctgtagcccccgactcactactcaatggaaggccaattggtgtagtgaggcagaggaaaaggaaaaatatcatataaagaataaaataaatgatgacttagctttatcgtattcccttggtgacagcagaagtagccgatgtgggaacgaagcagtccatctcaatagcgatgaaaacacctgtcggcggcggcaaaagcaagccggtggtatagatgacgaggcccatcaacgacggcggagtccgccaaccgtataggcgaaaacaccaatcaaaggtggcgaaggtgcctggtcggtgaagacgatgaggcccatcaacggtggcggagtccaccagccgtgatggttaaaaaaccagtcggcacggccgtgggcgaagaagatgacgcctagcaatattaatgcagttgaccaacctattatgtatcccgcgtcttggaaaaaggacttggagcctatgtttgccgagtgctgatatagcttgctgtgtgcccataaccatatgtctttattaaattggaagaattgatgctgagtccgagtggattaaaacatccattaatcagcgagtctgaatttgaatctactcatgcacgcctgatacgagatgcgatgcactcatgctgctcggtcagctcctattccgatctgacatgatagtaattaacaggcaggcatatacatcttgacaaggaaacgagggccctctggcgctgcgagttcagccaatggaggactcggaagtcgtagccgataacaaaacatgcaggaaatctttagattgatttgatcagaagattgtgttgacggcgacggatcaatgtatctcctggcatatggcttgcatggtgtcagctttgcatgtaatgacctagtcatccttttgattgtatatctccacggctgatctagagaaaagaaaaaactccatggctgtccagtcttgtatcttgcttgattgctttaattggcgagtgatctcttagccgactaattggagcatgtcggattttcggcagcagtgatgaagtccaagaagatcctggggaagacggaagtgaaggtggtggcagccatagtagattgaaactgtcttgactggtttgaatccgagtcaaagagtaagagcttgtcgaaattgtcgacgacgaggaagcgaaaactcccaaaacgaagacgaagccggcgaccgataaagttgattccatcgcacttgtcgatagaaactcgacgcacccctacctggcgcgccaactgtcgaaacatgaattcggcaataataaaaggggtagcgcacgagccctaaaagtggatggatgcggagacaaaggatttagacaggttcaggccctctcaatgagaggtaataccctactcctgtttggggatttgaatccgccgggtgtgtattgatttgacgatctagttgtatctcatgccccctaaagggcctcctgcccaccttatataggatgggggcaggattacaagatagaaaccttaaccaacacggtatcggtttcctaaatctactttacaatcttatcaagccaggactttaggccgttccataatatacagggaaacgtaatacccaagtcatgatctgttacatatttcatagatataagttatcccatataactagtcggataaccatgccgtgtgggtatggggtacccataatctccacacaataatagtcaagtgatgtgacaggctccaattggaacgttgtccattgccggactcggtaaatgcagcgatcgatcgtatgatgaacgctattggattttttacgatttcattcttttgaaaaacttatttcgtaaatagatctaagaaacaacttatccccggaaatagtcttttttgggcgccagagtcattggcactgtcgtccaacgggagggcgccagcctcctgccaccgtagcgggtcggcgctagggtagcagggggagagcgccaatgtagctggcgtcctccccccaatttttttttatttttcttttgatatagcacatgagaaccaatcatagaaaaattaaactcaaatagatgaaatatgtgacatgtagaattttccaaagctctaccgaaaagcttctcgtctcgaaaacataatattgcaagtggaatttggaggttctaattttgcctaacccgacgaatcggggagaatcggatgtaactttttctatagatgtcagtggatgtattatttgcctgattccgagtccgtatgagaaaattatgcatgttttaaaaaatgatacccaaatgtaacaaataaaacacaaaccctaactttttttcatgtaagaaaaagctaagattgttcgaaatctaatctatttttttgactttatgaaaaactaaaacaacgaagagcaggaaggggcttttcgatatagctttgaaaaattctacaagtcgcatatttcgtccatttaagtttaatgtttctacggttgattcttgtgcgctcctaagtgtgaaaaaaatatattataataataataataataataataataataataataataataataaaggatgcatatatttctcctctacactagagaggaaaaaatgcctggggggcagccacataggcgcgttctccctaccacctcagcgccgacccgttggcagtggcggagctagagagaattgaagggggggtgcaccactcaatcatgtgttcatacccatcgaaccatatagaattttcaagtgatatattatactaaataattgcgcctcccatcaaatattaaaaaatgaaatcaatatgtgatgccaattgtatcaaaagaggagtgcaatgataaaaatactgtactgaccaatatgagtgaatgcattataccagcaaaactaaaatacattgccccaacctccatgttagctctcaactaaaaaagcttatgaactaatcatgtcaaatagatacatcatacattaccttctactatttatgactcaatatttaatttttttaatgtttgttaaacagtaaggcaagcctagatatattatatatattccttcactgttggcttgttctatcgtccacttcttttataaaaaaaaatcccaaaaaaatcacctatacaacattgataaatagtccttaattttactattttaggtagtatgatctaatccatcagaagccttgctatgaacacattagtgcattgaaaatttgaaaccttcctagtagcacctgttcggcctggtgatctgcagtgcacgcgctgggctttacgcctctgtggcttaactttcagtctgggggtacacatacgtgaggcaaggggggtgcccacatggtcattagggggtattaatcactaattttactttcctagccgggttcctaggaaccccctcgggacaacatagcttcgtccctgcccgttggacgacagcgctagcgactctggcgcctaaaaaaattatttttagaataaattattttagagtctatttataaaataaatttttcaaaatgacccaattgtgaaaaatccagatgaacactacgatcgctagtctggatcattcgatttgcgtctgtcgatgtcacgatagtgtgtatgcgatgagacttctcacttctcaggtcaggacgtcaggtacaagccccacgataatgcatggccccaaataaagatacaatatatatatatatatatatatatatttaatttaactttaggggccacagtatcgaccattatcttttcctcccaagtgttgggaaggtctcaaaataggcagaaaccctcacgggtgtattagttagggtgttcagatatagaggtgtaaagtacttgcgtgtcatatcgggtattatataaagtgtcgtatggggtatttgggcactaataaaaaaactaattacagaatccgtcagtaaatcgcgagatgaatttattaaacctaattaatccattattagcaaatatttcctgtagcaccacattatcaaatcatggagcaattaggcttaaaagattcgtctcgcaaattagtcgcaatctgtgcaattatttatttttttacctatatttaatacttcatgtaggtattcaaatgttcgatgtgacagcgtgaaaaattttagagtgggatctaaacagggttttattctttgtggaatcaaatacttcatccattttatttcatattataagtcgtttagattttcttcctaagttttattaaatttggctaagtttagtgaaaaatttagcaatatctaaaataccagattagtttcattgaattaaacatttgatatattatgatgatatatttgtcttatgttgaaaatgctaatatattttttataaatttggtcaaactgtattaaatttgatttagaaaaaagataaaatgacatataatgtgaaatggagggcagtattatataggaataaagcttcaaaagtaaaccatagtactaggtagcaagacaggcagacacaatttcgggtactgctatttagttccacgtttgttcgtagtgcgcactttttcctgaaaacttttatctcagtatatgcacatttatcagttcgcactctccaatattacatcagtatcatcctttccatttgatcaatcagaagagcaagagaaaatatccctattaatttctgaatgaacagtcttagacacgaaaactgcatctacatcttgtgtagaaatgtgcccttttcttttgggcaactggattttgcttgttctgtggtctacgatcaaccgcggctacagacagaagttgacaaccctgtaccaaatggaatttgaataccagtgaagagtccgaccaagatctccaagaactctggtttgtctacattatatttgcatttaaccaagttggagtattctatgatatttgtaacaacttttcgaattaacaaaaccagatgaaatatacctgaactgaacctccacctatggcagccgattggcctgggttcttctccttctaccgtctccccattcctggaggaaaatgaacagaacacaggctattccgatcacttcgaacaccaccatcacagggaaatcatagatcgaaacaattttccaccaaggtgaagtatctgaaaaaaataaaagaagaagaaaaatgctgattcggatgatgcagagtctacctgaaattctgaatcaataaaggaaggcgaacaaaatcacagtataatcaaaagacaaaaatttatcgagctattccctccgtccaaaatataagtatttttttctctaacacggtctccaagatgatactttgacttgcaatatctacccctaattaactgcgcattgtaaggtttggtctcgttttctcctaaaaaccagacaccttctttttatataaaacgtcgtcaacagcctgactgttcgaaaaaaaagaccagcaatatctataaaaataatatgttttaaataaaaagagttacatattatgatagttgtccaatgacaaatctagtaacattaattttacataattgatcttttttatttttttactattaataattaaagctaaaaatatttgactttttactatgctaaaaatttatattttaggatggagggagtaacaaatagatcactcacggcgaacggctgacacggcgcgcatctcccgctccatgcgttcgacgtcgtggtagccgacgcggcaggcgccgaggtcgaccatggcgcgcctgctgtacccgcacagccaccgcgcgtaccggaacgccatggcgacgcaggcgccgcagtcggagtacgccggctccgacgagtcgcagcagaaggccgacgcggagatctggtccggccgcacgccagcgaggatgccgacgcagctggagcgatttgaggtggaggatccgttcgccaccatggctggcagcgcggcggcgacatgccgcaggttggcttcgtgccttcgtacgagctgttgcgagcgaaccgcccctgcacagccccgccgcactggtggatcggcggacggtggccgccgtcgtcgtcgtcgagggcgtcggtggccgcggcggcggcagcaagcggagtagttcagtggtagcagtggtagtggtacaggctgctccagttcagtggttatggtttactatgattaatccacggtagattacttgggttagttgttaactttgaccgttgagtactaacctccataaagagcagtaacaatgaatatatctatactccctcaagcaaaaatataaggaaaaatcaccactaacgcaaagataacaaaaataatcatctcttcggctgtatcgtctcgatgcatgcaaataatatgattgagcggtttgaattttgatggtaaagaatttaaaatgagtaaattttagaaaattgtaactttagtggaaaaactatcaatttgttacaacattagcgacatatttcagtttgctgcaacaatagcgtgcaaaattatcacaagactataacttttacgttatatgctgcaacagtgcggcatatatgtattgtagcagcatataacgtaaaagttgtagttttgtgataatttctcacgctattgttgcaacaaattgaaacatgtcgctaatgtggcagcaaactgatagttttgtcactaaagttcactacgccagatcctcacacctctgacgggatacctgtgacgggcaaacgaattggtcagtagtgaccattacctttgacgggttatacgggatgcagtcaccggtgaggcatctggccgcggcccgtcacaagtatcccctcacctgtgacgggccgaaaggaaaacccgtcagaggtataccagtgacgagtttttaatccaacccgtcactggtatcccctcacctgtgacgggccaatacattagaagccgtcagaggtgatgggccgccacctgtgacggctttaatttctggcccgtcacaggtgagatgataccagtgacgggccgttgaatacaagcccgtcaaaggtatgagcaatacctttgacgggctttttttatctaacccgtttgaggtgtgttggctctataaatacccccaaactgccaactgctttccatcccgaccattgtactgctcacacatcggttgggagggcaaggggggcgatttttttgctaaaattcaaggtaaaaaacacattattctccattcattctcaacatatcgatcatcatttatttttcttcgtatgttgttgatttcagatggatcgtagatggatgtactatgcgcatcgttcgtctaccgagtatagagagggggtcactgaatttgtcacatttgcggataatgacagaaaaagtaggatgagcatgcacatgttgtgcccatgtagggactgtaagaatgaacagatgatcgaagacaaggatgaagtgcatgctcatttgataatgaatggattcatgaagaaatatacctgctggaccaagcatggagagcaagaggcgcctgatgtcgcagctgaagaagtgttggatcaggatgtagagaacaccgccgcagctcgagaaggcatgttcgtaccttctcctttaggtggagagaccatagatttagacactcaatgtctatctacaatgttgcatgacattgaagacgcagaggacaacgacagagattatgagaagtttagtaagttggtggaagattgccagatgccgttgtatgatggatgcaagtcgaagcacagcaagttgtcatgcgtgttggaactcatgaagcttaaggctagtaatggctggtcggacaagagttttacagaactccttgagctgttaaaggatctgttgccagaggggaacaatttacctcagacgacatatgaagcgaagcaagtattatgtccgttgggcctggaggtcagaagaattcatgcatgtccgaacgactgcattttgtattacaaggaatacgctgacttggatgtctgccctatctgtggggcatcaagatacaaacgagcaaagagtgaaggtgaaggaagtaagtcaaagaggggaggcccagcaaaggtggtgtggtatctcccaattgcggagcgcatgaagagaatgtttgcgaacaaggaacaagctaagcttgtgcgctggcatgccgaagaacggaaagtcgatactatgctgaggcacccagcagattcagtacagtggaggacaatcgataggatttaccaggaattctcaaatgacccaagaaacatgcgtttcgcaatgtgtacggacggcattaatccttttggtgatttgagcagtcgtcacagtacatggccagttctgcttgttaactataaccttcctccctggttgtgtttcaaaagaaagtacattatgcttgccatgctcattcaaggaccgagacaacctggcaacgatatcgatgtgttccttgaaccgataatcgatgacttcgaaaggctatggaatgagggcacacgaacatgggacgcatatgcacaagagtatttcaacctccatgcgatgctgttttgtaccatcaacgattatccggcccttggcaacctttctggccaaactgtgaaagggaaatgggcgtgttcggagtgtatggaggaaacaagaagcaaatggttgaagcattcacacaagacggtctacatgggtcacaggagatttctcccaaggtatcacccgtataggaatatgagaaagaatttcaatggacacagagatacagccggacccccgacagagctaacagggacagaggtgcacaacttagtgatgggaataaccaacgagtttggaaaaaagaggaaagttggaaagcgaaaagagaagagcacatcgaaggaaaaaacagaggagcatgtggaaaaacaaaagacaaaagagaggagcatgtggaaaaagaagtcaatattttggagactaccatactggaaggatcttgaagttcgccactgcatagatttgatgcatgtcgagaagaatgtatgcgagagtttaatgggattactgcttaacccaggtactacaaaggatggtctcaacgcccgacgagatctggaagatatgggtgttcggtcggagctacatcccataaccacggaattcggcagggtttaccttcctccagcctgctacactctctcgaaagaagagaagattgatttgctaacatgtttgagtggtataaaggttccatctggttactcatcaagaatcagtaggcttgtttcactgcaagatcttaagttggttggaatgaagtcgcatgattgccacgttcttatcacacagctgttgcccgttgcaataaggaatattttgcctcctaaggtgcgacacacgatccagcggttgtgttccttcttccatgcaatcggccagaagatcattgaccccgagggactagatgaactacaggcagaacttgtgagaaccctatgtcatcttgagatgtactttcctccaactttctttgacataatggaacatcttccggtgcaccttgtgaggcaaacaaagtgctgtggtccagcattcatgacgcagatgtatccttgcgaaaggtacctggggatccttaagggttatgtacggaaccgttcacaccctgaggggagtatcatcgagagttacaccaccgaagaggccatcgaattttgtgtggactacatgtcagaaacatcttcaattggattaccacgatctcatcacgaagggaggcttgacggtgttggtactgtaggaagaaagactattaggttggatcggaaggtgtacgataaagctcatttcacggtactacagcatatgactgaggtggtgccgtacgttgacgaacaccttgcagttatccgacatgagaacccaggccgatcagagagttgggtcaggaataagcacatgtcttctttcaacgagtggctgaagaaccgaattgccaggttgcagaacttgtctagtgaaacacttcagtgcttgtcacagggtcctgaatggagtgccaccacctggcaaggatatgacataaatggatacacctttcacacggtaaagcaagacagcaaatgcacagtgcagaacagtgggttacgcatcgaggctactagtgacggtggtcgtcgtgatcaatactatggtaaagttgagcaaatattggagctagattacttgaagttcaaaatcccgttgtttcgttgtcgatgggtcgatcttcgcaatgtaaaagttgacaatgaaggtttcaccactgtcaacttggctaacaacgcgtacaaggatgaaccgttcgttctcgccaaacaagttgttcaagtgttctacatagttgacccgtgtaacaagaaactacatgttgttcgtgaagggaaaaggagaattgttggattggacaacattgcagacgaggatgattacaaccagcacgtccacggcataggtcaagaaatacctctagaagaggaggaagaagaagatgaagttcaatatgcacgtgtcgaccatgaggaaggattatttttgtaatttatgtacgtagtttatgtctacatgtctgttatctgtatgactctaatatgttcgcaatgaaatagtcaaataaaataattaagtaaagcacccactagaagtgaattaaaataattaagcaagtataagcattggaactaaaataattaaagtagtatagtaatgaagtgcaattacaactgttagtgaaataaaataattaagtataaaaaaatatgtagtgtatgtgaaaatatgttaaggaaaataaaagaactaagtgaaataaaattgctctaggcaaactcacctgtgacgggctctatctgtagggccgtcacaggtgacctcacctgtgacggcccagagtgttgggcccgtcacaggtggtattacctgtgacggctccacggttggcgcccgtcacaggtgagggcacctgtgacggccacatagttggcgcccgtcacaggttcatgttccgttgtgcgagtcctggtccggttcatgttccgtgcactggaagcgtggtcccgcacacagtaccagaaggacggcttgtgaggcgacgttaacggcgttaacggatgtgagaagttgccgttgcgcctcggcttttccgtcagagtcagggcatccaatgctctcgatccctctttcttcctcctctcgctgttgcttccgcggtcgtcgatgcgacgcaggcctggcggagaatccctctttcttcccctccgctgcaggctcccgtcctcccctttcgactgtggcttgcaggcccgtgccccccccaatcgattctcgtccgcgcgtcgtcttgcggcagcggtcggttcaaggtgctcaaaatcggggggaagtggaagagctccacgcctgtcgagctgtctgcgtcgtcctcgaggggagtaaaagctggccggcgtgctcgctgtgaagcagcaagcagtctggctgcctgtgtgctcgtcctctctgcctctcgggtcagacagtgctggcctgaagagtctcatcaaggcatccaagctggcggagttgaggagtctctatttcaggccgagcgtgtgcgtggtccgatggagacgacagcgaagaagcggaagcgagagcgggatctattgtcgatccaagaggaggggacgattgttcaatcccctcaaacaggggagatctctgtccgcggcgccgatctggagtccggcgaggactcctccgactctgtcacctccgacgctggcagcgccaaggctgctcccgacgacgtgcttcatatcgcgcatgccctctgcaaagtttgcgccaagtctcctagagccgtcatcgactttgttcgaagagtgagccctgccaccgtcggccgttcgattgattgggacgtcgtccgcgaggaagagtcatgtaaggtattggtttgtattaatttgttcatttccgattcaattttatttgacttgcacggagtagatgggcgatggccgtagccggtggaccgatatggaggttcgtgtgtttcttgagagctgcttggaggagatggcagcgttcaccatcacctccaactcccccaagccgcaggcatggcagaacctaatacacaagatgtacaccaagtgcaagaagaaggtgaacaaggctcaattggagtacatttgggggcagtgtaagaagcggtacaacaggtgggtgtggctagaatcgcatgcaagcgggctgggtcgtgatccccatacatcagccattgttgccgatgatgagtggtgggaaagcaagaatgcggtacgtacacttgaccataaatattttgaaccaacaattttgcctacaattggtattatctgaaatttagtacatgcatgcaattatgaatacagttttgtgaggtgtaataatttttttgttcaaattgtgtgtgccaacaaatgactagctgcagtaaaatggaaggattgtgatcacatatgtttcatagttgttactgtcatgtcgtttttagtaatgtgtgccattcccttgtatttaagttaacaaaatgatgtttaggaaagatctatatgtagtgtatatgtagtgtatcagtaaattaggaaagatcttgtacaagtcatttaggaacatgttaatacatattcaactagctgtacacaccttctttgtgatgtatatagagagaatgaacaaaaatgtgctcatctacaaagaatataatatatgcagtttatcttatgtttacaatgttcaaactatctttctttcattctgtcagatgtgtggcccattgtaacatgtactcctgattatatttgataacttggtaccaatgtgcacatttactgccagcattttagtagtaatgcacattggactgcacatattcattatgttcaatgtttgcacaagcctaatgcacttgccttgtactaacttatttttactgtctacttatgttgcagcaaaataaaggtgtcttaagcttcaggaatgatcctctgaagcacattgaccttcaccacgcggtattcagtgggcacacagttgtcagaaaccactccgccgtcgcaggggcagccccataggcaccgcaaggagcagttcagtggcagaccatcgacatggcgcagctcgctgctgcttatagaccaccacctccaactccacccccaacggcagcagaccggggcaagggaaagaggccagcagcaaacactactgcctcagggagttcttccaagaagtcacgaagcgactccgctgacttggctttggagaggattgcggacatccgagagcagagctaccagagtcgtgttgctcagatggaagcagagaagtctatgggccttgatgcgtgcatggagttggtggaaaatgatggccatgaaattggaggaagtgtgtggtatgctgcttgtgcgctattccgtgacccattcacctgcaaatgctttgttcgaatcaaggacgccgctaggcgcttggaatttatacgcactggtggtactggacagtcatctggtggcacctggtagtttgtgcactgtactttactttgagttgtgatgggcgatgtttttcaaataaaccattatttatgtttagaactcagtgtgctaacaatttttacattctgtgagtccgtaaacatttgtggctttatatccaattcgagcaactacgtattccattgcattgcttttatatccaaataattcttcgattgcatagatcactgccattattaatttctatccttttgattatgacaaacattgcatattcttcggttctcatatgttaaaggaaatcggcgatgagttacggcgcgggtggatcgagttggaatggaggcggtcacacaagcagcgaagaagaagatgccatcattgagtacatggctgctacccttgatttcaatgagagggcaccaaggagaataccggtgcaaaccggtatcagttggatgatggacacgatggcaaatcgaagccaatgcagggcaatgttcaggcttactgcagaggagatacacaatttgcatgatctattggtcacttcttttggtcttgtaggaacagcaggggtctgttccatggaaaagcttggtattttcttgtacacgatgggtggaaatcgtccaatcagagacgcgaacaatcggtgggtccgctccaactcgacagtgtcggttcacttccaccatgttttgcaggctatgaatgatctcgctgggaaaatattgaaaccggttgatcccaacttcttagattacaaccctcagattctgcaagagaatcctttcaagcctttctaccaatcagtgggagctgtcgatggcacacatattccagttctgcctaatgcagctagcgctatgcaacacaggaaccgtcaccacataacaaccagaaatgttctagtaatatgtgatcatgatgggagaattattttctgtgatgctggctggcctggatcagttcacgaccaaaggattctcaatgaggcagtgcaggcttacccctacgatttcccacgggtaccgttaggtgagttgtatcggtcaatacacttttttttattgccaaatgtcttgattttatttaattctatacatgtgcactaatatttaattatgcgccgttaaccaggcaggtacctacttgtcgactccggatttcctaccaggatgggcttccttgcaccgtacccacatgtacggtaccacagggatcaacttgcggtcgagggagccccgccacccgtaggacgggaagagactttcaaccatcgacactccacgttgcgagggatcgtggaaagacaatttggcatcgcaaaaaagatgtggaaaatattgaaagaaatcccttattaccgagatgacgacatccctgcacgcatcattcatgcagctttcgctctacacaactttaggttggatagtaaagatccgacctatcggttcactaatgctctctacaacggcaatccagtgccgctgctgaacgattcattcgaccatatgtattacgcaacaaatagcgaggccgctatgtgcatgttgcgtgactgtattgctgatgatgcgtacaataactaccattaggtaggtgatgttatccataatgcttgtcgtatgttcagtacttcaattttcaggattgtatggtttaccatttatttatgtccgaatcttcacatattatgaaaattattattaaagaaatcacatgtgtgtgcatatcaaatatttctttcacaattggtgccgcgtagcaaatatctctttcacccgcgtagcaaacacccattaattcgcatgctacagtacctccactgccagcccctgcccggcatcgcacggcacggcgacggaaagtgtcggccatagacggcgtccaggctgccgctttcaatattttccagtgtctctgacgccctgacactgctacagtggtctacagtactacatgttcccaacccaaaagtcaagctccgatccggcacttgcgaacgaaagtgaaataaaattgctctaggcaaactcacctgtgacgggctctatctgtagggccgtcacaggtgacctcacggttggcgcccgtcacaggtgaggccacctgtgacggccacatagttggcgcccgtcacaggtgagtttgactaggcttgacctagggttggacatcgatccagatccggcacccactctcactccactctcatctctcgaccgccgcctcgcccctatcgacctctccgctaccctctacgccctcctctccaccgccgcctcgacctctccaccgccgccctcgccgccgccaaatccgccgacctctctgccgctcaccctctccgtcgaccttcccgacgccggcctgcaccaccaccgccgcagtccatctccaccgccatctccaccgtcgcctcgacctctccgccgccctcctctccaccgccgcctcgacctctccgccgccatctccgccgccctctccaccctctacaccgccctctgcactgctgccgcctcactcactctctcgaccgccgccgggacctcctcttagtcgccacgccaggaccgtcatcgccgccaccgggacctccacggtgagcccacggcccccgcctcccctcgtttactattggtcgccgattaaccccctcttctcctcctcagcgccgtcgtgccaagaagccgccgccgcgccgccgtgccgagaagccgtgcgccgtgcgccggccgggactcgtcgtcaccgtgcgccgcctcctctgctcgtcgtctcctctccaagtacccctctctctctgatgccgatgaatggaatggtgcagttaatgcatgaatgaatgatgcaatggaatggatgaacgaatgatgaactttggggaatccgaggttatcaaaccatcacagaatacaaaatgcatggggaattttggtggattggtcagtgtagtccatggacggaaccgacctagacaccaaaattctccatgcattttgttttctgtcattctttgataatgaaggaactttattaggtttagggtttgaaatttatatacccttgttgatagattggccacagattacctacacttgttgatttatatacccttgttgtctatgaataggtgaattgcatgaattgttgtttatatacatgatttatatacccttgctgtctatgaataggtgaattgcatgaattgctttttatatacatgatttatataattttttttgatgccttgctgtctatgtttgcccatgctgctgcctatggttgcctgtcattttgttttctgtcattctttgatgatttatatacccttgctgctgctgcccaatgtgttccttattaaatggccagtgatgaattgctcaataagaacagattttgtgcacttgctctttttttatgcataagaacatattttctgcacttgttcatttttttatctacaataatatatgcatgatttatataccactgctgttgttgcccctgtacttcttgttaaatggccaaggatgaattgcttaataacattctatctatacctgttattttctttatggataagaacagattatctacacttgttgatttatatacccttgctgtctatgtgaatttccctctgctgttgctgtttatgtgaatctccccctgctgttgctgcccctgtggcatatatacccgtactgatgttatatggccctgctactgctcttattgctgctattatatggccatgctgttgctactgctctaatttcctgcacttgctcttttctttatggataagaacagattacctacacttgttctattttctttgggttgcttttttctcctagtagctgatttcctctttttatcccttcatgcaaatgattgtaattgatgcatatttctcagcaaaactgaggccatatctttcatagtataccccgtattacattggatctaatgctatttagtctaatggtaggaaatttataatctttttcgcgaaagttaaaccatgtcaacgcccggcgcaaacccaccctccccaacacctgcgagggtccaggaagaagcaaacccagccacagaggcagttgcagaaggtcatcccgcgacaacggcggtccaacaacacgaaattcatggtaatttataggataaattttcaccacatgaccacataaattttagctagcaccccttagcaaatattgccttctgtttgtgctgcagaattgccgcatgaacaacatacgtcgatgtcgggcgggacaagtgcaagtaggtctagtagaaatccgcggtcacataatatatggccgaccacagtgcaagttataagagaggttgacgctagtggtaggcccacggcgcccaggactgtcattggaagatggtctaactgctgcgggatagcggcacgtgagaacttcgggatcctccataaagatatcgggaaggtcacagaagccgagaaagagcgagcttggacggcaatggagaaatggttcacatttccagccgaagcaaaggataggctcaagcggaaggcattccaaaagatgggcaaagcttggaagaattggaagtcgaagctcttcaccgagtttgtcaacccgcccggcaatcatacgccgttcgatgaataccctcaaataaccgaagcggtgtgggaggaattctgctctctcaagaccacccaacagtttagggaatcaagcgaggcacatcgcgtactgcaacagcggaatgagcacccgcatcggctgggcaccgcagggtacatcggcaaggaggcaatatgggcccaagaagatgcagccgctgcagcagcgaatgtccctgccccgttttcagacatccctgaacaaagagctcgcaactgggcgcgggcaaggggtaaggtcaacccggacggctctgtcacatttgagaacaaaagtgatgccgtcgtctatcaggaactggtgagttcactacttaacctaactaatttccgttcgtataaagtacaagttcgtataaacgactatcttcttttctagttgggcttggttgctgaacaagcttcacaaagcgaggttgagtccgcgccgaagaggcgcgaagatgacatcctcacaaaggcgctcggaaccaaagaacatcctggccgaactcggggaattggtagcgatgtgccctggaagcatggactccctcagtacagatcccaatacaggaaacggaaagtctccaaggaagagagggacgctcgtttgaaggccgaacttaaggttgaggtcattcaagaactagaagctagcatggatgcaagggtggaagaaagggttaacaaggtcctcgccgacatgaatataccccgagtcacaacacctgctgtgcaaccaactcctcgtgtacaacacgacgcgagtccgtcacagcataggagtagttgtgcatccacagaggtgccggcccctggtctccctatcgcaccactagctgcagtggaccacatcgaggtaattgttgttatccgatccatatgtaataaaagacatgtacacattccaatattaaattcaaactttcaccttatgcagggcgcagcacaatgtgtcctactagcgagagtccacccaactttcgctcctgaagtcgctgagggcatggctttcaagccctctgttacagacaaggtccacggcgcagacctgctagctgggtatgccaaggtgtccatcgatacagtaaaggacacctggtccggctatccgctgcccgtgcccccaaatgatgaaatcatgactttgggcgatgcgcgcaagacgttcatacaatggcccaaagaagacatagttgtgaagatgactcctcgtccaagtcgaccgacggagcttacacctcccaagtctaagctatcatttgaggctccccgtggaccggcattgtcagtacctcattctcccggtggagctgatatggacttggcagatatagctcaaagcttggctccaataaagaccacaagaaaggccgatagctccccaccacttgtcaagggccagaagcgtgaacgcggcaaggggaaggtcggggagttggcgccggagccaaaaaggggcaaggctgcgacgtcgatgccggtgagcaaatcggggaaggtcgtgagggcgccagcccaatttgagctaggcatgccattggtggaggacaatgtgttagctgtgatgggtattgcttgccgagagctacataagcaatacatggagctaagcaatgccaagcggaaaatgagggagtcatccatagttggacatcacgaccaccagccgttcctatcgtcgcctgtatatataactctaggctttgatgacctcttcgaccttttcaggatccggaagttggacactggtcttctaaaatgctactccttgtaagtgcataccttctatacttgtgatatgactggactatatctcctaattaaattagttctaatacgtacatattttaaggttgtgttggatcgagagtcgtcgccatggtaatcaggttgggttccttgatccatccatggtgaatgaggttaatttacgacagagcttcactgaggtggttgactatgtcaaccggtgtttatgggcccatcaagacaaggagtacatcatgtgcgcacacaaccaagagtaagaggacaatacccttcgtgtatattgtttttgaagttaaggttcttagtactaacgctacataaccactgcgcaggcgacattggattctcctagtcatcgtacctaagtggagtagggttacctaccttaactccaataagtccaaagattatgatttcagtgaaatcaccaaggccttaaatatggcttggggcccatatgtggaaaagggtggtaggcacaaggagggcaagaatgaactttatcatgacaccaagtttgcatgcgcacaacagatcggagaccaatgtggtttccacgtgtgccacaacatgtcaacacttgtaagagaggtgaaagatttcgaccctgaggttgttgctaatggcgaataagctcatttcaatatctacattgctattcaaaacgtgctaattaacctcttatttattaaacagaaaggtagagctggcttgaagatctcacccatcaacccccccgctatcagaggcgaattgtgcgcctttattcttgcagaaataatgaacaagaaaggacgttttcatgccaaatagactcatgaacttggctagataatttattgtgatgtaaaaaagatgtttttataatttctggcgatgtaaaaaattatgtttttcatatgtgcaatatttatggtactttactaaattgtcatcacatttgatcaactacgatttatgttgtactattcatctgttttctccttttttttttccttattgacaggttgtgcaggtcgatgacattatggctttaatccatttggtaagtatatatgcggttctatgagcaacgaccgaaattgtggctttcaaggggtgtgaatttgctgtgcaaaattgtggcatttgaactgcatatatgtgttgttggggatctgtgatgttatattgggggggtgatgtatctgtgatggatctgtgactggaatatatctgtgatgtttctatttttcagagggcatggctagcaaatcctgaggctagccaatatttagcatttattttttttctggaattaactcatcagtgacgggtcggaacaaaaatccgtcaaaggtaacataacctgtgacggactagcaaataaaggcccgtcagaggtgacctacctgtgacgggcctttacttttggagccgtcacaggtagatcacctgtgacagcttctaactacggagacctcaacctctgacggcctttatttaaagggccgtcagagatgagtcacctgtgacgggtcctaactcgctcaaggctagcggagaccaacacctctgacggacttctagtaacttgcccgtcagaggtgggtgtcacctgtgacggccggccacccgtcaaaggtgactggactcaccagtgaccactgatcattgaccatgcgcgaagccgtcaaagatgagggtttgggcccgtcacaggtgaccttggccagtgtagtggttatagttttctgaaatttactcatttaaaataaaggaatttagagaaagaagagttgacagttaatgtgtacatgcatgcacgccttatattatgaaacatagagaaaaaatggttgtgccttactccctccatcccagtttagttgtccctgcggggtagctagagtcattgtcccagaaaggatgtcgtttaggcccggggcagctagcaggttagccactagctagcatgagtacttctattaattttcttccttatgcttgttgcagacatatcagaatggcagacgcagtattagtttagtgtcaatttttaagcattgaaatgattaacataggggcacattagtcatttttacaacaccatattttgtaatttctttgatagaacgactactgaactagaacagagagagtatattttaggatggatgagatattacttatagaaaccttagtggtggcggtgactccaatcctggcacacgccgattctcgaccgttcatcttgatatccaatgctctgaatctctcgtccatacctcgcaacccgcacctcgctgcatcgttttgcggttccctcctccaaaacccatgctccctcacccatcacacccccatcgctcttccccaaaacctaatctcctatatccactcttcgccgccgaacttcgacatgcagatcgccgttatgcgtcaccagtcccccacagccaggtcatcattgcgcctccatttatcaaaattgtgcccttcctatccccgctcgctccgcaacacctcgccaattggtgacaagaccccttgcatccttcccacgctcgctcagatccatcacataggtcatcgtcgacttgccactgttcagtctccgttgcgccgccacctgactgtccctggcgattggtcttcctcaccgtcaagcctcctcaccctcacgtcgaggcagggccacgggtgtccgggcgaacaagtgggatgagctcgatggacgaccacataactagggtaaggagagtaggttctgtcgctggcccacttagtctggttcatatatatgacctcgggtagggcaacgccgtctccttctcacaccgatgtcatctcatggtccccatctcacccaggtacctcaggtggtaatgggccagtgctcattggcccttttgcaacccacctcagcccttaaatatttttagataaaaaatctattaaatctcagcctaattctttttgcccaaccctcacattttgtatgctaaaatattaggcctattaccacctcttggtacccctccattacttcagccttcctcttctctcctcttgaatcactagttctgatataataggtgtcgaatatactagtcctatttgattataattggacttggagttgtaataggtggtagggggtgaagttagagtcggactctgaaacccgacatctctcttaaatagagaggggggcaccacaatataactatagcgaccacaatgtaacgtagacacgtaaggaggggatagcggcgaggtcatggactcgtagcggctaggagttatattggttggggatgggcgcccataatcagagcctcggggatgtaggtttcggctgaacctcgttaacaaatatcgtgtgttcatgtgtcgttatcttgtgtgtcttggatgatcaataactgaatcgatcgagaaggttagtcgtcattccgctatatcgactaacatttattacaagttcgcgattttcttctgctcatcaaacttcgagtgttagtcaacatcacaaatctccggtcaatcttcgaggtgtgccatgaatcggagattgcagacatggtcatactgtaccgcctacccctgtaatcgtttaggcgtgttaccgatgtacgttgtttttcttctaatatattaacgtgcaaggtttttgtgcgtttgcgaaaaaaaatctcctgtcaactatgattggcaaatcggaatcatggtatgtttaattttcacttgaggaggataatcagcagtaatttggtaaactggttactggaagaaggaaaatgcgcctattaattcttttgatgtacattcttattagcaacaaaaaactggatctacatattattgtacgaaatgtgcccttctcttttgcgtcaaactgaatttgtttgttctggtcagcgatcaatcggcttacaaacagaagttgataccctgtatcaaacggaatatgcacatcagtcaagagtccgtcaaagttgataaacggtacgatggtttgtgacgtttgtctgcggggataagtccattttacaccctccaactatttatgttgtctaaaatacacccaaaactttaaaaccagatatttcaccccctccaactttcaataccgttcactttacaccctcaggtagtttttcagctggttttcatctacgtggcaatgatgtggaagtctactcagcaaataaaactaaaaataaaaattagagccacacgttagtggccacttcttcccccatctcctcttccctttctttctctatccttcttcctcccagacagagagcagcggtggagctgagcaggagatcggtggccatggagcaggggactcgttgcggcgacggagctcaagcacatccccagccttcccttccgtgccgaccgccggcgagcacgagctcaaaggtctacctctcctgccggctccaggagctccataactccatcttctccatgttcgagctcgccggtggaactcgagctgcttggggatgaggaactcaagctcaacgaggcggcggcggatgtagagcttgagctcgacctcgtcctcgaccaagcggtggcggcgcgagcgcatagggatgactcctccccgcgcgtatggctccggcgaggtcggccacttctgagcgaggcagcaagctcgtgattcgcagcgtcgccgccctcacaccagctccccgccgccaccgccctcgcggctccacgccgacgccgacgccaccgccctcgcggctccacgctgccaccgcagccgccaccctcgcagctccacgcaaccgcagccgccctcgcagctctacgccgccgccgtagctgtcgatttcgcagctccgcgccgccgatgccgcagctgccgccctcgcaccagctccccgccgccactgccctcgcagctccacgccgccgccgtagccgccgcccttacagctccacgcagccgccgccgccgtagccatcgatttcgcagctccgcgccgccaccgccctcgcagctctgcgccgcctccgccgccgccgccaacggccgtgagagaagataatgaacaggggagggggagggagagagagggggagagaatatgggcttggcccatgttaatgttttgcgctgatgtggctagggctgacgtggcatccgatgtggcatccgacgtggcaaaaaccacggtaaaaatagcccggggggttaagtgtccggtattgacagttcgagggtgtattatatccggttttgtagttcgggggtgtattttagacaagcacaagagttcgagggtgtagaatggacttttccctttgtctgcgttacatttgcatttaaccaggttgaaatggtttatgctaactactagcgtaataattctgtaggaaatgaataaaaaccagatgaaacagacctgaactgaacagatacatcatacaggcatacagcagcacctacggcagcagcttggcagtgcctctttttctgtctcgccattctcggaggaacatgaacagaacacaggcgactccgatcacttggagacttacttgaaacgcaatccttttataccaattatgcaacctaaagttccaccagaatgacgtatctgaagaagtggacatgaaattcggatgaagtcgaatctacgaaaactaaaataaaggcgaaccaaaaatcaaagcataaaacgcatcatataggaggtgtttatatatagggttgtaaagtttcgacgtatcaaatcggatattatatatatagtgtcgtatggagtgttcaggcactaataaaaaaattaattatagaatctgtcaataaatagcgagacaaatttattaagcctaattaatccatcattaacaaatatttactgtagcaccacattgtcaaatcatagagcaattaggcttaaaagattcgtctcgcaaattagttgcaatctatgcaattagttatttttagcctaaatttaatacttcatgcagatgttcaaatgtttgatgtagaatggaactaaacatggccatattcataatccaaaagacaagttttgtagagcgagtagagatcactcacgctccttggtgatgcctccggaggacaccacaccatgagcacctccgcatgctccgtgcgctcgacgtcgtagtacctgacgctgcacgcgccgccgccgaggtggaccacggcgtgccggctgtacgggcacagccgccgcgcgcaccggaaggcctcggcgacgcaggcgccgcagtcgtggtactccgacgacgacgagttgcaggaggccgacgcggcgatcaggttcggccgctcgccggcgaggacgtcgacggaggaggaggaggatccgttcatcaccttggctgggagcgtggcggcgaggtaccgcaggttggcttcgtaggtgctgttggcagcgtacggccccggcaggatcccgcacatgtggaacggcggcggggtgtggccgtcgtcgacgagggcatcggcgtcggcggctgacagctgcggcgcgacgagggcgagcacgaggaggaggatggtggcgcgaggcatcgccggaggaagaggtgattgatcagctgaagggaggtggtggcggtggactggtacgtacaggatctgctccagtcttgtagcacatttatatccacgtttccatggtggattgtttgagctagttgttgacattgaccgttgactacctacgaccattgattagtccagaaagatcaacaatggattacattatgttagttgtgttgatgggatcttcttttcatcttcctgatgatgatcaacgtacgtatatatagttaacatacttactttacatattactctctcgatattttaatgtataatactgttgaatttttttatcaacgtttgaccatttatcttacttaaaaaaatttatgtaattataatttattttaaataaatcaacagcgttatacattaaaatacggagagagtataatactagcaactcatcgggtttcaactagttgttgatgggatcttcttttcatcttcctgatgatgatcaacgtgcgtatatgcagttaacatattttaccgattagtacaatactagcaactcgggtttaaagaaaagaaaaatactagcaactagttgatgggatcttcttttcatcttcctcatgatgatcaacgtgcatatatgcagttaacatattttacagattacaatacccaactcgggtttaaaaaaaaaatactagcaactaggctatacgcaggacccatcatttctgaacgaaactactcgcaccgtcccaataaaaaaagatttggtttttaatggaatggatggaatacttggttgcagttttacatattactatccggttattctaaaagacatggctacctataaaaatgtctaaagaatttttctaaaaaatctttcaaatgtaattacagtgtaacaaacattttaataactcgggtgtaactatgtaactaatatgtaactcgtctagtactataacctttcagaaacttgcgatagggagcaaggtcctgagttcgatcccctgcaagcgcacaagctaattctcactagaactcttcctactcggtttgccttcaccgttcttggattggctgggccggtagccacggcgcataggcccagctacttgaaaaggcatgataggtgcgcacattttaaccgagaatgctaattcacgcacgcgcgttgccgacgcacacttccggcccacacggcccacacacgcgcgtttcttttcttttttttttaacgcaagctaccgctatttcttttttttttcttttttcgcagttcgctgccgcacgggtaggagaaaaaatcgtaattagtttactaatgattagtttcctatttttactagtaatttttaaatcttaacttaaaattttcaaatttggacttgaaagttttcgaatctcgagttgaaagtttttaatctcgagttaaaaattttcaaatctcaagttgaaagttttcaaatctagacttgaaagttttcgaatctcgagttgaaagttttcaaatatcaagttaaaaattttaaaatctcaagttgaaagttttcaaaattttcaaatttggacttgaaagttttcgaatctcgagttgaaaattttcaaatctcaagttgaaagttttcaaaattttcaaatctagacttgaaagtttttgaatctgagttgaaagttttcaaatttcgagttgaaagttttcaaatctgagttgaaagttttaaaaatttgactctaaaatttaaatcttaagtcgaaagttatcaaatctaacttaaaaatttttcaatctgttagtaaaaaaatctcctgaaaaaaatcttcacaatcttttctaattactgtcattagcgttaactaacggagttagttacgccggaagtgtgcactagaggcgtgcacgcgccttctagctttcccccattttagcaggaccaaccaagtctcccaagtacgaaaaatgttaactgaaagtgcatctaggcccctaataattttgatgattaattacaatgtgattagagagaactaacatttttatttaagcaaatgtgagggttgttatgtcctcaatgaattagcataatgcatatcccgccaaatacgttgatgagatgtgatgtggcaaaggacaaatagtatattgtaacttttcttttcatttgagtcaataggaaagtcgcactattaagagggatgatgcattgacatatgaggagtgatcaaagtgctcaaaatctatttttaaaagtgtttctcctcagtttggtgtgttctggattttttcggagttttccaaaactcattttcggactttccgaaaacacacagaaccaaattttcgcttctggaaattttcggatatgtccaaaagtgattttcggactttccgaaaatgactgcgaaggcaaaagtggttctgtatattttcggacttgtccgaaactgatttttggattttctgaaaatcatcagtagagtcaatttcgcttctgtatattttcgaacttgtccgaaagtgattttcggacttttccgagaacatccagaacgatgttgttgttttcggacttgtccgaaaagttttcggaatgtccgaaaaatacttcgttgactttgctgtcggtgctgagctggaattttcgaacatgtccgaaaatctttcggaatatccgaaaatctcaattattgtgcataacgggcagaatttgggctgtggctataaatatccccctcccctcacttgtgagggctgctggttccatttcaatcatttgtgcccttggcttgctctctctctctagcccttttgagccttgctttcttgtttcccctctcacccgtgttcgatttggattaggtgtgtgtgtgagagttatggattcgagttttgtgagtgcttgttgttgacttcgtgaagatttgtgagcacttgcatcatctccgggagttctttgcttcatttgttactcttggaggttgaggactcctaggcggctaggtgtcgctcccgagccaccgatctacttgtggttggccgggagaagtttgtgaaggtcggatcttacctccgaaagggaagagatacccttagtggaaggaggagtgcttagtgcaaccttttgaggaaagggttagctaagacccggctcttagtgagctcctcaacggagagtagaatcccctcaaggattcgaacttcgggaacaaccttatgagcttcaactttggtgactttacttcctccctctccactagctttgcttgtttgagccgctataggtctagttgctgtatgtgctagcatattcttgttgtaggcaactagatctaggatttactttgctatttgtgctgactccgaaaaattttcggatatatccgaaaatttcggaaatatccaaaaattactgcttccgtttttaattgatttttaaattagcctattcaccccccctctaggcctaattgacactttcaacccattccacaagcaagggaaaatgtatatctgaggtctctcatcttgtcaccgaattacaaaattgtccctaaacccaaaaacaagatactccctccatccacaaaagttacacctatttcacatttaagtttttccaaataagttgtttctatttatagtctttatacattcaagacttaaatgaagagataaattaaatattttattagaacctaaggagtcatctaaatactcattggttgcatgcttgcattcactcattgattttgtaacatctaaggtgacttaatttctccttggtcttagtgtcaaaagtaatatgtgtaacttttatggatggagggagtatatggcatcccttaacttataaaaccggatcactctgagtccttagacaatattaactctggttgaccctggttttgtccgacgtggcaactgagttagtgtaggacccacgtagggcccacatgtcagtgaaaccttagcttctttataccctttcccctctccctctccatctccctctcttcccccaacatgtgatgtcagggacgattttgtaattcagtgacaagatgagagatctcagatatacttttccacaaccaaataagaaataacggcccatatgctacgagtatatgctctgatgggctgttctgggcccagattgctaggatagaactccgcctacaatagacgaccacaaagattactggaaaaagtccatttgagtccctcaaatataggtcggatctgatttatatcttttaaccgtaaaagcgggtatattgatctcttcaactatttaaattgtgtaaaatgactccctcaactattgtgaggatggtttcagctgacatgatgtccacgtataacccagtcatcaaaaaattaagaaatatgatacccacatgtaaatggctacactcatctccttcctcattcactctctcctctctccccctttctcccctcgaggcaacacctgctacacctacaggtagcgcgaggagggggtcgtcacccaggtaacagtgaagagggccataggtgtaacgctccgcttttcgtgagacgttaaaaactaattcggcaaaatcctaattgcgaaaattttcgttctttttgtgcgagtctatgtcgtgccaagatctcatttcaaatcccgttgttccctctcatcgaaatcaaaatcctccacctcaaattcctcttccgattcaagtctccaaatcaaattccgaaattcagtcgcatcctttgaatcctcgctaaacgctcgctcccaattcccaaaaatgccaaactctatcttgagccttccttgattcctccctgaaccctcgagtttgaatatcgaatttgaatccaaatccaaactccaattctctccaaatcagccttctctatgaaagtctattttacctccctctggctcggtgggccgactcttcttccccggcccatctcctttcagcccgctcccctcctcacgtgcgttgcacgtgccctgcctgagagaaagtgcctctctctcccccgatctctctctctcgttttctctcgctctctctcgcccgcgctccgcgctgcttctttgtcgttcaaacccgccaccgccttcgctctttcccgcgcgcgcgcgcgtggccgaccggccggtcgctgccgccgtcagccctgccgcgcctgcgccgcgcagccgcccggccccgctcgccttttgccgacgtcgccactgtcatcgcctggctccgatgcccccatgccgcatccttccaaaaccaggagacagagctcgtgctcctctctctcattctcacatcctccttcctcccaaaatagcaagagagcaaagctcgtttccctcctcttttcacctttttccttagccagcgtcacgcccgtgaccgcctctgccgccgattggccgctagctccgagcacgaccgccagttgtcgccttgaccgccccaaggtcggtttgaaccgacctcccgcgcgaaccgacctcgcctccactataaagccgagtccctcctctcaatccctcccgcttcagtctccaccgctgcagtgccatcgccgccttgctgccgccatcctcgccttcctccgccgtcgcgtgtgccgggaagacggcgtgcgcgcggagccaaagaggactctggtcgccctctctccctccccttccccggcccgagaccgaggtgatcccgcctgtgctgtcggacgctcttcccggcgatctcccgacgcggtagcccccgttctccctccctactcttcctctcccccctagcttgcgcatttgctagcctagaccttcccaaacgcgcgtggacgctgccccgagccccgccgccgcccggcatggcctcgccgccattgccgtccgctcccggaggccgccgctcgtcgccggctctcctcggtgctcctccgtcccatccggtgccagaaaaggattccttgaaccccggatatgctctcaccaccgtgaatcgatccctctcctctcccggcgagttttcctctttccctcaccggcggtgacctctgccgtgattcgtcgtcgtcggcccttccccttctaatccgtcccgtaggctcactcctcctcgatccgctcgtcgctccggtggtattccctcctcccgccgtgcctcgcaccgccccgccgacgcgcgccgccgtccgccgtccatctcggccggccttcgtcttcctcctctcgccatccgacgcgaccgccacgtaggcgccacgtcggctagaccaagtcaacccgccagcctcgtccccgctcgcgtgcgctcggtgcatggagagcctaacggctgcgcgtgggcccgccacccttcggtccacccggtgcaccaaactgcgcgccactcctatccgaacactagcgcgcgccgcatgcaccgctcccacggtgagccgcgccaccgacaagcgggccccactcgggaccccacaaggtggactcggcccaccggccctctctctccctcactctccccgcgccccttgggccgcctctccgggccggccggcccattagttcggccgagccgcgcctctcctctcgggccgcgcccaagccgcccgagggagtctaaatcacatccctccttcaatttctttccaaaaagggtttaataaattattaagtcctttttcctttgattagtaaatccaataaacttcgaaaatccatatattcccaaccgctcatccgattgaccccgttccacttccagtaattccgtaaaattgagatctatttaatggcactattatttagtctaaatagggtctttttcttggtcttttgtctaggttttcaattgtttgcgtatagttgtggttaccggatttccgtcaaccgcgggttttctcgaagattcgtgaagcttcgtgaagactttgagcaaggcaagtcaccctttgatcaattgctcctataattggaaagtcattattattttgtttgcaacttgcttcattagaatcactcacgtttaacttgcttggcctcggtttgcatgccaaaccgacggacctacccagtagtcgcactaattcctgtaggttgtactaccctgattccttgttgctccacccttgtggtacttcggtatccgtgctctctgagcgcgcataccaaatatcccacatacaccgttgattgtcgaaaacttgggaaatgggtttgtgaagccttgaaaacccgacatgtggtgtcggtgtgtttgaaaataaaatgaattgcgaaaactcgcgatgcgggagccgtgcctacgtggcgctgtcccgtattcgcatataaagaccgattcctgtgggaaactcatcgagcataatcaaagtgcaaccacaaggtggaatgggacaccctggctaagtaactagtcggttcagggaaacctcgcatgccaatagttgggaacgccggggcggggtcggacaaaccgggttcctggtaaggcaaggatgagaagcttgctcacttaccgatcaaggtggttggaattgatttgtgaatgcttaaaatggcctatacttacgtgaggatttgatccttctatgtggcatgaggtaaccctgggtcggcttgggaaaggctttgtcgcgagcctctgacaccggccagtgtctggagtaagttcgtgtcttgtgggtaaagcgtacccctctgcagaggttaactaactgttcgaacagccgtgcccacggtcatgggcggatgtgaggtggttcccgttgcgtagatttgattgcctgtgctttgtgaaaagttgttgtggtgtgggaatcgttaccagaatcagcctgaatggcagatggatgacctgagtggtcggaaacgaatctgtgtgattcgggatgtctgcgggcatcatagactaggcttcctgagtggaagcggattgttgtgctgctgggcagctagactctgggagtccgagaaaatgaaaaaggctctgggagctgattaatcaagtgaaatggctctgggagccgataagtaatgatctgactcggggggtcggtacattaccatttgagttgttgaaaagcatctcttaagtcgaatcgagacgcaagtctccttttcgacccaaacttaaaaagaaataaatcacttagtgatttcaaaaatgattttaaacaaaggatttgcaaaacaaccttgcctctcttccaagcttgcattaaacacctaagttcccgtgacttgctgagtacgaaagtactcacccttgctctatataaatatatatagttcctccgtcctgaagctgaagatgaagtgaattgaagaatagggtttcgtcctggttcctagccgtcgcctgtggtgttgggtgttagaccattggttccgctgctgctgctgttgctggtgtttcctcgtctgtgtcttcggttgtattctcaggctgtcctgagctgcaacctaagttaaggtaaataagtcctctatttattttaaggatttgcaatgattcatatttgtcaccgtgggtaccagcactatgtcctggtactggtactgagatcgcggtttcgtaggaagcggttcgcgccgttattcctacgacacgctcctgtcaggcggcattgtacggcggtgccggattggggtgtgacaataggggtggcaccttggttgatggcgtcctccatgccctgtagcatttggtgaggtcaacatagtgattgtggccatgcaaggtgagggaggcgttgtgacaggaagttgaatgaatggcaggacccatggtcggtgtagtccttcgcttgggacgcaacagtgtggactacctctctctatccatattctttttccaagccgccttccatatctgcttgatcatgagggggatcaagtgaggccaatgacaacattgtgacaaggagtagacaccggcgtacgtggagaattttgtgttggatctgctctaggaggctagttgggtatcagagctccttcaactgatgtcaagccctaaactgtcatagacctctagtctcctgcgccaaactattccatctcgagctcattcctccgctgctacgtcatcggcatggcagagtctacttgttcgacggcgtcgtcatactcgcgctcttgcctgagcaacatgccatcgaagcggaggtaggcgaaaggggatccccgccctttgccctccaccacgcagggcgacggtgagatcgggtagcggcatgggaaagcctcgcctatttgcgtcagacgccgacgagcttgagtgggtggggagagatagagaggaagatgatgcgttggcatatgaaccccacatgctgagtcagccagttgaccagggtcaatgagccaccttagccaaaatcgctctcaaactaccctgggagttaaattattctggtttaaggctgcgttctttacctccggttcccaactttcctccctcattttccgcacgcatggttttcaaactactaaacggtgcgttttttgcaaaaaaaaattctatacgaaagttgcttcaaaaaatcatattaatccattttttttaaaaaagcaaatagttaattaatcacgtgctaatcgctcatccgttttctgtgccagggagtgagggttcgaacacagtctaagcaattgaaggagtcgttatacctggttttacggttgaggaataaagatcagatccaacctacagttgagggagtcatattggactttttctataataaacaataacaaggtgacatcgcaagtgatgcctacagccctacattgatttctgtatctgcatatttatcagtccgcactctccagtctccaacattatacggagtatcagtatatcgccttttccatttgataaatcggaggaacaaggaaacagtccctatcaatttctgaatgtacaatcttgtatggaaatatatgggcccttttcttttgccgcaaatggatttgcttgttcaggatcagccgatcggtcgaattacaaacagaagttgaaaccctgtatcaaatggaatatggatatcagtcaagaatccgaccaagatctcaaagaactctggttaacttgtctacattatatttgcatttcaaccaagttgaaacattctatgatattataacgaacttttcgaattcttgttgggaataaacaaaaccagatgaaacatacctgaactgaacctcccacctatggcagccgattggcctgggctcttctccttctaccgtctcgccattcctggaggaacatgaacagaacccaggcgactccgatcacttggaacaccaccatcatagggaaatcatgggtcaaaacaattctccaccaagatgaagtatctggaaaagaaaacgactaaaatgttgattcggatgaagcaaagtctatctgaaattctggaatcagtactgaattaaggcgaacaaaatcacagtataattatatctatcgagctagcagtagcagatcactcacgctcgtcgaagatgcgaacggctaatgaagcttgtatctccagctccacgcgtccgacgtcgtggtagctgacgcggcaggcgccgaggtcgaccatggcgcgcctgctatacccgcacagccgccgcgcgtaccggagcgccttggcgacgcaggctgtggatattatgggtaccccatacccacagggcatggttatccgactagttataggggataacttatatctatgtaatatgtaacagatcatgacttgggtgttacgtttccttgtatattacggaacggcctaaagtcctgatttaggaaaccgataccgtattggttaaggtttctatcttgtaatcctgccccccatcctatataaggtgggcaggaggccctctagggggcagatatgacataacctgatcgtcagatcaatacacacccggcggattcaaacccccaaacaggagtagggtattacctctcattgagagggcctgaacctgtctaaatcctttgtctccgcatccatccacttttaggtctcgtgcgctaccccttttattattgccgaaatcatgtttcgacagttggcgcgccaggtaggggttgcgtcgagtttcctatcaacaagcgcgatggaatcaatttcatgagtcgccgacttcgttttcgctttgggagttttcacttcctttccgtcgaccacttcttcaagctcctcttctctgacttgatccaaatcagtcagggggaaactcaatctgatttttatcattatttatcgtactgatttttaatcccagattaatctcttgctattttttgttgttgttcgcatataattacgcggcactattgaggcgattgatgctggtcatagactcgaggcgtctcagctttccggtcgatcggccgcgagtccactctgccggcttgtcttcgccaccgccattgctgataacaacaacgacttcaccgccggcctgcctccgtcgccgccgattggtgcctccgcctacacggctggcctattatgccgccgctgttgggcgtctacgacttcaccgccggcctgcctccgtcgccgccgattggtgcctccgcctacacggctggcctattatgccgccgctgttgggcgtctacgacttcaccgccggcttgcctccgtcgccgccgattggtgcctccgcctacacggctggcctattatgccgccgctgttgggcgtctacgacttcaccgccggcctacctccgtcgccgccgagtggtgcctccgcctacacggctagcctattatgctgctgctgttgggcgtctacgctttcaccgccggcctgcctccgtcgccgccgactggtgtcctcgcctatacggttggttggtcacaccaccgttcatgggcgtccatgcctccgcctacacggctggcctattatgccgccgctgttgggcgtctacgacttcaccgccggcttgcctccgtcgccgccgattggtgcctccgcctacacggctggcctattatgccgccgctgttgggcgtctacgacttcaccgccggcctgcctccgtcgccgccgattggtgcctccgcctacacggctggcctattatgccgccgctgttgggcgtctacgacttcaccgccggcttgcctccgtcgccgccgattggtgcctccgcctacacggctggcctattatgccgccgctgttgggcgtctacgacttcaccgccggcctgcctccgtcgccgccgactggtgcctccgcctacacggctggcctattatgccgccgctgttgggcgtctacgacttcaccaccggcctgcctccgtcgccgccgactggtgtccccgcctatacggtcggttggtcacaccaccgttgatgggcatcgtcatcttcaccgccggcctgcctccatcgccgccgactggtgcctccgcctacacggctggcctattatgccgccgctgttgggcgtcttcgctttcaccgtcgaccgccttcgtcgccgccgactggtgtcttcattgttattgatggacgactttgttcccacattggccacttctgccatcaccaaggggaatattacaaagctaagtcatcatttattttattctttatatgatatttttccttttcctctgcctcactacaccaattggtcttccattgagtagtgagtcgggggctacagatgttatatcatattttttataatatttatcttgattgcttgcgacataatctgagtacaaaagtacctatcgagttatggagttctatcttcctatgctttccgtttggtttgccaatggatggttgcctttgggccgattcctagcacccgggggctcgttggatggaccgagtaacgcaaggtgctaagtattattcggaataaatcaaaagcatagagatgagataaatttattttctgctcttaataattgcaaaagtacccgagtagtaaactccgatccgtgaaactttgttccattaatgacgaactcatgtcactcatatgcatgtttgggaagtgcttaggccgactcccagtgcttggtggctatgactagttgggcagagcgtttaaacgtaatgagtcatctgctcggggaaatcaaaattgacaagaggagaaatacatatttataaatattttaaaatacttgattttttctcgagtattatatttatatcagatactactcatcctatatgtttgttctgcaggatccagatccagatatgcataaaagggattcatggctttaagcttatctcttacgctctaggaatggatcagtcagaacatcaccaccggccgcctcgtccgccgccgactggtgttttcgcctgcacggttggcctattatgccgccgttgttgggcgtctacgtcttcaccgaccggcttgccttcgccgccgccgactggtgtttccgcctgcacggctggcctattatgccaccgttgttgggcgtctacgtcttcaccgaccggccgcctcgtccgccgccgactggtgtcaccgcctgcacggctggcttattatgccgccgttgttgaccgtctacgtcttcaccgaccggccgcctcgaccgccgccgactggtgtttccgcctgcacggctggcctattatgccgccgttgttgggcgtctacatcttcaccgaccggcttgccttcgccgccgccgactggtgtttccgcctgcacggctggcctattatgccaccgttgatgggcgtctacgtcttcaccgaccggcctgcctccatcgccgccgactggtgtttccgtctgcacggctggcctattatgccgtcgttgttgggcgtctacgactccaccgaccggcctgcctccatcgccgccgactggtgtttccgtctgcacggctggcctattatgccgtcgttgttgggcgtctacgactccaccaccggcctgcctccatcgccgccgactggtgtttccgtctgcacggctggcctattatgccgtcgttgttgggcgtctacgactccaccaccggcctgcctccatcgccgccgactggtgtttccgtctgcacggctggcctattatgccgccgttgttgggcatctacatcttaatcgccggtcgtctcgtctgttgctgattagtgcccttacctctacgtctggtttatacagctaccactactgatggacatcatcatcttccgtcgccgactgattatgccgccgccgacttgtgcttttatcttcacaactgcgcgtcttcactaccggtttgcttctgttgccgccgacttgtgttcacttcattacggcaatacaactttgtcatcatggtggagcgacttcatctttattatcttcggcaccggcaaactctattgttgctacttcgcaagttttactacttcaccaaccacgacgtctttgtgaacctcgacatctcggcatgcaatgccatgttattttactacaacaagtggctctccaatattcaggatttctacttggacatcttcaacacatatcttcaatcaagcaatgactattcgacgacaagaagctacagttctcgactctatgttcagttgtttcccaactaatcaaagagtcaggggctacacaaatataaggctcaaaatttgacaaattttatgtcaagctgaagaaatcaattcatcaaccaacgagtcaactccaggagtcattatcttcatctttgcttcggagcagacattctacttcaacaacttcaaatatttcggtttggacgagttggacaacaacaccaactctcctccaagtgaagcatctacaacagctataacattaatttgatggattattgtcactgacatcatcaccagcacctctgcttcatcggccctgacatctccgctgttgctaatggatgattatgttttcgccgacttattatttcaccttcatggttgacctactatgcaaatgctgatgagcgtctttgtcattatcattggttgctacactgctattggctggatcaccaacatcgtcatcttcatcaacatactgtcaagcctcttcaacattgcccactctactactgtttgatgagcaatttcgtcatcatagtcgatcatctctgttgctactgacggttgcctttgtcgtcgtcgactattttcttcattttcatgattggtggatttcgttattgcctttgatacgtgtctacatcttcaccgtcggcttgctttcgtcaccaccgactggtatcctcgccttcacggatggcttattatgtcgccactaatgggcatcttcatcttcttcaccggctgcctcatctgtcaccgactgattatttcgccaccatggccgctcaattttgtcgatgttgctggatgccttcatcttcactgttggctgacttgtctgctgccgattggtttcttcgcctccacggctgtgcaacttcattatctttgattggtgtcactgttttttactaccaatgacatcttccgttacttttgatgagcaatttcgtcttcatgttggtcatttcatctccatgccgactgcgtcagctattgccaataaacaattttgactatgacagaaggacaagctatatgctcaggggctcatcaactcaagcgtgaggattatatctccaatttggacttgttccggatacattccacatggattcatagtcatgagtctattttctatgctcaaagactggaccaattattattccccgtaagggctatcaaccgaatacttgcgccagtcgggattcaattattatatttattttggagtatcccataagggataatcatttagatcagaagctattcatatgagctacgcttgatctatattacccggaagatttattactcgggagcatgttatatgcgtcatcctttaaagggtgtcgaaggcatatgttttggcctaggcctaatatgtctgcagcccatattttcaggtgtggcctgtcacgttcttttagggacttaggcacttttcgcttaggccaaagtgcgcgtgatcaagtgcccaataccttaaaatccttttataccgcagttactcgactttttaggagttggtacgatgcatcttaaaatgtgtcaaacagtaaagctttacatagctgccccgctgacttttttatatagtcaaggtgctgtttgggtttatcaagcaattgattggatataatatcattgctttttgccacgtaagtgtgcatttttattgaccaatattatggcttaggctgattatatattatggtcatttttctaggcggttggtaaatcctttatgagtttatttactcggattttacaccacatatgccatatatttccaggtgtggtgaaaccatgtgtcttctagggacttaagcacatctgttaaagcagtgtgcgcatggcgtatgcccaatactttggaaatttctttattcacaatatacgagcttttttatagctattttggtatatcactcggatcatgttatttggaggattcacaccgcatatactatatattgatatcaagtcacttggttgattacgattatcaaaaccacttggttggttggattatttattccttgactatatgcttggtttgttcaattaaccacattgtcggggggctacacctattaggtgcatctattcgatgcacctgactttatttttcagccctccacagtcttcagatttggtaaaagtactcgggagaccatgacaaagatgattgaagcactcggctttggagtaatctggttcgagagaagattatcttttcgactgcgaaggtctcaggggctactgtggatattatgggtaccccatacccacagggcatggttatccgactagttataggggataacttatatctatgtaatatgtaacagatcatgacttgggtgttacgtttccttgtatattacggaacggcctaaagtcctgatttaggaaaccgataccgtattggttaaggtttctatcttgtaatcctgccccccatcctatataaggtgggcaggaggccctctagggggcagatatgacataacctgatcgtcagatcaatacacacccggcggattcaaacccccaaacaggagtagggtattacctctcattgagagggcctgaacctgtctaaatcctttgtctccgcatccatccacttttaggtctcgtgcgctacccccttttattattgccgaaatcatgtttcgacacaggcgccgcagtcggagtactccggcgccgccgacgagttggcgccgcagaaggccgacgtggagatctggtcgggccgctcgccgacgaggacatcgacgccggaggaggaggaggaggatccgttcgccaccatggctggcagcgtggcggcgacacgccgcaggttggcctcgtacgagctgttgggagcgaaccgaccctgcaccatcccgcacatgtggaacggcgggcggtggccgccgccgccgtcgtcgaggacggcggcggcggcaagcggcggcgcgaccagggcgaggacgaggaggaggatcgcggcgagagtcatcgccggagaagagataattcagccggagtagtagtacaggctgctccagttcagtaggtatacatagataagcggggttagtgttgactttgaccgttgactacaaacctccattgtccattgactagtcagcagctgccaactaaagagctttcacaatgcattatattagttattaactcgatcacttttgatctttgcaatgatgaacatgtgcatatatactccacatatactattcctatagacaaagattcgtaacctttgggttgcacatgctattgctagatattaatattttagtagtattttaaacgtgttgtttactttcaaggctgttcatattaaaataagagttcacatcagttacaacttaccctctctattttaaaatatagtgtttttgaattttcatatagtcatcaagatcctagtttgacagataatatttataaaataagttattttaaatagaatcaccattctatttctagttgcatgatttatttcatttggactctacacacatgatctacgttcacgacaataggatctaacaaattaatggttagatctttctaataaaagtagtagcttcttagaagtaactaatctaattagtatatgtctgtatagatagatagatggatggatggacacatatatcttaactcttgaaaagagaatcccaaaacataagaagaatgagccatatcatctaataaataataaccgttagatcaacaagcaaacaaaacaagagaataaatttcagccattggataaaagagggtgttatagagctttccatgtctccatatgtgggagagggatatagagcaacgaagagacgcataagaaataaagaaaaaatgtttgtatggttgagagaaatgataaaaacatatatttctatcttaaaacaaacatatattttatatattttcacaacaaattcttcagtgacataatatcagtaatagattattcttaaacactaatcagaaaagatagtgatagtcacacgcatgcgcgacttcatgcactagaatgcaataaaagatgaaattagagatatcaatataatgaaataacatacatgcatggatgccttaatgcatgcgaccacgatcaggggtatgttgtgacttcggccctgtttagatccttcaaaatgacaaaagttttgccattttgaagcactttttgtcattttggacctaaacactagtagtaaaacttagcaatttggcatttagcatttgctagtccatagtagcaaattgtgccaaaaagtgctttaggactactccctctctctttctctctctctcactttagtactagaatggcaaaagtttaggatgcatctaaacaccaactagtacttttgcaataccaaaacttttgccatttaccatttgccattccaaatggatctaaataggcccttcattgtctgatctctaatttatatatctccacctgacaaacatgggaaaagatgtgccctgtttagatcctccaaaatggcaaaagttttgccattttgtagcactttttgtcattttggatctaaacactagtagcaaaagttggcaatttggcatttagcatttgctagtccatagtagcaaattgtgccaaaaagtgctttgggaccactccctctctctttctctctctcactttagtgctagaatggcaaaactttagcatgcatctaaacaccaactagtacttttgcaatgacaaaacttttgccaccaaaacttttaccatttgccatttaccattccaaatggatctaaacaggcccttaaacattcttcttagaaggaaaaagtggctacatctcccatggaaaataaaatatacatcaataagaatgtgccctttctttgtgagcgatcagtcgacttagaaacacacaagtgtaacgccctgtatcatatcaattggaatacgcatatcagtcaacaagcgtctaaccaagttgataaaacagtacggagtagtgatctctggttgttataaaggagagacctgattcgtctacgttacatgcaggtctataagatgtaaacaactcgacatattgtacactatttgtagtgaaattggtagcaaatttgttgggaataaaccaaattaattaccagatgaaacatacatacctgaactgaacttacatatactgatccacatctccaccacctatggcagcagagagcagactggcagggcctctcctgcgatcgggacgccaccggtcgcaggatcgagacggaggcggcgatcttgttgggtctctcgccggacgccggcgaggtggccgaggaggaagaggatccgttcaccttggctgggagaaggagcgtcgcggcaattgatgagggaaaaggaggcgatgtgtgccacctccaaatgatgacccatacgagttagcttgggtgatcggccatgttcggcccagaaggcttacgcaagggcgcaagccgatggcggcagatgactatggcctatgggccatgtggccagcgaattctcttggcccgaggcaacacaatttgttagctgatcgagagcaggtataatagcaggctataagccagctataaatatattttaaaaagataaaggaagagagagaagaacagcggactacagatctgtagccagctgcagcacggattataagacgtaatgtgtgtatgacaagtaggaccagatattaatagtatagtaagcaactatgtactgtaagaattagctattacattggctatagatgatttggagttagtagtgggctatattatcaaacttgctatgagacttcggtgatcgatctttgatctaaaaagccgagactacggaagtacggaactgttgggatgcagaattgtcaataggcaagtacaagatccacccactgtccgcattggagaagaaatgtgagggggcagcagcagcagggcgagacaaaagaaccaaggagagttagggtttagaccactttgagcaattttattgtaccaaaataatttcatgtaaattttggagcttttaataaataaggtaccgagatacactaaataaattttagatatagaaaatatgataactataggtacccttgtaaggactacgaaaccactcttatagtttatataccgcaaataacaaatctagattgccaggttgagatttaattgttgaaattcataccatctttcaaatggttgtttaggacatattttgtggaaaggacttatctgttgagatgatgtctataaacggatcgtaccgaagtgacaaatagacttagctagactcatatttttcactaaatagaattgtgtcgtgagcatgttcacattgtgggcacgagcacagttctttgaggtggctatgattaccatccaacactttaaagaagctgaagaaaataaacgcattttagccaacttagtaaagtaggaagagcaaaactttttaaaaatgtaacgagtggtctttaaatatattagaaagcattagtatggattaaaatataaagaaatttgtagtcctaattttctgggaccatgttatgttatcatatatttattggtaaccatgccaaaaaaattattattattattattactgctgctgctgcagatgagaggtggtggtgggatgaccttgtgtattattttgaaagggaaacacacattgtcccatttttacaaaggggaaaatccgtcgatttccatcagtctgtactgtactgcattattttctgctgacgacaactaccaagctcacacgtgctccccccgcgaataaatcgtcaaccatcatcaagtttcgcttcgcattaacacggcttgaattaatagtcggccgcacgccacacctaacatgggggtgttcgtggcaaaaggaaaccaaccatgcaatcgacaccccaaaccccaatttgcatccaaccatccttgtactttcttttcatccatcaacaaacactgtacgtaccagctttagtcgtacactcttcacacaaaagttgtacaaaagaaaaaaaaaaaacaccctctttgttggctcagccgctcaggtactcatccccatatacgagttgtctctgtacaacgacgtaacatccatacggtgatgcaaccatgccaaccaccactgttgcgccctgcctatcttcgacttcgatcgaccacaagtggagtacactcactcacagatgtctcacgaaaaggacgcgttggccacatgtgaaggccagccagcgaacgcgtaaacgtaatgatcgaaatgccggtgagatcgatcgaccgctattatctcccttcctcgatggtggtgatggtgacgtcgttggtgctgcacgagtcggtgaagcgccaccgcgacggccggaagccgccgccggccggcgacccgcggccgccgtcgtcgtagtcgtcgccggagaccctcagctggtagtgcggcggcggcagcgggtccggcagggggacgccgtcgctgccgagcatcgccgccacgtccgtcatcgtcggccggtccgtcgcgttgtcctgcacgcacagcaacgccaccttcacgcaccggattatggccgccgcctcgctgccgctgcactcgcccagcgtcgggtcgatcagctcgcaccctctctcttctctccacagctgccacgcctgacaaaaaataataatatattttttaaaaaaactctatgtttgaaatatataaatcttttatattctaatagatagtagtatttatttatagtacatcttttaattattagtattggaattcataaattaatagctcagattatattatagaagaatcagctgatgataatatatataatcggaatataattgtaacagtagagagcacgataaagttattgaaaaagatgccaagttgatcaaccaatttattaatcctcgttagtgatgactaatcatgttgctagctagcgtaagtcaaacgtagctacagtgtagacgtgaaaacgtttcgacataattgataattgtacaggataagccgcgtgcccatttattaatccacggacgacaagtacggttttgattaagaacacacacacaaaaaggtcgtactagaatagtaacacgccattatttcagcgagagagaaaaagaaattaagatagaaaaaacaacgtaaaaacgtacgtatccgaggaggttgacgaattcgccgtagtgctggtggccgctgttcctcttgccgctgacgatctccagcagcagcacgccgaagctgaacacgtcggacttgaccgagaaaatgccctccgatgcgtactcaggagccatgtatccactgcacacgtgaacaccaaaacaacaatcaataccactagctagtaagtacagtactgcaggtacctgatcttatcctccaaaaataaaggtacaaacacctgaaggaaaacatcacggctattaatcaatttgcccagccagttgacatgctaaaacttaataccagattaccagtactctctccgttttaatttacttgttactttagtttatttaaagtcattttaagtgtttatatagtttaattagtaacatgtcaattatatattataaaaattacatctcatggtgaataaaaacataaatattatgatgctaaactttataatgttttagtaattgatggttaaatttacgaatgtttgaacttaaaaaaaattaaaatgctaagtaatttaaaataggagtgtaattaaaatgataagtattgctacgatatatatcattattctttttcttactaggtgccgacgactctgttggtgttggcttcagtcatgttggagccgaagatcctggccatgccgaagtcggagatcttaggattgaggtccttgtcgaggagtatgttgctggccttgagatcgcggtggatgatgcgtacacgtgagtgcttgtgaaggtagaggagcccctgcacgacgccctcgattatgtgcagccgtttcttccagtccagcaatggcccttgctcctggtctacatgcgtgaaaacattatcgaagattagtaaaacgttgacggtaacaaagtcgttcagaagtaatccatttcacttttttttacttgtttaattaggaaaccatttggatatggaaaccatttggatatggaaaccatttggcaatatacattttctttcctaaaccgtacttgaaaaagatagaaaggattaggaaaatcggaagatgagtaaaacgtcgacggtaacatagtcttttgaaattttggcacgttgattttttttaacagcagtttgacacgctgtttgatcaagtggactacaaacaaaagtaattgtcttttccctttttacctgttatatattcagggcatttgcttttgtgttattgtttttaattaatcgcatagttatgaaaatgataaaaagtttttaatctataaaaaaactcaatttcatatctcaaatattagtattcgacgaacatatgaaaattacactaatttagtcctaagcttgagaaaattttagctccgcccctgtctactccatccgttccgaaatataagcatttatagatatgaatctacacaactgtatgtctaaattgtaaattgttaagtataattttggacgaagattgtattgaacaaaaagagagaataataccgaagatgaagaagtccaggcttctgttgggcatgtactcgtagaccagcatcttctcctcctcctgaacacagcagccaacgagcctgacgaggttggtgtgctgcagcttggcaatgagctggatctcgttcttgaattccttcagcccctgcccggactgcgctgccagcctcttcaccgcaatctcggctccatcagacaactcaccctgaaaacacgaacagacaaagcaaataataatcatgcatgttagcatcaccaagtcatccgcattttcgtcaacattgactgctaaacaatagggacagcaactatgatgccgcagattattagcatatatagcgacaaccattcacacattttggtcaaaaatcgactgtaaaaacaaaaattataggagtttcagataacttgccctgtagacaggtccaaatccgcctgtgccgagcctgtgatcttcagagaagttgtccgtggcagcggcaagatcgccgaagtcgtagagcgtgaaatcggtgctgctctcctcggtcctccacagcttcagtgcctcctctgtcttggagctgttcctggaatgtgcttccagctgccgattcgacttcctccctgtgatcaatgatggattggacatttgtggtttggttgattaattaagaactttgtgatgctgaaatggagggagaaaatgatgttcattatgagagggagttagtggcatcgtgttgttaccgtctcctttccgtagtttttttatcagtaggaggcagccgaccagcatgaaacagaagaccgtgattgacacggatagaacgataactaaggtcttcctgtggttggttcctgcataaataaagaagaaaattagtagtgatcatacagagattgtttcaatgttatttgtagaaaagataatgcactgacagaaaacaccaccattaagtggttacgtatttgaccattgtgagctcacaaccaaacatgacagtaatagtaataataatatgatttgtctttgccaattcaaacaaatttatggggcgttcagatcgtagtcaaaataaattttaccaaaatttgatatttttggcaagttgacaatattactaaaattttagcaggattttttatatatttaccaatgtttggcaacaactaaatataggcattttttaagtaactttaccgaaaaaaatattatgattgaaaatgatataatctgaacagcccctatgtaacaaatctatctgtttacaccttatactaattaagcactatgagatctctcatgttaaaatgaaagatctggttgttgattaggtggattatattatcatgccatagattgtattcagaatttgagttaaataaaaagatgacattaaaattaataccatgcatataagctggacaatcatgaaatctcttattaatagtatataaacgtaacccccaaattcaaaattaataattactactagcaagttttaattgatatggacccttccttcaatctaagctccaataattccaaaaaaaaaacacaatcaatatggtcaaaagtttaacatttataacaacgtacaacaatagtagttaagctccaactatagcttttgagcaaatttattcggaggagaagaaatgatcgtgtgtgtagcatatgtgttggttgttaccattgtttgcggttggtgagggtgcgacgtcttgcaggccgatcctgacgtccggcgtgccggcgtagaactggtagctctcgtaccggaagttgcaccggacgccgaggatccggccgccctgccggccgtcgtaccactgccggttctgctcctggagcccctggaagcagtgccagcactgcgccggcgacaggtccggcgtgcactgcgccagcccgtacaccgtcggcagctgcgggttcacatacatcacggcgctcgcgtaccgccgcgccgacgagttgtacgacccgtacatggccatctccccgaacagcgtccccaccagcgacaggaagaagctccgcgtcgtcgcgttccgcccgtcccacccgtagtaggtggacgcgttcgcgtccagcgcgttgatcaccggcgagttgtcgtccggccgcgacaggaagtcgtcgccggagtagcgcaccacgcacaggtcgtggtagtacgtcgcgtcgcggtcccggccgcagagcgcgcggaggcgctggaacgcgccggagacgcaccccgcgcacgcggcggcgtccctcatgtcgccgcggcacagcgccaggccgaacaccctgtcctccggcgccgcggcggcgcccacggccgccgacgcgaacagcgaccgcgacgacgacgcgttggcggggagctccgccgcgaggagctccaggttgagcccgaacgcgctcccctccgtgaagttgccccgggtgccattgcacgagtactccgtgtaggcggcggcggcggcgagcggcggcgagaggaagaagaagaacaagacgacgagaagggacatggcgtgtcctcttcttttctgattgcttgtgaacagaagaagaagaagaagaagaagagattgtttgattagtgcgtgtttctttctcagctttctccgtagttatgggctctctcgatctctcgcttaagtactttgggcgatcacacaagtcaaagggcttgaaattaagaaggtggttggcaaatggaattgtagccgtgatttgttttgttgtattagtcaaatcatcaggctgctgcgctgttgctggaaaatgttttttttgttctttctttctgaagcctaattgttgtgctaaatattgactcatagattggcagcaatggaagattctatgttactgcagaactaggtagtactacatgatatacatctgtaccacatggtgtgcactgaatactaacagtatttactatgaccatgtcgtcgaatgttcctggacgcaattaagttttctgttgttcctagcatgacgttacatgcgtcctggttatctgcaaacagttagagctggcatcagccatcatcaagtgctcaacgccgccggtgtcctccttcgatgagcctcagcctcatctgcagatcatcgtgacgagtattgcagataaacatcacggtgtgcaagtgcaaatgcaatgaattgcaggttttgcaactgcatttttgtcgttggaacgatagaaatttgaaggaggagcaaccagccaaccatctgaacccctaagtgtgaatgccggcgagcactgcgaactgggaaggatgcagatgatggtgtcgcattattaggttaattgtccgatgacgtgttctattggccccaccacaccacactagctgatctttgaccttaccatgacatgtataatgtgttgaaacttgaaaggcttcaaaacatcgctgttgctgggagttttattttcaaaagagaacatcgttatcttattttctactgcaagggatcaaagtcataatagtttggacattgacagcaaacgggaagtttggagaaaatatcatactaaattcaattacagagaacaatttatttgcgactactctacaacacagaaatagtttgggaaaacggtgacaactgaaaactaatgctagatttgcatagctttctttgcaggggatgcccaaatatggtttaatacgccctttcatgtggccaaaagaaaatatccaattatccattgctctttctcgcagcgggtctgaaaggaagtggagaatcggatgtaactaccaggtctcaactctcaacaccacaataattattgggaggcttggtcactttgacagtaatttagaacagagataattgaagagaattagaacaaaatttatgccattgttgatttaaacatgttgtaacttagaggaattcaaagtggaagtaatttagaatggagacaattgaagtgattgatacttgttggaacttaagaagaacataatactagtttttatcatggtttgcagcaggtaattgggaaatttcagaagggtgatcataaaaggaagacagtgcagaatagtttaactattttatcactttttggttacccatctttgttatctttcatttctagaatgttctgcagtttcttgttggtgcaccattgtacgtgctcttgtttgcactctcttcttctccagcaagtaagggcaggggaagcaatgcccaaattaatgagcattatagatgaccaaacaaaaacgagtggaaatgatccaggagacaataagctgcatgggcacattgccgcaacacagacaagtagttcagaaagaacaaaaggggaaaagaaggcagaaataaaagaagtacatatgatccaacttccaaagcatttgtcactgttccataagctgactgctggtacaatcaaaaggtatgtcttgttaacacaggacataaattttaactagcatagggcatagggtaaacaccagtgaaaaacaagacataaccttcagaacaggacataccttccgaaaggccaagttacgtgccatctatgatttcacaacattcttcaaaacaacacaaatgagccatcacacaagtacgataaaacagaaattcataattcatattagagattggctgctgaccctaagcctgattctcattacggtacaaagatggttttgcaataacataagtggagccgcacctctgcatgttagcaccacccatcaggtaatgactcagagaacattggaacatatggtaggtatggcaggcatgactcatgtccgagtttgcgtatgacacggacttccttgcgatccatttcatacgccatcaaagtattgtgccatccataaacaaagaagatcaaattgcattctggatgaactgcaattacttggtagtcaaaatctaattggtatttctttcgtccaaacagattaattgagctaacggtgtgctttaagatccaattatctgtatcatagtcttcaagaaaccaaattgacagttcgaggatatcatttggatcaacattaaaagcacacaagcgaccctgagtttgatgaattatcccaatatcaccatcaggatccggcatgggaatcttcctccatttcttcccctccatgtcaacagccacaatatcgcaagtcgtgacagaatgcagaaaaccattaaggaaaacccttgtccgatcgaccggaaggctaaccataacttcatcatcccatccatttacatggagactccataacccagttttagacgaatagatcaccacccctgtgaccagtgcgtcgtattcatcttcatcctccacatactcttcatcctccacatactcgagcacatggaaatgcgacgagatggctggatcgaaacacaagcaggcggtgcggttctcgtcaatagcccagttggcgtccggcaacatcacacattccccggtcgcaggattgcacacagcatactggaactgcaaagtctcacgagacacgtggcagcggcagaggaggaggccattgcagctatccaagatgacgacgtggtggcactggggcaggaaggagaaggtcgggcagacgagaggcatgcctctcccagtggcgttggtgaaatggcgcgccatgtgcgggcagcgctcgtagtcgatgctcttgtagaagaagcccgatagcgtctgcggcagcttcttgcggtgctcgtggtcggcgatgagtttgcgccatgacttgctgacgcacttgaagcggcacacggagcggacggggaggcggcggaggatctcgacgatgagctcgtcggtgatgctggccgcctgctggggaggttctcctccatcgggggtggggtggaggagaggaagtcgtcagcctgcaaccgcgggaaaaggattcaccgcggcaagagcagatcaagcaggtgagcagatggggattaaatcaaacaagacatcaaaatggtgaagaaagaaaaatctggctacaaatcgacatcatgggttcgttaatccacctactaaacgaactaatctgagatcaggaacctaccgatcaaggcagggaagagcgatgctgccgcgcgcgtgacttgccgctcggcctcggctgacctgtgtggagctcgtcggacgggacacctggacggcaaacctagcgccctcgccggttaaggccaaccattgcgcccgctaccctgctgcgatgtgcgcccgtcacggagaagaagagctagaagcggcggcggcggcgacggcgccgagacccctagatgccccaaaatccccaattcaatgtctgctgggacattggttccaaattctagtcaccctacgccattaagaaagttggagattacgtgtgttccaaaaaaaaacttttgagttacctggcatgagacaaactttcttttgcctatgcgccactttggatggaatcagcactaacggagacaaacggaggtttcaaagatctattttacccttgctaatggatggaatcagcattaatggcacgccggcaagggccgccattagcgccgaaagacaacgttattggcgccgacgaccggcggcggcggcatgccggcgacggcgtgccggcggcggcgacgaccggcagcggcggctagaggcgcgccgccggatagacgaggcgaggcggcgtgccggcgaggcgacgaccaacagcgacggcgacgaccggcggcggcggcggcgtgccagcgaggcgaggcgactagagaggcggcgacggataaacgaggcgaggcggcggcggcagatagacgaggcgcgtcgccggatagacgaggcgaggcggcggggacggcgtgccggcgaggcgaggtggcagtggcggcgtgccggcgacggcggctaggctagggcacgggagaggagtagtagagatgaaaatgcttcaggggcaatttagtcattttcatacgtgggtcccacatgtcagagctcattctctaacagaaggtggatggaatggcacgcgggtaaacgaaagtttgcgtcatggcatacaggtgactcaaaactttttcgtggcacacgcgtaacctccaactttcttaatggcataggggtaaaagactctccaaattccacttgaatcgggcggtcgggccttagtttgaaggaataagttcactttgggtccctctatttatcgcccaatccaattttcatcccttcatcgcaaaaccgggtacgacaggttctccaacttacgaagccgtttaaataaggtccctcagcagtattgtgcccagttttggctgaggtggtgcctacgtggctaattttgactaggtctttgtccaacgtttcattgacgtggcgattatgtgacaattagatcaaaaaaaaataataaaatctatgggacccataagtcagttgcacatataaataataaaaaatggtgggcccatgtggacccatacgtcatcctctatctctcttcccctcctctctctctccggcggagtaggcagtgcccggctggcgaagcgggttgggcggcggccggagcgggctacaagggggtatcgaggatgacgtgtgggtccacatgggcccaccattttttattatttgtgtgtgcaactgatatgtgggtcccacgggttttattattttttgcgaatctaattgccacgtaagcgccatgttaatgacacgtcggacaaagacctagtcaaaatgagccacgtatgcgccaccttagctaaaaccggacacaatactgccgagggaccttatttaaacggtttcgtaagttgggggacctgtcgtattgtcacaccccaatccggtaccgccgtacaacggcacctgacaggagcgtgtcgtaggaaaaacggcgcgaaccgcttcctacgaaaccgcgatcacagtaccagtcccaggacatagtactggtacccacggtgacaaatatgaatcattgcaatccttaaaataaatagaggacttatttaccttaacttaggttgcagctcaaaacagcctgagaaatgcaaccgacgacacagacgaggaaacaccaacaacagcagcagcagcggaaccaacggactaacacccaacaccacaggcgacggctgggaaccaggacgaaaccctattcttcacttcacatcatcttctcttcaaggcggaggaactataaatatttatatagagcaagggtgagtacttccgtactcagcaagtcacgggaatttaggtgtttaatgtaagcttggaagagaggcaaggttgttttgcaaatcctttgtttgaaatcattttgaaatcgctaggtgattaatttctttttaggtttgggtcaaaaagagacttgcgtctcgattcaacttaagagatgcttttcaacagctcaattggtaatgtaccgacctcccaggtcagatcattacttctcggctcccagaaccatttcacttgattaagcggctcccagagcctttttcattttctcagactcccagagtccagctgcctagcagcacaacaatccgcttccactcgggaggcctagtctatgatgcccgtagacatcccgaatcacacagattcgtttccgaccactcgagtcatccatctgccacataggctgattctggttacgattcccaatccacaataacttttcacaaagcacaggcaaacaaatctacgcaacgagaaccacctcacatccgcccatgaccgtgggcacggctgttcgaacagttagttaacctctgcagaggggtacactttacccacaagatacgaacttattccgaacacccgtcggtatcggaggttcgcaacaaagcctttcccaagccgacccagggttacctcatgccacatagaaggataaaatccttcacataaatataggccatttcagttttcgcaaatcaaactccaaccacctcgatcggtaatctggcaagcttcgcgttcttgccttaccaggaacccgggttggctccaaccgaccccgcctcggcgttccccaactattggcatgcgaggtttccctgaaccgactagttacttagctagggtgtcccattccaccttgtggttgcactttgttatgcttgatgaatttcccacaggaatcggtccttatatgtgaatacggaacagtgccacgcaggcacaacccccgcatcgcgagttttcacaattcattttatttttaaacacaccgacaccacatgtcgggttttcaaggcttctcaaacccattcacaatttttcgacaatcaacggtgtatgtgggatatttggtatacgcgctcagagagcatggatactgaagtaccgcaaaggtggagcgacaaggaatctggatagtacaacctacaggaattagtgcaactactaggtaggtccgtcggtttggcacgcaaaccgaggccaagcaaattaagtgtgtgattctaataatgcaagttacaaacaaaataataatgattttccaattataggagcaattggtcaaagggagacttgccttgctcaaggtcttcacggagcttcacgaatcttcgagaaaacccgcgatcgacgaaaatctggtaaccgcaactatacgcaaacaaacaaaaacctaaacaaaagaccaagaaaaagaccctatttagactaaataatagtgccattgaatagatctcaattttacgaaattactggaagttgaacgaagtaaatcggatgagcggttcaaaagatatggattttcgaagtttaattggattttccggaatatgagaaatgatttattgcaattctagaataaagaattgatttagggaacaagggaaaaaggatttattgaattttctggaaaagaacattctcaagaatattcttttatcactcattgacatgtgggggccaacatatggcgagagagaggtgaattgggagggagcagatatagacttttggtcactgtgtttggggagggagttataatggacttcctttctcttatcaggccgaggaggagggtggccgatgggccaagcccacaagcacgggagagagaggagggggtggctgactgggcgctgacggggcaggcgcgaccggtcagcttgacttggtcaagccgatgtggctgccacgtcggatggggagggagaggaggctggcggcgcatcggacggctgacggcgcgcggcggaatccggcgaacggtggcaaaccggagtgggcggcgggcaccggaagcgagagggggtcacggaggttccatccaccggctcggatgtgggagaggaggcgcgacggaggccgtgcgacggcgggatgggtggcatggcgcgggagcaaaagaggaggccggcggcggaattggcggtttggggtggttcattggagctcaaggtgggtggcggcgaggggattcggcgcgggaccgaccggcggcgcgcgggcggcggcggaagcaaagcatcggcaagggcgcgatttggaggacgaacgcacaaactaccatgccccagtgctgtttaggagtcgctagaggatatagacgagaggatttgggcggggagctcacccacgagcgggaacggcggggcggatggagtcgcggcgaggcagacgcgacggctgggcggcacggcgcggagatggcgcggccgggaaagcaaggaggggcgcgagggactccgttggcggcgcttggccgagcggcggcgcacggtggcgaacgcgacgccgaggcgggcgctccgaggaaggaggggacacggggtggaacggcttggtgtcggtgcggcgttcttggccgtggcgacgaaggaggcgggggtagtacttcgttccaaggagcacggggcgaagggggaaaggattgtgggcgtggggttgggattttataggcgaagaggcgctcggctggcgacagcggcgttttcgtgggcgatgcgaaagcggcgacgacgtggatgcattgggcggcgaaggcggtggatcgtgcggcggaaattgaaccgcgggagcgggaggagcagcgccggctggcgcggggcgagctggcgctgggtcaaggtgggggcggcgagctgacggctgccgtcagcggctctgccttcgagcgcaagcggactgtaacgccccgattttcgttcgggattaaaaatcatttaataatacattttctggaaattaaataaaagttaaagcaatttaatcaagtgaaataatgggagaattaaaatttttcccttaaaaatcattggccgggaatattttgtaatattctttgtgccctaatgtactctccggaattttccgtgaattttcggagctcgagaaatagtttcaataacacaaagatcattgcatcaaataaaataaaaagaaaacaaataaaatttcccccttcctctctttgggccattttcggcccaagtcttctttcctctcccgcggcccgcgcgccttctccctctctcgggccggctcccctctctcttggcccgctcgcaaaagtctgttttgcgtccctccttctctcccttcgccgacaggtgggaccggcggtcccacccgtcagctcctcctcctacctctcgccggccgatcccaaccgccatagccgtccacgtcgccgcaaaatccggcgccctcccgcacccgagctcgcatccaacgacgtgggcacgatcccctccacgtcctccaccatttcccccactctccccgcgaaaatcggcgccggttaacccctccaccaccccacgtcggcgccccacttcgccggccgattccgccacgtccggcctcgatcccgccttcccgagcccataaaaaggcatccccgtgctcccctcatccattttccccattttccccaagccgccgcgccctccctcgctctccccgcgccgagcccacgcaccgccgctctccggcgaactccagcagcgccgcgccgccgctcccgtccgccccgcactgcgccgtcgccctccccggcaccgcagtcgccgtgcgcaccccgtccaccgctcctcttcgccaatccaccgccgcaacgccgcttccaccgccaccccgagccaccttcgcctttagccgcctccatccgctccccgccggcgagcgccgcctcgcccggccgtgcttttgcctccaacggcttcgccgcgtcgtgccgcaccccggcatccactccgtcctccccttccacccccgcagcaccattcccaccgtgcaccgagccacagccgcctttcgtcacctccagtcgcgcgccaccaccgctcccgtcgctgccgcgctgcgctaccaccgccatcggcatcgccgttcctcgccgcaccccggcccctactccgtttcccctccctgcccctggaacgccgccgccgcgttcaccatctctttccgccgccagccgcctccctgtggtcgtctcgccgtcgccgtcctcggtgagaatccccaccgtcccttctcctttttttcctcctccgccgctccccgtgcccgctgccgcgacgcgccgctgtcgccggcggtcgtctggccgcacgccgccgcgcgctatcgctcggccgagccggtttcatgccgtgcccgtgccctagccgcgccgcctcgtggccgtccgatcggcttcgggccgatctgggccatccacgtggtggacgcgcacccgaggccacgtgtggacttggtccaccgtgcgccgcccctttgtgccgctgacgtgcggggcccgcctgtcggcgctggtttccccttgctgacgtcagcgaggtccatttcctttgtaaaaataaataataattgcgcaataaatcgagtttaattctagaaattcattaaaatggctcaaaacttctaaaatccatatctaattcattcgaactccgaattgagctgttcaacttgcaaaattcatctaaaattgagctctacatgtttgtttactttttatgtactgtttccttggtttttattagagtttttcctcgttttgcgtgccagcgtgtagtttccgtcgtttcggaagtccgcggtcgcgaggaaaagagttcggaagatcaaagtgaagaagcaaggcaagtcacacattccccttgagcatgttgatcctaatttacaaatgttttaccgtttgcaaataaatatgcatgttttgctaattacacgggatcagggtttacctatctgctcgcttgtgccatgtttacttgatatctgttctttgtcaaccttgggtaataaatcgactagctcatgttacttatgtgacctagctagaactatatgcttagccatgcttaattactactagctcagttgatggggtaattacagtattagacctttttagtatcagattgagctgtgtgctcgagacacctggccatgcttcatggtcgtaattatccaactaaaatgcgactacatggtgggctgtgggtgcatggttttgctggtcgcacccatggcagttaaggaccggttcgcgggatgccctggaagaacttatcgtacttaccacaagccagcgtgggcaacggctgggcttgtagtgtagctttcctctagtcgacgcatccaggcaagggtgggcgtgatggagcggggcgggccctgcgacggcctctgtcgcttccggattcacctaggcacgagaggggactgcccgttgcccgctggggacgggggtgaaacctgaggtgtggtgtgcttggctagagggggttatgcgaagggtcctgtcacggcctctttccggtatgtcgtggtggcatgtcggcgcacggaaacgtgtcgtggggctgtgtcttgtgggtacagttgtacacctctgatcagagtaaaactattcgaatagccgtgcccgcggttatgggcggtcgaccagattcaccgtgattagtcccacctcaataaatcgacctaatacactgtagtttaggtgggttggttgggcctgttcaacgtggtgtagcgttgatcagtggagatttaatgttactttaattactcaactgttttactgttttgctcaataaaatgttttacaaccgcctttatgcaaatagccacaaaccgtccttgtgttccccttgcacgtctgcatcgttggtgtggcttgctgagtacggtggttgtactcagccttgctattattcccccttttcagaagtgtagtgcttctgagctgaagacgaagttagaggaccaaggctcagaccccagttgagttttgcctgtggagtggagctgaagccccgctaggatcgcctttttccgctgctgctgcttttgtttcggtgcgaggactaagtgcctcttttgtaagtattttacgctttatttacgtttggaactgtatattacttgtcgttttgtgtaccctggctggtcctggacagggatttaatacacaaaatagtctggaaatttgggctaaatttctgggcgtgacacggacaagggcgagagagcgagcggttgagcccgagggggaaaaaaggcgaagagggcggtggaaaggggaactcgtcccttccgttttgggcggcgggcaggcgagtcgcggaaaggcggtcacgcgaggcaggcgacgaccgggtggtcggcctccacgcgagcgcgcgcgggaaaggcgaaggcggtgggagcggcgtccttgccggtcggccatgcgcgagcgcgcggaaaacggtgacgcggccggaattttggggcggcgtcggcgggaagcgacgccgagagagagagagagagaaaggagacggcgctgtctctcgctcccgaacacgtgcgacgcacgcgcgagagagctgggccgagaggaggggatgggccgggagagaggaatcaacccatcgacaagggaggcaaaatagactttttctgaaagattttgatttggagagatttggagtttgggttttgaatctaaatttgatactttgtacacaagggttcaaggagtcaaggaaggaaacaaaacgggagtttggatattttgggattcggaaatgtatttggcgaggattcaaaggaaggatttgaatttcggaattgatctaggaagttaaatcgggatttgaaatcttgaggtggagggttttgacagtgacgagagggaacaaggagattaaaactgagatccacggcacgacttagactcgcacacaaagaacgaaattttcgcaattcggattttgccgaattagtttttaacgtctcacgagaagcggagcgttacacatatccggttttgcgaccaagcaacaaaatcagactaggcgacaaattgagggacccaaagtgaacttattcctagtttgacagacaaaactcaaccacgggagttacatgggctgggttactcgtttttgactaactctcaaattacaggggaaataagtttatctgtggtcccttaacaacgaatccgatttcatcctttaaccgaaaaaccatatacaacggtcccttaactgtcaaaaccgatgcaatataggtcccatagcggtttgaacggcggttttcgctgacgtgatgcctacgtggctattttgactcggccttcacatgacgtggcaatgacatggcgcttacgtgtcaaatcgatttggaaaatattaaaaattgtagacccacatgtcagtttacacaaaaaaaattagattaaaaatggtaggacccacgtgggccccacatgtcattctcaccctcctctcttcccaactcccctgtgataatgaagttgtcgcagacccccggctcggtgaggtcgttgttgtcgacctcgatgtctctcagaaatggtgagtgcttgccgagctccgccggaagctggccggagagattgttctcgaacagcttcattatcaccagcgatggaagctgagcaaggcttgctcgtatctcgccggagaagttgttcgccatcaggactaagttagttaggttcatcaaacttccaaagctctctgggatcgttccagtaagctggttctcagatatgtccagataaattaagcttgctgctccaatcttgccattgacgacgacgtcgccggtgagctggttggtgtacaagaacaagtactgcagttttggaaggttccagatcccaggaggtatgcctgacgtctgacgagcactaaaacctggccaaaaccgaacacaggttttaggagagggattaggagaggcaaagggaatcatcccccacagggtttaagtgagatgggagggaccctggataggttcctttggggattaattcccaagcaaccgaacaaggacttatggggccaaaagaatattcattgctctttctcttcttattcttctgagaacttccattgctctttctcagaacaggactgaaagaaagtggagaactatatggaactaccaggtctcaaaaccacaatgattttagggaggcttggtcactttggcagtaatttagaacagagataattgaaaagaagaagaaaattcataccatagttgatttatacatgtcggaacttgaggagctcaaagtggcagtagtttttatcatggcttgaagcaggtaagtgggaaaattcagaacggtgcccatcggaggaagccagtgtggtaatagtataactattgtataccagtctttgttacctttgaagtctaaaatgttgtgtagtttcttgttggtgcacaattgtatgtgctcttgtttgcactctcttcttctccaactagtaagggtcagagaagcaatgttccaattaatgatcattgtggatcacttaacaaaacgagtggaaatgatctaggagacattaagctgcatggatgtaacatagacaagtatagttcagaatgaagaaaagggaaaaaggaaggcaaaaatcaacaaagtacatgtgatccaacttccaaacattagtcacggttccataaactgactctgctggtacagtcaaaaggcctgtcatgttaacacaggacataaattttaactagcctacggtaaacaccagcggaataaaacaagacataaccttcggaacaaccggacataccttccaaaaggccaacttacgtaccatctaggatttcacaacattcttcataacaaaggagccatcatccaagtactacaaacagaacttcataattcatattagagattggctgcccactctaagcccgattctcattagggtacaaagacggttttgcaataacaaaagtggagccgcacctctgcatgttagcagttaccgcccattaggtaatgactcagagaacattggaacatatggtagatatgactggcaggactcatgtccgagtttgcgtatgacacggacttccttgcgatccatttcatatgccatcaaagtattgtgccatccataaacaaagaagatcaaattgcattctggatgaactgcaattacttggtagtcataatctaattggtatttctttcctccaaacagcttcattgagccaacggtatgctttaagatccaattatctgtatcatagtcttgaagaaaccaaattgacagtttgaagatatcatttggatcaacattaaaagcacacaggcgaccctgagtttgatgaattatcccaatatcaccatcaggatccggcataggaatcttcctccatttcttcccctctatgtcaaccgccacaatctcatcagcaggcgtgacagagtgcagaaaaccattgagcaaaacacttcttcgattgaccgaaaggctaatcacaacttcatcattccatccattttcatggagagtccataacccagtttcagacgaatagatctccacccctgtgaccagtgtgacgtatgaatcctcatcctcttccacatactcaagcacatggaaatgcgacgagatggctggatcgaaacacaagcaggcggtgtggttctcttcgatagcccagttggcgtccggcaacatcacccattccttggtggcaggattgcacacggcatagtggaactgaaaagtgccacgagacacgtagcagcggcagaggaggaggccattgcagcaatccaagaggtcgacgtcgtggcactggggcaggaaggagaaggtcgggctgacgagaggcatgcctttcccggtgacgttggtgaaatggcgcgccgtgtacgggcagcgctcgtggttcatgctctcgtagaagaagcccgacagcgtctgcggcagcttctttcggtgctcgttgtcggcgatgagtctgcgccagtgtgaaaccatgtgtggttatagttcttttgtgatgggaaattgacaagtaccggaagtgcaagaagtgtgtgcgtagactaccattggtcaggttgcgatatctgtgccaagacaacggttgtttggctcatgtgtgtgcaggtgatcagagtcaatcttagtcaacggcggatcgggactagactcagggagaagttgaggtccagaacgatcaaggatgccgggtgacaagattggacacaaggttgcacacggtgggcggacaccgtgtgaggaggtctttgcaacgggcttcacaaggtcaagtgtgcaagcatcggattcgcgaagaaaattggaaggagaagaggactgtgcaaggacatgaagaccgagtgcattgctgctacagtaattcggcttactgtagctagcatgtatcatgtgcacgtgtgctgccatgattgaatggcaaggagaccaacaggagctggccactaggcttgtgggctggcagttcggttggcaggaaggccgagccaacccggcctaagcacgttgctgactcaagatggtgaaggctaggccgagcaagccctagacatgacgatggcccagctcggctcagcaaatgcacaggtgtgtgcatgcgcgcgcggaagcgggagatcgtacggcacctggaggcgtggcggccttctgttcgtcaaggaagcgaccgggtcccacgcggtttttcgcatggtgcgcgcgggaacatggttttcgcgagcgcgcgcagaagcggctcggtgggaggaacggcgacgtggcggcttcggactggtggtgcgcaggcgtgagaggagcaggcacgcgctctctgggacgcgtggcgcggatgcgttggcttggaggagcacgacgcggatcggtgcacgctgattggcttggagtggaatcacgcggatcgcacgagggcgcgcaacgtggagagctcggatcaacaacgtggcgactatccaggaggcttccttcggatctaaggaacaatggacagccaggattacatcaaggctagggtttcgccctagggatatttgagacaatgtcttaggggtcttaggctataaatagagagatggatgcaagggtggaggttgctccttttgtaatccttttgagatgctcggtgagagagtttcggtgtgagtttggagtgtgtttgctcgagaggcttttgtattaggattagtttggagtgtgtttgtccgagagattttaattttgtgttaatgttcctctgaaggtgtatgtttgcccctagttgagcggttattttgcatcacctatgaatgaaatgatttgaaggatttcgtttttgccttgttcatttaaattccgcaatttaaattctacttgcaatttgaactttgcgatgatgagttttgttatctcctcctcacctctcttctagtttgggaaattccttttctctttctcttctagtttcgggaatttctttctctcttcttttctagatccggcttctctaatagccgcggttctagtaaggatttttgagaaatccggcttgatgagtattttcgggggcaagatttgaattgctatattcaccccccctctatagctgttcttggtctttcaattggtatgagagcaaggttaagttcattgtaacctaaccgtggcaacgaacgccgctatggaggaaaaatattctgcgaaaccatttgttttcgatggacacaattttgtcatttggaaggcacgaatggaggcctacctccagtcgcaagggcataatgtgtggaataaggttaaatcaccttacactgtgcccgatgatgctgacatcacgcctgcaaatgtggctcaggttgattttaattatcgtgcaagaaatgcaatcattggtggaatttcttctggtgaatttaattgtgttcaacaccacaagtccgctcatgacatgtggactgctctgtgcaatttccataagggaaacaatgatattcaattggttcgtcagaatcaatttcataaagaatatcaaagatttgagatgcacccaggagagtccattgattcttatttcaagcgttttggagaaattgtttcgaagttgagatctgttggaaaagaattttctaataatgataatgctcgccatcttttgaattgtcttgattatggtgtttgggaaatgaaagttacttccatcacagagagtgcacctctgagtgaccttaccatggacaagctttactcaaagctaaaaacccatgagatggatattttccatcggaaaggcctcaaacactcgatggctttggtagctgatccctctggtagtacttcttctaatgactcagcttttgtgtgtggtggcttctctcttgccgctttacactcagtcactgaggagcaattagagaagattcctgaagaggatcttgctctttttgctagaaaattctcaagagcttacaaaaatgtgagagatagaaaaagaggaaaaaccaatgaaccatttgtgtgttttgagtgtggagagcctaaccacataagagtgaattgtcccaagttgaagaagaagagtgacaagacgaccaagaagcccgagggacaagggcgaaaggggaataaggatttgatgaagaaggcgatccataaggtcttggcggctcttgaggaggtgcagcttagcgacatcgactccgacgacgatgatcaagaaaagggggacaaggacttctccgggatgtgctgtctcgccaacaacgaggacttcatcaacctgtgtctcatggcacttgaggataaggatgactcatcggagcatcctgaggtatgtcttgatgatatcccttccttggatggttctctttgtgatgatttttgctcagataatgactctgttgatgatgaactaagcaaagaaagaatggcacacttgatgattgaaattagtgacaagtataggtcttctaagtataaaattgagaaactaaaatctgaaaatgatggtatggcgctagaaattgctaggcttcgatccatgattcctgaggaggatacctgttctacttgtgcttcatatctctctgaaattaatctcctcaaggataagttgaaatcatgtgctttaggagctgggaatccttctagtgctagtgttgcttgctctacttgctatgaaatgaaagttgatatgggtttgcttgagatggaattgaaagaactaaaagaaaaaaaatttcatgataggattggtaggtgtgaaaattgtcccattctcactagtgacaatgatgaattaagacaacaagttgccatgcttaggaccaagaatgatttgttagaatcttttgctactaaggaacctattcattcttcatgtgctaattgtgctatcctggaaactgaactaaaagatgctaaaactgtcattgattctatcaaatctattgattcttgttcatcatgcatttctctgaaagttgatcttgagtctgctaagagagagaacttttacctacaacaatctttagagaggtttgctcaaggaaagaaaaagttgaacatgatcctagactaatccaaagtgtccataaacaatcaaggtataggctatgattttgatgagtctttgaggataggtacccatgagatattaggtgtcacagatgggatgatagaactagctcaaaagcctataaccttcaagtctgcaggtttcattggaaacactagttctagttcacccaaaacctcagaaccaaagatggtacctatgactagcaagtctaagcctgtagagttacctagacccaaaaatccaaaacaagttgagcacaagcaaaaccagaaacaaaccaagcctgtagagaaaaccaagtatgagtgcacctattgtgggaaagctggtcatttggtaggtttctgctttagaaaggctagaaaagagcgacaagaacgttttaggactagaagagatactagagtccctgagaggttcaagtgtgcatgtcgttcaagtggtgtatctcgctttcctcgccgagatgtgcaccctcgacgtgacctagcaaggttggggcaaaacagacatggtcatcttgcatataattctgctcataacactaaagatgcttgtacccctcgcatggttcagtactggattcctaagtcatttctcactaaccccagtactgaatcatcgagatttgctttgtttttcttgtaggattttggagtggggagaagtaattcttggcttgtggactccggttgctcacgccacatgaccggtgaagccaagtggtttacttctctcactcgtgcatccggtgatgagaccatcacttttggggatgcgagcagtggacgcatgatggctaaaggaacaatcaaggtcaatgacaaattcatgctgaaggatgtcgcgcttgtaagtaagcttaagtacaatttgctctctgtttcacaactctgtgatgaaaatctagaagttcgtttcaaaaaggataggtctcgagttcttgatgcttctgaatctcctgtttttaacatttctcaagttggtcgagttttctttgctaactttgactcttctgctcctggtccttctcgttgtttcattgcctcagagaatagggatttgtttttctggcatcgtcgtcttggtcatattggctttgaccacttgtctcgcaatagtggtatggatttgattcggggtttgcctaagttgaaagctccgaaagatcttgtgtgtgcaccatgtcgtcatgggaaaatgacatcttcctcccacaagcctgttacaatggttatgacagatggaccgggacaactgcttcacatggatacggttggtcctgctcaggtccagtcagttggggggaagtggtatgtcttggttgttgtggatgatttctctcgctactcttgggtctattttcttgaatcaaaagaggaaacgtttggcttctttcagtctcttgctcgtagtttggctttggagtttcctagtgctcttcgagccattcgtagtgataatggctctgaattcaaaaattctgcatttgaatctttctgtgattcttctggagtcgaacatcagttttcttcgccatatgtcccacaacagaatggggtggttgagaggaagaaccgcacccttgtggagatggcacgaactatgcttgatgagtttactactccaagaaagttctggactgaagctatttctgctgcttgttttatctccaatcgtgtgtttttgagaactatcttgcacaagacgccatatgagctcagatttggtcgtcgaccaaaagtttcacatctcagggtcttcagttgcaagtgctttgttcttaaacctggaaatttggacaagtttgaatctcgatctgtggatggcatttttcttggctatgctactcattctcgggcttatcgagtttatgttctttcaactaacaaaattgtggagacttgtgaagtcacttttgatgaggctagcccaggagctagaccagaaatttcaggtgttccagatgaaagcatccttgtggatgaggattcagatgatgatgacgatgattccatttctccacctctagacagtacaccaccagtacaagaaaccggttctccatcgactacatcgccttcaggagatgcaccaactacatcatcttcagcagctgaggagattgatggtggcacatcaggaccaacagctccccgacacatccagaaccgacatccgcctgactcgatgatcggaggcctgggtgaaagggtaactaaaaatcggtcttatgaacttgtcaattcagcatttgttgcctcttttgagcccaaaaatgtttgtcatgctttatctgatgagaattgggttaatgccatgcatgaagagttagaaaattttgaaagaaacaaagtttggtctttggtagaaccttccttgggttttaatgtgattggaacaaaatgggttttcaaaaacaaactaagtgaagacggttcaattgttcgaaacaaagccagactagttgcacagggtttcacccaagttgagggcttggattttgaagaaacttttgcaccagttgctagattagaagctattcgaattcttttggcttttgctgcttcaaaaggtttcaagctttttcaaatggatgtgaaaagtgcttttctgaatggtgttattgaggaagaggtctatgtcaaacaacctcctcgttttgaaaatccaaaatttccaaatcatgtgttcaaacttgataaaactctttatggtttaaaacaagctcccagagcctggtatgaaagattgaaaacctttttgcttcaaaatggttttgaaatggggggagttgataaaactctctttactcttcatagtggcattgattttcttcttgtccagatatatgttgatgatatcatatttggtggctcctctcatgcacttgttgcccagttttctgatgtgatgagcagggaattcgaaatgagcatgataggagagttgactttcttccttggacttcaaatcaagcaaacaaaggaaggaatctttgtacatcagaccaagtactccaaagagctcctgaagaagttcgacatggccgactgcaagccaatcgccacccccatggcaactacttcatcgcttggtcctgatgaggacggcgaagaagttgaccagcgcgagtacagaagcatgatcggctccctcctctacctgactgcgtcaaggccggacatccacttctccgtgtgcctgtgcgcgaggtttcaggcttctccaagaacatcacatcgccaagcagtcaagtgcatcttccgctacatcaagtctacacttgagtacggtatttggtacccctgctcttctgccctttcagttcgagctttttcagatgctgattttgctgggtgtaagattgatcgcaaaagtacttctagcacttgtcattttcttggcacttctttggtctcttggtcctctcgtaagcagtcttctgttgctcaatcaacagctgaggctgagtacgtagctgctgctagtgcatgtagtcaagttctttggatgatttcaactctgaaagattatggtctgtctttctctggtgttcctctgctttgtgataatacaagtgcaatcaatattgcaaaaattccagttcaacactctaggaccaagcacattgagatacagtaccactttctccgagacaatgttgagaaaggtaccattgtgctagagtttgttgaatctgaaaatcaattggcagacatttttacaaaaccacttgatcgctctcattttgagttcttgcggagtgagttaggggtgatccacccctatggcttgatttgagggggagttgtttttcttttacatgcatttgtaacatattgcatcatgtttactttatgcattgtattatacactcttcaattgagctttgcttgttatctcttggtcatcactatgctatgcatgtattactcttatgctagtttgatcttttgtctagctttcatttgcttaagtagcttgtgtgatcatgttatgctgttcaagcttgttgaaacctgcttaaattgactattcatttgaacttaatcaatgtgcaatgcttgctctagaagtttgtttaagttgaagtatccatctcatactcatgctatgttttcattctttttgcaataactgtcagtacatgctcatgaatgctcatgcttatgcgtccatactttgtatcaatcttgctttacaagctttatctctgtttttgtccgggctactgagtgtgtttacgcatgagtagtgccgaagatagcactgagacagcctgtaatgggaactctagctggaaaacttgattgaggtcagacggcagtgtttggcacaaccatcacttgctgactgataagatcaggtggaccgtcgtgattgtgctattgtctttaaagaatttaaaaaaaaaatcataaaaagaaaagtcatgagaaaagattaaaagctcatgttctatgctttgttaccatgttgatactctttatgaactgggcattagcacattagcatgggttcattgctttgattatgtaaatcttgcatgattatgagctggtttgcttccttttaagcttcttctagaaatagctatgcacactaaatcactaatccacttgaaagctgtttgcttgctggcgatactatcctgatattcataacttgtttcatacttcttttgcacatgcttagctaggcttgagcacatgcttgtatctgtgtgatccatgtctactttttgatgcctttagataactctcaaagctctcagaactctggaatttgcaagtttcaatcattttcattttgcatttttgtctctttttggtcttgatggcatcattgacaaagggggagagaattttgcacttattgaaaattaaaacttgctttagatcttggtgaaagggggagtttggcacatagggggagcattcttgcatttgcatttgcatcccttttcttcttgtcacttggtcttgatttttcgcgatttcaaaatgaccaaagttcgacttttgcaaaatggtttgctttgtgtcaaaaatcaaattttcaaaattttgcttgagattgtcaatgttcccatcaagggggagattgtgaaaccatgtgtgattatagttcttttgtgatgggaaattgacaagtaccggaagtgcaagaagtgtgtgcgtagactaacattggttaggttgtgacatctatgccaagacaacggttgtttggctcatgtgtgtgcaggtgatcgcagtcaatcttagtcaacggcggatcgggactagactcagggaggagttgaggtccagaacgatcaagaatgctgggtgacaagattggacgcaaggttgcacacggtgggcggacaccgtgtgaggaggtctttacaacgggcttcacaaggtcaagtgtgcaagcatcggattcgcgaagaaaattggaaggagaagaggactgtgcaaggacatgaagaccgagtgcattgctgctacagtaattcggcttactgtagctagcatgtatcatgtgcacgtgtgctgccatgattgaatggcaaggagaccaacaggagctggccactaggcttgtgggctggcagttcggttggcagggaaggccgaaccaacccggcctaagcacgttgctgactcaagatggtgaaggccaggccgagcaggccctagacatgacgacggcccagctcggctcggcaaatgcacaggtgtgtgcatgcgcgcgcggaagcgggagatcgtacggcacctggaggcgtggcggccttctgttcgtcaaggaagcgaccgggtcccacgcggtttttcgcatggcgcgcgcgggaacatggttttcgcgagcgcgcgcagaagcggctcggtgggaggaacggcgacgtgacgtgtagcgcccgttccgtcgtggcacctagcgggaaaattatctcttaaaaaccctaattgcgaaatttgtttctttgcttgttgtctagtgtccgtgccatctcggatctcaatccccaatctatcgtcgagtccatttccgaatccaaatccttccaaatcaaatccctccgcaaaagtctattttgcctcccccggggtcgatgggccgaatccctctcggcccatctccccctcccttcccctgcgctctctctctctctctctcccttcccccgctccgcccgcgcgccgcacgcgcgtgcgcgagagccgcgccgagcgctccctccccctccgctctgcccgcgcgcgtgcgcgtgagccgcccgcgccgagccgagtcctccctctccgctccctcgctgccgcttcccgcgcgccgtgttcgcgtgcgcacgcccgcgtggtcgccgcccttgccgcgcctgcgccgtctgtgccgcctggccccgctgccctgccgcgcagccgcccggccccgctagccagcgcgcgtgcccgagccacgccgctcaaaccgccacgccgcccgttgcttcccgcgcgcgcgtgccgtggtggctgaccgcctggtcgccgccgtcgtcagcgcctgccgcgcctgtcgctcgtgtcgccgctccgctccacaccgccccgccgtcatcgccgtcgtcatcgcctcggccccgcctctccgcgcgcaagccgccaagagacggaggcagagccctcctccctctgccgcgtcgcccccgctcccctcctccttttcccaaagaagcaaggggcaagccccctttctcttccccattttcctcctttttccctctcgccggcgtcacctctgtcgccgttttggctgctagccggagcgccagctcgcgccttgaccgccctaagtcggttcccaaaccgacattgccgcccttaaaacccagctcccccctttcccttcctctcccattcgcctccacgccattgccgccgcctcccgtgctctgttcgccgtcgccgttcgtcgttgcgcgtgtcggaggagccggcacgagcaaggacgcggaaggggactccgggcgcgcccttttcttcctcttcctcggcccgaggccggagagattactcccgcgccgtcggcctctcgtcacagcgcccctcctcatctcggtagtgcctccctccgttcttcctcctcgctccacctctcccccttagttttcggtagtagcacgagtagcctccccgtagctagccggcgccgccccggccgttgccgccgctcgccgggtgctcgccgccgtcgccgcccgagctcggaagcgccgctcgtcgccggcctcgctcggcgtagctccgcccaatccgacgctagcatcggattcccgtggccgcgtagatgctcttgccaccgggaattggcccctcgtgacctcgtcgccgttttccccttttctctccgccggttgccgccgccgcaatccgccgccgacggactccctccggtgaatccgagccgttggctcgtctccccttgtcctgttcaaccacccggtgtactcgcttccgcctatatcgccgtggttcgctccgccgctcgccgttgtcgtccgccgtccgtttcggccggcgtcgtcgtctacctcccgccggcccgcgtggcagccacgtaggcgccatgtcggcgccagctcggccgagatcggatcgggccaatcccggtcagcccctccccgtgcgcgcggtccaccgcgagccgagaggctgcgcgtgggcccgccgcatccgcgtccaccgcgaaccgcgcgcgtgcaccgcatccctcccccaccctagcgccgcgccgcgtgctccctccgcacggtgagccgagccgctgacaagcgggtcccacccgggaccgcgtgtggtgagcccggtctaccggctcactctctcctcccttccgcgcgcacgccttgggccgctctgggccgccttcttgggccggccggcccatttagctcggccggaccgcccatctctctcgggccgcgccctagccgcccgaggaaaagtctattttccctccccttttttttcttttcttttctttttcaaaaaggatttaattaaatccttttcctttagaccaaaaatccaataatcttagaaattcaatatcttcccaaccgtaaatccgtttgactccgttcaacttccaaaattcctcaaatcttgagatctatctaatggcacgcttagaggtcattaatagggctttattttcgccgtttgttgagttgtcccgtttcgcgtgtagtttcggagcccgaagatccgcagcgcgaggctttcgaggatcaagctccagatctcgagcaaggcaagccacctttgaacatcttgagcctatatttgaaatttaatcatattgcttgcaaaatattatgcattgataggattgcacttaatatgttgccccgtctgcaaggcagatcggtgggcatacctaacttgttgcatttgatccttccattgttaattgctataccatgtccccttgtaaccatccagttgcgcctcgatattcgtgcactctgtgcgagtatcgacggtcgccttcaaacttaaaatctgagtaacaacttgggtaaaactggagttttacaaaagacttggaaaacccgacacctgggtcggtgcttgcgaactaaatgaatttccaaaaccgcggaccggggaacgtaccgggtgtacggttttcccgctcttgcacttaaggaccgtttccttggaatttcatccaaacataagataagtacgaccatatgggtggaatgggacacccctggctgagtaactagcttatcaggggagccttgatgccgagagacatgtggattcgccggggtggtgtcggggaggacccctgggcttcctggcacagtatggtctgggacctaacctgttgttagtctgggacccctctcgtcggtatatggtaaacctgtgtcggctttggaaatgccttgtcatgaaagcttggaggtctcccgacgtggctgatccccacgggctgggtgatccgggttagtaatgtcgtgtgggtaaagtgtaccccatctgcagaggttaacaaactgttcgaacagccgtgcccaccgtcatgggcggatgtgaggtgattcctagcgtagttttgtttgactactgcttgtgaaattgttgttgtagaaaggggttcgctgtttgaaaaatctgcagctgatgggatcagctaggcccgggtggccgtttgaaagttgttggcccgggtggccgtttgaaaagctgttggccgggtgccaaccttgttttcaattttaaagactgatacattgcacatactccgaccggacgagacgcactgtctcaaccgtgtcgtttgagaaacactcacttagctgtttttagaaaagagttcaaataaaatcaacagcaaaaacaacagcctttccttgaagcctacattaaacacttatttcccttggcttgctgagtactcccgtactcacccttgctctatataaataatccccccccagttgctgaagaagaagaagcggatcctgctgatgaggagttctttcaggagcaagccggctacgatgagttttagggtttcggtctagttcccaagtcgcgcctgtgttggttggtcctagtcctggcttccgtttcccttttgtaatgcagttgtgagctcgggatctgtccgtagcccaacatgactgtatctctactctataataaagtgaccgctgttgctgtgatattctgtctccctgtgataccagcactgtttcctaggactggtatcgaccaacaggttaatttggagcgtcacgggctagttccggtcgggattagttcggggcgtgacatgacggcttcggactggtggcgcgcaggcgtgagaggagcaggcacgcgctctctgggacgcgtggcgcggatgcgttggcttggaggagcacgacgcggatcggtgcacgctgattggcttgaagtggaatcacgcggatcgcacgagggcgcgcaacgtggagagctcggatcaacaacgtggcgactatccaggaggcttccttcggatctaaggaacaatggacagccaggattacatcaaggctagggtttcgccctagggatatttgagacaatgtcttaggggtcttaggctataaatagagagatggatgcaagggtggaggttgctccttttgtaatccttttgagatgctcggtgagagagtttcggtgtgagtttggagtgtgtttgcccgagaggcttttgtattaggattagtttggagtgtgtttgtccgagagattttaagtttgtgttaatgttcctctgaaggaatatgtttgctcttagttgagcggttattttgcatcacctttgaatgaaatgatttgaaggatttcgtttttgccttgttcatttaaattccgcaatttaaattctacttgcaatttaaactttgcgatgatgagttttgttatctcctcctcacctctcttctagtttgggaaattccttttctctttctcttctagtttcgggaatttctttctctcttcttttctagatccggcttctctaatagccgcggttctagtaaggatttttgagaaatccggcttgatgagtattttcgggggtaagatttgaattgctatattcacaccccctctatagctgttcttggtctttcagccaggacttgctcacgcacttgaactggcacacggagcggacggggaggcggcggaggacctcgacgatgagctcgtcggtgagactggccgccgggttgcgccgcttgttgggaaggttctcctccatcgggggtgggtggaggagaggaagtcgtcagcctgcaaccgcgtgaagagggattgaccgcggcaagagcagatcgagcaggtgagcagatggggattaaattgagcaaaacatcgaaatggcgaagaaagaaaaatctggtaacaaatcggcatcattgggttcgttaatccacctacgaaacgaactaatctgaggactaaatgtgtagatcaggaacctaccgatcaaggcagggaagcgatgccgccgcgcgcgtgacttgccgctcggcctcggctgacccgtggagctcgtcggacgggacaccaggacggcaaacctagcaccctcaccggttaaggccaaccattgcgccggctatcctgctgcgatgtgcgccggtcacggagaagaagagatagaagcggcggcggcggcggcgaaggcgaaggcgacgaaacccctagatgcctccaattcagtgtctgccgggatattggttccaaattggaaaataagggtccgtttagttcacggctgtcacatcaaatatttgatacatgcatggagtattaaggctccgtttagttcgcgaaataaaaatttttgggtatcacatcagacgtttgaccggatgtcagaagggtttttcggatatgaatgaaaaaactaatttcataactcgcctggaaaccacgagacgaatcttttgagcctaattaatccgtcattagcacatgtgggttactatagcacttatgactaatcatggactaattaggctcaaaagattcatctcgtaaattcccccttaaatgtgcaattagtttttatttttatcgatatttaatacttcatgcatgtgtctaaagattcgatgtgatgtttttgggaaaaaaaaatttgaaactaaacaggcactaaatgtagaaaaaaaccaattatacatattgcgtgtaaattatgagataaatctttttaagtctaattactaaatcttttaagtctaattacgccataatttgataacattgtgctaagtaaacatttgctaatgatggattaattaggcttaataaattcgtctcgtagtttcaagtggaatctgtaatttgttttgttattagactatgtttaatacttcaaatgcgtgtccgtatatcccatgtttcacaccaaaaattttcgttcgcgaactaaacatggcctaagttcttttgactcccttagctactggccaaatctgattcgtatcctaaccataatatatgatatcgcgaccccttaagccattactatcttggactgtgcactccacgtcttcaaaacacatttcctgaaaatactttttgttgcattgcgtacaatgttttttaaggccatgtttagattctctggcaaattttttcaccctatcacatcgaatatttggacacatacataaagtattaaatatagaaaaaaaactaattacacagattacgtgtaaattgcgagatgaatattttaagcctaaatgctctatgatttgtcaatgtgatgctacattaaatatttgctaattacagattaattaggcttaataaattcgtctccagtttacagacggatcatgcaatttgttttgttacttcaaatgtgtgtccgtatattagatgtgacacggcataatattttcacccatgatctaagcacctcctaagctactccctctattaaaaaaataatatagcattagatgtgacatgccattttattagattatgtcttgtccaataataggttttttatggagtttgctaagtgcatttctaaaaatatttaatatatctttataataaaatatataaccgtgacaataatctcacgaataatctgtttcacttgctgaaagattttgaagcattcttgttgctgggagtattttaaaggagaacattatcaccatcttttgtagtgcaagggatggaaaacacaataatttggaaatggaatatttggttagatcacactacaaaattcaattgcacgacaattgtggactatagcacataaatagcttccaaaactgctgctgaaggtaaatgctaaatttgcatggtttcattgcaggggatgttcacatggttaattatgccctttaggcggccaggagaatgaaatgtcaaattacaacgattttaaggaagcttagccatgtggtagtaacttttttttagatgcatttgcgatttgacagtaataacttagtaaggacataattgaaagaagtgtataacttttttttatgtcattctgaatttctggtttatacacattcgaacttagagaaggaacataatagttgaagttttgataatttttatcacggtttgtagcaggtaattgggaaaattgataagggtaaacatgagaggaagccagcatgcatagttgaactattgtagaactttttggtttaccaatctatgctatcctcgatgtacccttgtacgtgctcttgtttgaacatacacaaactttctctctctctctctctcaaactagaaaaggtaaggaaagcaatattccaattattaagatcattaaaaatcaccacacagaaaagtaagggtctgctgggaaggcgacgaaacccctagatgcccccaattcagtgtctgctaggacattggttccaaattgaaaaataagggtctgtttagttcagggccgtcacatcgaatatttataaatgtatggagtattaaatgtagaaaaaaaccaattatacagattgcgtgtaaattatgagataaatcttttaggtctaattacgccataatttgacaatgttgtgctacagtaaatatttgctaatgacggattaattagacttttcgtctcgtagtttccaagcggaatttgtaatttattttgttactagactatgtttaatatttcaaatgtgtgtatgtatatccaatatgacacgccaaaaatttttcttcggaaactaaacagggcctaagttcatttgattcccttagctactggccaaatctgattcgtatccctaaaccacaacacttgatatctcgaccctttaagccattactatcttggactgtgcactccacgtcttcaaaatacatttcctgaaaatactttttgttgcattgcgtacaatgttttttaaggccatgtttagatcccctagcaagttttttcaccctgtcacatcgaatgtttggacacatgcataaagtattaaatatagaaaaaaaattaattatatagattgcatgtaaattgcgagacggaacttttaagcctaaatgctccatgatttctcaatgtgatgctacattaaatatttgctaattacggattaattaggcttaataaattcgtctccagtttacaaacggatcatgtaatttgttttgttacttcaaatgtgtgtccgtatatccaatgtgacacggcaaaatattttcaccctttgatctaaacaccccctaagctactcacctccattaaaaaaataatatagtattagatgtgatataccattttattagattatgtcttgtccaatactaggtttttttatggagtttgctaagtgcatttctaaaaatatttaatatatctttataataaaatatataaccgtgacaataatctcacgaataatttgtttcacttgctgaaagattttgaagcattcttgttgctgggagtattttaaaggagaacattatcaccatcttttgtagtgcaagggatggaaaacacaataatttggaaatggaatatttggttagatcacactacaaaattcaattgcacgacaattgtggactataacacataaatagcttccaaaactgctgctgaaggtaaatgctaaatttgcatggtttcattgcaggggatgttcacatggttaattatgccctttaggcggccaggagaatgaaatgtcaaattacaacgattttaaggaagcttagccatgtggtagtaacttttttttagatgcatttgcgatttgacagtaataacttagtaaggacataattgaaagaagtgtataacttttttttatgtcattctgaatttctggtttatacacattcgaacttagagaaggaacataatagttgaagttttgataatttttatcacggtttgtagcaggtaattgggaaaattgataagggtaaacatgagaggaagccagcatgcatagttgaactattgtagaactttttggtttaccaatctatgctatcctcgatgtacccttgtacgtgctcttgtttgaacatacacaaactttctctctctctctctctcaaactagaaaaggtaaggaaagcaatattccaattattaagatcattaaaaatcaccacacagaaaagtaagggtctgctgggaaggcgacgaaacccctagatgcccccaattcagtgtctgctaggacattggttccaaattgaaaaataagggtctgtttagttcagggccgtcacatcgaatatttataaatgtatggagtattaaatgtagaaaaaacccaattatacagattgcgtgtacattatgagataaatcttttaggtctaattacgccataatttgacaatgttgtgctacagtaa

SEQ ID NO: 6995 - DNA, 10552 bp, Oryza sativa
ttggattccttccatatatgtaattcttccttatgttctccccatgtactcctatatatatcggcccccctgaggctcaatacaatgtgtccaatattccagtatcctctctccctatactatctaacactgccgcgcctgtgccgtctgtgcccgcgctgccaccctgtagccgctccgctccacaccgcccctagccgacatcgccggcgtcatccactccggccccgccctccgtgcgcgtgcgtccaagggatggaggtagagccctgcctcatccctccttctccctccttcctttcccgttttggcaaggagtgccccccctttctttcttcttttccctccctttcctcccctcaccggcgtcatcctctgtcgccgatttggccgcgtgcgccgagcgccagccgagccatttgactgcccaaggtcggttctcccctcccaaaccgacatcgccatcccaatctctcttgttttcactctccaccgctgtcgcacaccattgtcgtctcgctgtcgccgtccgtcgctgagcgtgccggaggagctggcgcgttcttggacgcgtgacgtgaactccgcgctcccgcttcatccccttcctcggccaatacgatcacgtttcgcgccgtgtactctcttcacggcaccctgtcccgtcgaggtatcccctcggttccccctcctcgctctccctcctccccgtagcacacccgatagctagtaggcgccaccccaagccccgccgccgctcggcatggtctcgccgccattgccgcccgtcgcttgccctcctcggctctgcttcgtccaatccgacgctaggaacgagtcccggtggtcgtgtgtctgctctagcttcaagaaatcgaaccctcgtcgtcacgtcgtgctttccctcttttgccgccgccgacgaacaccgccgcaatccgccgccgtcggaagggcgacacggcggagcgccagtgccggcacgtcgacgcgaagctcgggtggctcgaccacccgagcctatctaggacgagcacgagcatgtccaacgggagagacgaccagtccatctgcttccgcttctttttcgccggcctggctggtgttccacacgcgagagttcgtgcgtgcgtgcgtgcgtgtccgcgatggcctgcacggcgtaatataggtcggcttccgcttgtagtttttgttagtttgctatccaatctccaaatagatgcatactggagtactagtacaattaattttgatgtcgtgtaggaattcatgtttccttttcctgatctacaggccggtgcagattataattggtaggagttactgattgtaggtcttaggtgtgcatacttcttcgcttctttatctcttgtagacttgtactactattaaatcgcttctttatctcggatgatttggaacagaaatcacgagacaacacttgtaggatttctaaaacactgcacaaattcgtataccgaaagatcgatcggccagtcgtccgtcgaaatcatggaggaggcagtcaacgcatctgccgctctggatcccaagcttgctcctctgctgctgttcggccacggcgacgccacgttcctgtacagcgtgccgaagagagcgctgctgccaatgccaacgccaacgagggtgggcgacggcggcgtcgacgacatgatgagaggccaccgctggtggaccacggcgcagggctggttgctcatggcgcgccccggctcgccgtgcactttcttatgggaccctttcaccggccgccgtgtcaggctgccccccgaccacgacggcaccgtcctcaccgccgaaggcagccatcgccggaggtgcctcctgtcatgctgtggtcccatggacccgaccagctgcaccgatctcgtcatcgacctcgccgacccggagctctggtattgccgtcccggcgacaaccactgggtgaagctccatcagcaaccgtaccagtaccgcaaccctgcccaccgtgacgccatcatcagttttttacgcaagtttacggcgatcgacggcaagttctacaccgaactacacaccggcaatgtcggcgtcctcgagttctcgccggaggttgccgaggggaactaattcccctcggcccaccggcacccgttgtcaagcgttatcaaatccatgcaggctcttaagtcgtgtagttatacaaagtcacaaacctgtattatcgacgaaaatctcgttccttgtagattgagatgcatggcctctctgtttactttaaacatcattcaagcggacaacaggtggatgttaatttgcctaaaaccgacatttttcatcttcactaatagctgatccattttgctgtgctacttatttactgttctctgcaatgactgtttggagatgctgctccacaaaattcagtggtgaatagatgtgtcttgtgtatttatcatacatctgttcactttaagccaatattcgagccttttgccctgttacatcaaattgcattattcacttaaataaataggtatgaataaggttactcaaaaaaatgctttcgcagcaacaaatctgacaaaactgcaaaagttcacccttaagaagagggatatatatatatagcattggttctgcacttctgcatgctaaagtactccacatgatacagcaggctggctttccatccataaggttacaaatgggcaggattgccgtttctgtttgagataaaccaaaggagttgcaagttagaataaagcatttatagtcacatcatgcatacagtttcagtactacctccgtcccaaaataagtgcagtcgtggaaattcgtgtctaacgtttgaccgtccgtcttatttgaaaactttatgatttttttaaaaaaaattagtcagacataaagtactatttatgttctatcatttaatagcaataaaaatagtaatcataaaaaaatttcaaataaaacgaatggtcaaacgttggagatgaatagtgcaaaactgcacttattttgggacggagggagtacaagatacaacacacagcgaactggcaatagattgcttttttgtaaatcttaccactccaatgcagcttgagcttgattagttccaggtgttgacagacggccctgtgactggttgctcatctagggcacggcgcaactcctcaaagaagttcatctgtactaccaatgaccacagaaaaggaatcagagtacagaaactaagacgtaggagaacagtatgacaaaatcgcaggttcaatatacctgatgaggaagtttcatgtgaccatgaccccatgatgatccactagatccagagtacatcaccggcttatctggcaaaacatcaacagcatttaataggttactttggtttagtgcttcccgttggtacaactgacatgaaaattcacttgagtgcacagggtacttgatggtgttcatagtaacatattaacatcacgaattgctatacaatactataattgctagcaccataattgtgcggcgtcactactgttgccaacactttatattcacctccatatttctatcataacttatgaaacggtaatctaaattaaacataggtctaggatagtatgccaggtcttgtagaaattgatcctaaaatatctaaagattcctctaccatgattcatgacatagtaaatctcccatcatgcggcctgaatttgcttaaggactcaccaggggaatcatatgactgatcattgtacaagttcattgctgcagcccaacctacaggggaaaagcagcaaaggtttattatcacataagaagaatggttgtaaataaagttggttcaaaattagtacagcaactgtaggaatacatctttgttatatatgcctagaccatccttgattaaaagttgcctaacttccggtaaattaccggtggcatatgcacaattgcacataaagagaacagttgatggtatgattaatgaacaaaaaagataggataagcagtaggtacacagtttgaatattcttccatgttactaacatgcagagaaccccaaaataaatcacaacaggtgctccacgtatttttctttacaacttacagtatctgaatattggattatcagcctgtgtaaacttattaaagcaatgggcggttctgtaatatactgcatgtgcttttactacttactccctccgtcccaaaatataagcatttttagaccacgacatagtattcgagatgctactttgaccacaatatctataaaaataaaatggtttaaataaaaagagttgcatataataatagtttgattaatgataaatttagtaacatcaatttcacattattgattttttttatttttttgctattaatagttaaagttaaaaatggttgacttagcactatgctaaaaatgcttatattttgggacaaaatgagtaatatcttattactgtagacataatgtatcactaccacaataacatgcaacaattcccagaaagtcaaaaagataagaacttatatcatagaacttctacaagcatttaaaagggcagcttggtctctgagaaacatacggtcattgagaagctgggcagcctcactggcacaacatccctccaagggtattaatcttgtttgactgtaatcattctgaggattgctgaaaaaagtctcatgagggataattggtggaaggttctttaatgaaggagcatggctcttctctccatcattattgtacaaataactagccttctcagccctatctgtttggtataacaaaagtgttacagtgtcagccaaaaaaaatcacctcataaattaaattgttatgcttaaacatacagataaatcattaaaaaaacacatggataaggaaaagatagcccataaaaaaattattggaaatatgaataatcaaataaagacatgtcaaggttagaagattctggacagctattggacataataagtaaactctgagtaaaaaacacatttgacttgtaaatgactgattgtggggattatgattgcaggtagcttgcattagatgcatgaagttgcatgttgtacagagtattggcatcattaatacaatggagtagaggggctcatacaaggatgtttgcttgcaaggatttccttatagatatagagtagttatcaacatggtcggtgtaaggcacatatttttcagcccatttgtggaaaagaaacatggcagtttcactgcatagaaatctactagaggaataatgaattaagtttgataccataacaaccaacaactggataagaccttatcaactaatttggagaccttatatagcagtcaagccaaaataataataaaggaaaatataataaatccccaaaacatcatgaaatccaactgattcaataataattgcgtcgattgttagcacggttcctgaagcatattcagtaaagatagccatcagaaagcatatctatgcatgatatgtagcaagattattaaaactaaataataactaacattagactgcagacaacagaatatttcaagaaataactgatggtttcaaacaaaataaatatttagctcataaatacaaagatggaacaaagaagccatatcaagttatcaactaatcaaatcaacaaggtgatagactgattgaacaatatgtcttaagcaaatctacttcttcattgtgaactccacttataattgtgaaattgtgattacgcgatcacctatcaaagggcaattttcaatatctggcagtacagtaactaaagtatgatagtctttatgcagtcattatatgccctgtgttgaagtcatgcgttaaacttatacaagctgaccgactggcagagttttgctaggcaaggttagcttaatccgctaacccaaattcgaaacatgggcaatccttcacttgctaaaacaggtagttaggtcagcattaaacatgccctgaaataagccattagccatgtagcttgaacaaagatttttctaaaataaataaaagttagttgctaaggttgttcattctcaaaaagctaaaaagagagaccagcgagccaataagccttataggtcggcttccgcttggagattgtataccgccccggcgccccggttggtttttgttggtttgctatccaatctccatatatgcaaagtatttagattttgctttagaattgggtagtggtttgaattttgatatcgtgtaggaattcatgtttccttttcctgatcaacgggtggtgcagatgattggtaggagtactaattgtaggtcgtagatgtgcatacctctttcctatgccaatagttatttataaggatttatgaatttgatcggccagtcgtccgtcgaaatcatggaggaggcaggcgatgcatctgcagcactggatcccaagtttgctcctctgctgctgttcggcggccacggcgacgccacgttcctgtacagcgtgccgacgagggcgctgctgccaatgccaacgccaacgagggtgggcgacggcggcgtcgacgacatgatgagatgccaccgctggtggaccacggcgcagggctggttgctcatggcgcgccgcggctcgccgtgcacttttttatgggaccctttcaccggccgccgtgtcgggctgcctcccgaccacgacggcaccgtcctcgccgccgaaggcagccatcgccggaggtgcctcctgtcatgctgcggtcccatggacccgaccagctgcaccgtgctcgtcatcgacctcgcctacccggagctctggtattgccgccccggcgacaaccactgggtgaagctccatcagcaaccgtaccagtaccgcaaccctgcccaccgtgacgccatcatcaggtttttacgcaagtttacggcgatcgacggcaagttctacactgaactacacaccggcaatgtcggcgtcctcgagttcttgccggaggtggcgttcaccaagatcgctgtacacgacgacgataggagaccggcggtgtacaagaaacgtactacttgcttcgtggaatcaaacggggagctgcactccgttgtcttctctcacccgatcggatgtgaccggattgtcgcgcgtgtaggcgtttacaggttgagcattaatgcggcggcaacgcaggagcaaagatcagcagcatgggtgaaggtggattcgctaggtggcagagcgttcttcgttaagataggcagttttggagcgtcacttgatgcggagggaacaggcttgagagggaactgcgtctactactcggtgttcaatgggaaagtgttgtgtgtatacgacatggaacgaggaactacggctgtaatcgatcccggcacacatcttccgtatcaccagtcaccccaagtattgatgccaacatttcctagatatcatggcggagcaactcgaagtgttgaaagcatctatcaggttgggccaacaattcaggaaaatgcttatgaggtaaaagacactaaggtaagtaaggtgaagagggatgttcgatttttcgagggtggttgtacttgtttgccgattcctattcaaaataagttaataaatcagaagaagagtaagaggtctatggctgaaagatttccttgtcaaggggaaggtgcaagcagtcccgaaacgaagaactcataccgcggttgtggctttcctttggagccgctcaaatgtcttctgcgtatgaagaaataggagtgcactacatagaggatccaacttaccttttatgccaactcgatgagtgtttttttagttaactcattcattcaaaatatgcactaatgttagctcggctatgtcacgtctattaatttcattaagttttggtctctactatgtgattgggagctctttttctctgaaattttatgaaaccatcttcttttttcttttaggtgtttaacagctccccaatctgctttcttcctgagaaagcctcgttgtgtagtgcccgttccgtcgtagcgcctagctaacatcgtcagatcccaatcccccaatccatcgtcaagttcgaattccaacttcaagtcccctccaaatcaaatctctcgacagaagtctatttcgcctccctaaagttttgtgggccgagctccctccctcggcacatcttctccctcagcccatcccctcctctcgcacatgccgtgcgagtgcgctgagccgagccgagagagagccctctctctcattttcttgctctctctttgttctctctctccccgatttcccgccaacgacacccaagttgccgcgccgcctgttgccgcgcgtgcactgtggtggccgaccggccggtcgccgccgccgtcagccctgcctgttagagtatatggtagttagagtcatattaggatagaattggtttgtttggattccttccatatctgtaatccttccttatcttctccccatgtactcctgtatatattggctccctgagactcaatacaatatgtccaatattcacagtatcctctctccctatattatctaacatggtatcagagcagacgatctagtcgcctctctctcacgcttccgctcgtcgccctcgggagggtttcaatctcctggggcggccaccgtttttttttcttcgcgtcgtcaagtcgatgtcccgagagagatcgatctctcggacgcttgcgtcgtcatcaagcggcagtagcagagtctccggtcatcatcagtctgcacttcgtcctccacatccggtccgccgcgtccaccgcccctacctcggatggccaccgtcggcttatcgacctccgccgggctccgcggccgacggacgaccttgtctccgcctcgaccgctgtcttcatcaagctccgccggggggatggaccgacgtcttcaccgcctctccgcctgccttctgcctcgtcgccggcaagacgctgctggtccggcgtctctggcacgggcgcgcggcccgacacctcgccgccaggatctgcaccattgtcgccgcttgcggcctcgacgcctccggactcagctccctcgtcgttgccgccggtcagcccctacgcgtccgcgtctatcttgcctctcgctccctgtattgtttggttgtccgtcactttgctgtgatcttacacgtgattagcaagggagaggagagagagagaagatggttgcagagagcttgttggctggctggctggctgtggagggaaccgattgtgcatgtgtcgctgctgctggtacagttgaggcagagaggttgctggacgtggacttggtctacggaccatttgagcacgtagggctggttgtactgtgctgcttgctgctgcatgtatctttttttttcccgatcagagatcgggtttgcgtcgtccaccgcctcgtcgatatctacgcgtctctgacatcggcatcgacttcgtcgtcctgccccgcgcatcttcggcttgatcacccgttcaagcgtccgactacaacgacttctgtaaccgatcgtcatcgagcatgcgtctacgccatcaagctctgggttgccgctgtgtcgcctccttgggccgcagtgccgctgcctatggtccacacctccattggctattgcaacgctgagaggcgcccttctcagcgtggcctcaccgccggtggacttctcgccgctgcatcgacatggagctgcagctgtgctgtcctctcggaccatagctttgccactttcgtcgtcttcatcgccgttcgcgcatcgacaacctcgtcgtccgcactggtcatagtcagccgctcggggtctccttcctctacttcaagcatcgccgccgcatctccaagctgccactgtcgccactctaggccggtggtgcagctacctctacatggctaccgatgtcgccgtccaggccgttggtcccgctatttcgccttctactttgtccagcatgactcatcgccagcgtcgccgtatcttcctcgactacacttcgctcttctccggcaactgcgtgctgctccggcaattctccctctacgccgttctcgcgctgcgactgtcccagaggccttctctgctagtctcctccgacattggcgtatgattcatggtggtctcctgtctcgcccgcgcggtattggcaacaccggcgcgcgcgtttgtcccgagttgtcccggggtctggcaagccctgtgtaacgtctcgtcctttacggttcgactacattggctcttcggcgtcatcttcctcaacgaccgccgcgattgtatcaccgtcttcgtctccagcgcgtcctcacgcaccattggtccacgatgccctcccgtccatccacgaccactctacgacgccccctgcgccttacggctcgactacctcgacatcatcgacttcccgacttcggctacatcgaccacggctactctacgcacggcttcatcaaccacggctctctcggctccttcgctttggttacatcgactatggcacaaagggctatcatctgtgttgagtactctttccggttttttttccagtccaag

SEQ ID NO: 6996 - DNA, 9444 bp, Oryza sativa
agttggaaaatgcagatatttgtttaaaagtgacttcaaaatactgtatatctgtatgttgtaaggtgtaacatataccttcccatctttcattgtttaccctcaatacaagagatgcaaaagtaggtgtgttggagtcatctggtaccgtagagtcatccttgtagccatcatattgcccaaggaccacctcatcatgctttataggtgtcactgactgaagaacctgacattgtggtataaaaacgcagaaggaagtattgtaagcaacgaaggatgacaaaaaaaaaaaaaaagatccatacaggtttcctactttcagttagagtagaattgtataaggagaagcaaaaaccttgactttttcatctcttatgtgctcaggcttaagagagacaggcttttccatagccaccaaacagaagacctgcagacaagagcgaaatcaatacagaaagggggcctcaagtcgtgaaagtggaaacagcaatattctcttttgaggaattataatgcatgacaggttgctgctctgcctcctcgtggtataacataagaatggtgatggaataaagcaccaatcattctgaatggtcaagtaaaatgttcagcagtccccacagaccacagtaagcaaatgctaatgtagattcacattgggaagtgaaagtgcacataaaactcccctagaaaaggcaagtgcatggaaaactatgctgcataccaaaaataaatatatttacctgcaacaaatggttctgaatgatatcacgaatgatgctgcagcaacaaaagcgaggtcaaatatttacatcagcgaagacgaataacgatgcacgggaggtcctctaggtgattatttgtctcataacataaacaccataatgcagttgatttattttaaatctagcaaatactgtattatcataaaaactaaagaagtttaatgcctagaagaaaataataaaatgcaatttgtatatttctaatggacaactgtacacgatcgaatgacttcatgtgaactatgggaaccataaaccatttacaatatatcaaagtgattttacacttttatagtatatccacagtcacaagcatatgtgcttacaacaaaatactttcagtaaaaggaactttcatgcaaaataaagttactcccaacatacccatattgatcaaagtaccctccacgtccttcagtcccaaagtcctctctgaatacaatctgcagcatatatttattatgttcaagcacatgttgttcgcaccatgataatgataaaactttccagaatttccaaaactaatccattcaactttataccaataacagaggatgtcatagatgtaactacagttgacaaataaaaatacaaaggactacatagaaaagcatattacctgtacattagcaatgttatcacgattccaaagaggtaggaacaaacggtttgcaaagcgaagcacaagctgaaatatattgaaatatgttatagtagcatggaatatatcgttcaactaactagacgaagccatacaacttaccagattttggaccaattcttttcctaaatagtggtcaattctgtacagctgttgttcattaaacagctctccaagctgggcactgagttcctctgcagactccaagtccttcccaaagggcttttcaacaataacccttgtccagccagaatgagaagctgaaagcacaatatgacagttacagaaggtgactagcataaaagaaatgaaactacaacatagtatagcacaacttctaaaaatcaaacttaaaaataattaatttgatttttaatttactatgaaccaacacatgactcaattaataactaagagcaaattcattgcacccaaattgcttccagaaaaccaaaactttatgtttcaaaagtcccaatgaaaaagcaatgtcaggaaaagagtcggcgactgctaggaattggtatgcttagaaagttgaaatagtagcaaagttccacaagcaaatacttagttaaataaagaggacaaaaggaaaatagtacaaacaagagtggatacaaccaaatatatttcctatatttgaaactctgttgtggataacttcactacaccaaaggaagtgcagcagctttcaaaatccgtaaaaaaggggaagtactcacatggattcatgcagtatgatcttatcattttgcatactgaggggtagactgatggaggcaatgccaaataaaatagtctacgtgagcttcctggtttgttgttcttcgaagtttcattctctgaaatggcgttatttaatgatgcaaatccttccccgctattgtaggaaccactaacatatttaatctgcaaagaaaattcaacgtgttacgaaatctaaatgcaaagaagctattcatgatatcagtgacttactaattgcaaaaattgtgaaatatgttcatctgaagctcctttgaggtatctgcgataacaggagaatgctatttaggcactagtatatcatcagacttaaaaacagagaaactacttcctcatacagaacatcccaatttatttttacatgaaattcttaaattattttatggtaaatgttggtgctaatatgtatctttcttacccacgaatgcgttctcttaatccatcatccgaaatatttgatcttgcatacccaaatatatggacttctccagattgtagaaatccctatcaacaccaaaggttacagttcagaactttgtacgtgtgtcaacctgacaaaacattatgtacatggcatgcaatagcaatatagcattataaagtgctgcagtagaatttctgagcaattataactcatcacgaatgcatcaattttatttctttttcactacaactctttcagaagtttgacaactatggaagaagctagtataccaaactatgtaagaagctactagttacaatcaaattacctgctgaaagaggtgaaacagcgctgggaatgttttcttcttagcaaggtctccagaagcacctaggaccacaatggacaagcaaccagactctgaagaccttctaggtccttcaaacctgacaaagaactgaagctagcccgccctgatgaaggggaagaatcaccagatcctcctgacatgatgaactgtatggtctcttcctttggagacaaaacctaagaatgtaaaaaaaagtactgttagtctcaatatgaggtattcacaaataacttataatctatccaaaactttaatctatgctaatatgaacaaaaaggtctattggttgaatgatggattcttgaactgaatcacctgtcagtacctaacagccaatttgcaacagagtgtaaatcaaaatgaatgtttgcttcagaaaaaaaaaatcaaaatgaatgggattaaagttggtttcatgaaatcagtactaaactactaatatagctaccctgaacttacatcagcgaactactcccattgtttgccaacttatagtcaaagttctcataaaacacaaacaggtactgtagttatgctagtcaaatgcttctatgagattctaatacagaaaaaaaaaagtatctacaagactacaaatgtaaatcaattgaactcggtgcccctacattttgtacgggtaaactggaacacatgcaacaactgaccactgcactcactagaagtctagaacacacaacagcccaaccacccaataatcccgaaataaactagaactgcaacttgcaaagcaaattctgttccgagagcttcaaatgattaaaacgaacctatacagcaagcgcatcagggcgccaggaaatcgaggagcacacgcagaataaacacagagatcatgaacacaaacacggcgcacagaacagaggaatttgcctgcgaaggctgcgatgagatcctaaggccgcagcgtagcacaatcccttccacggcaaatgaaatcaccaatggaaaaaccgatcgcgcagaactttgctacggaaccgatcaaccaccaaagaggaatctaagcagtgtggatgaggaggaggagggagactaaccagcagtggcgacgagatttgacttcccgaggtggaagaagaagacgacgacggcgaattgggcaatggatggtgatcttttccgggtgcgatttatagggggatcttcctcactcacacccgctttccatccacccctccactctcctcccccgccgcttttatactcgcggacgactcgtctctcgtcggcgttgttctcagctttgacccgcgcttagccgcctctctgctttgccacacgcccacacccaccaaccctgctcgcttactgttaccctaccaacatagtataaatcaccaatcttataagttattttttttaaaaaaaatagcgtcaatccgattgattgaactactaatataatccatccgtttcacaatgtggagagtgctagaatgacttacattgtgaaacggaggaagtatataaaaaatgtgaaccgtgaagcgtaacgctgtggtagaaccaagtcaggttcaagctctatatttactcccttcggattgataatacttgtcgttttagaccagggtgagatcaaatcttttattatgaatcatttttaaaatatttatctttcaaatatggctactatatgtataaattagtcttaaaaagtagtttaataaaattatatatttgttaatatttttatacacattataatgaaaaataatggtcaaaattatttttttaagactatgcctttgtccaaaacgataaatattatccggagtaacatggatgctcgtatttatcaatactgactttatcaatttgtaatgtatttttgtcaaggactacgtggcaacttcatcaatatatactgtgtttcaaataaaatatgaatgaaccggtagaaatagtttatcattaacatttaatatttgtatcacttgttttagcgatagaaatagtgcatcagtaacatttactcgctttatataagttaatagaaaataaaactacgacaaataaaaaatcctaaaatgaactctataaatttcaaattttatatttttgctgaagctgatatactgagatttacactcccgtcccgtaaaaaaaatatacttagatacatagttagaagttgaacatccataactaaatattgtttttttttctatggattgaagggagttgaagatgcaggcgataagtctgagatgagaccaaagcaatctgtggaatgccgatggattgtagttttttctatggattgtagttttcccgagtatcctcactctggtactctagtactctacgtggccgtgtttagttgtaatttttttcttcaaactttaaactttttcatcacatggtttaaatttcaaccaaatttttaatttttgtgtgaattaaacacacctagtgttggtgacaaagtttttcactttttccaacccatgaggccatgacatgacatcaaccaaatggcgccgcaaatcgagcatcgtctggaaaatcaattcacgagtcgaacggcgcggccggtggtatatctatcatccccatctctttgttctttttttttttctgtttcgatgatttaacaatggtcatcagcgacgtcacaaaatacgctaaaaagcaccacgttttaatcctcttgtggatattatgggtaccccatacccatacggcatggttatccgactagtcataggggataacttatatctatggaatatgtaatagatcatgactcgggtattacgtttccttatatattacggaacggcctaaagtcctggtttgataatattgtaaagtagatttaggaaaccgataccgtattggttaaggtttctatcttgtaatcctgccccccaccctatataaggtgggcaggaggccctctagggggcatgatgacacaaactagatcgtcagatctataatacacccggcggattcaaatccccaaacaggagtagggtattacctctcattgagagggcctgaacctgtctaaatcctttgtctccgcatccatccacttttaggtctcgtgcgctacccccttttattattgccgaattcatgtttcgacagttggcgcgccaggtaggggttgcgtcgagtttcccatcaacaagcgcgatggaatcaatttcatgggtcgccgacttcgttttcgctttgggagttttcacttcctttccgtcgaccacttcttcaacctcctcttctctgacttgatccaaatcagtcagggggaaactcaatctgatttttatcattgtttatcatattgatttttaatctcagattaatttcttgctattttttgttgttgttcgcatataactacgcggcactattgaggcgattgatgctggtcatggactcgaggcgtctcagctttccggtcgatcggccgcgagtccactccgccggcttgtcctcgccaccgccattgctgatagcaacaacgacttcaccgtcggccaccaccgttgatgggcatcgtcatctacgccgccggtctgcctccgtcgccgccgactggtgtccccgcctatacggtcggttggtcacaccaccgttgatgggcatcgtcatctacaccgccggcctgcctccgtcgccgccgactggtgtcctcgcctatacggtcggttggtcacaccaccgttgatgggcatcgtcatctacaccgccggcctgcctccgtcgccgccgactggtgtccccgcctatacggtcggttggtcacaccaccgttcatgggcgtccacgacttcaccgccggcctgcctccgtcgccgcagactggtgcctccgcctacacggctggcctattatgccgccgctgttgggcgtctacgacttcaccgccggcctgcctccgtcgccgccgactggtgtcctggcctatacggttggttggtcacaccaccgttcatgggcgtctacgacttcaccgccggctcgcctccgttgccgccgagtggtgcctccgcctacacggtggtctattatgccgccgctgttgggcgtccacgacttcaccgccggcctgcctccgttgccgccgagtggtgcctccgcctacacggctggtctattatgccgctgctgttgggcgtccacgacttcaccgccggcctgcctccgttgccgccgagtggtgcctccgcctacacggctggtctattatgccgccgctgttgggcgtccacgacttcaccgccggcctgcctccgttgccgccgagtggtgcctccgcctacacggctggcctattatgccgccgctgttgggcgtctacgacttcaccgccggcctgcctccgtcgccgccgagtggtgcctccgcctacacggctggcctattatgccgccgctgttgggcgtctacgacttcaccgaccggccgcctcgtccgccgccgactggtgtctctgcctgcacggctggcctattatgccgccgctgttgggcgtctacgacttcatcgccggcctgcctccgtcgccgccgagtggtgcctccgcctacacggctggcctattatgctgccgttgttggatgcctacatcctcaccgttggctcaccttcgttgccgtcgactggtgtttccgcttacacggctgacctattatgccgccattagtgggcatcttcgctttcaccgtcgaccgccttcgtcgccgccgactggtgtcttcattgttattgatggacgactttgttcccacattggccacttctgccatcaccaaggggaatattacaaagctaagtcatcatttattttattctttatatgatatttttccttttcctctgcctcactacaccaattggtcttccattgagtagtgagtcgggtgctacagatgttatatcatattttttataatatttatcttgattgcttgcgacataatctgagtacaaaagtacctatcgagttatggagttctatcttcctatgctttccgtttggtttgccaatggatggttgcctttgggccgattcctagcacccgggggctcgttggatggaccgagtaacgcaaggtgctaagtattattcggaataaatcaaaagcatagagataagataatttattttctgctcttaataattgcaaaagtacccgaatagtaaactccgatccgtgaaactttgttccattaatgacgaactcatgtcactcatatgcatgtttgggaagtgcttaggccgactcccagtgcttggtggctatgactagtcgggcagagtgtttaaacgtaatgagtcatctgctcggggaaatcaaaattgacaagaggagaaatacatatttataaatattttaaaatacttgattttttctcgagtattatatttatatcagatactactcatcctatatgtttgttctgcaggatccagatccagatatgcataaaagggattcatggctttaagcttatctcttacgctccaggaatggatcagtcagaacatcaccaccggctcgcctcgaccgccgccgactggtgtttccgcctgcacggctggcctttatgccgccgttgttgggcgtctacgtcttcaccgaccggcttgccttcgccgccgccgactggtgtttccgcttgcacggctggcctattatgccgccgttgttgggcgcctacgtcttcaccgaccggcttgccttcgtcgccgccgaccgatgtcctcgcctgcacggctggcctttatgccgccgttgttgggcgtctacgtcttcaccgaccggcttgccttcgccgccgccgactggtgtttccgcctgcacggctggcctattatgccgccgttgttgggcgtctacgtcttcaccgaccggcttgccttcgccgccgccgactggtgtccccgcctgcacggctggcctttatgccgccgttgttgggcgtctacgtcttcaccgaccggcttgccttcgccgccgccgactggtgtttccgcctgcacggctggcctattatgccgccgttgttgggcgtctacgtcttcaccgaccggcttgccttcgccgccgccgactggtgtccccgcctgcacggctggcctttatgccgccgttgttgggcgtctacgtcttcaccgaccggcttgccttcgccgccgccgactggtgtttccgcttgcacggctggcctttatgccgccgttgttgggcgtctacgtcttcaccgaccggcttgccttcgccgccgccgatggtgtcccgctgcacggtggcatttatgccgccgttgtttgggcgttctacgtttttcacggaccgggcttgcctttgccgccacagatgggctcttcggttggcagggctggcatttatcccgccgttgttgggcgtctacgtcttcaccgaccggcttg

SEQ ID NO: 6997 - DNA, 2382 bp, Oryza sativa
  unsure (1)..(2382): unsure at all n locations
ccgtgtgnttacgagatgcaagcatgtgccnnnnnnnnnnnnnnnnnnnnnnnnnnnnnnnnnnnnnnnnnntggtgttatgatttgtgtcagtaaagcttatatggcgttcttacaaaaccttgtatgcattttgttcacagtaatattttattttaattattctttgcttgattcttgtataagatataagattaatgtgcaaaatactgcagcattgcaactgaagattgatactctcatgttatatgtctcaaaaatgcatttaggggccctgataaatagcgtcatatcatgttatgtctagttgactccttttcgtgtttttaccaaagctcttatgtatttaattgatctgtagtgttttgtaattgtattcactttactctttctccatatttgtcaataaagttattgtatatttgtattcatgttattaattttcagcaaaacaaaggtctgctatgggtaacagccttcctgtagaatcaaagttcactgatgaaaaagagaatgacagaattaagtatgttgtgtcgtctatgcaaggatggggtgagaaaatggaagatgctgtgagtaaacttgcagccttttgtatgacaaaaaaaaggatagttctgcaaaaatttcttactgatctgtaagtaattgtgtaaaatactgtgactgacatatgccctctatattctctagcatgcagctattctaaatcttgatgataccatgacgtcattctttggcgtttatgatggccatggaggtttgatcttcattctctctcttttttttttttttttggtttcaaatcctccaaatcgtcggcataactggttacatcatgctttgtttgactttgaatgacatgtgtttatctgcgcgcatgttttgaaaactttactgtttatgctgaaacttttacctgtgaattctcaaataaatattaggctacagttctggataatgaaccaagtttgctaattagtactaatcacctttgtgcggggtgctttctaggataacatgaactgcttaaacagaaatattattttacgagggataaaacactgcatggttgtgagttaatattaacagtcatgataattaaaaggatagccactgatgaacatgttggttaatttatgtgtggtgctatttttcttatgatacctatgaagtgctgatctgctgtgttcatcacattgttttgctttataagcttctatatgcacataggagtaatcttgagccaccattctgagttgtttattttctatctcaggagctgaagtagcatcatattgtgcaaaacgatttcatattgagctttgcaatcatgaagactacgacagcaatctaagtaatgcgatgaggagtgcgttttacaggttattttcgcctagtctatatcattttgttgcactgaatgatgctgcacttgcaaatttggaatatcattgttcctgtgtaatttctgcagcatggatgaggacctgcaactgtccgatgcttggagggagttagttattcctcgtaataatggatggatgtattttatcaaggctggtgtctgtgctaacctttcgcctttcccgcaggtagtgatcctttaacccctaaacatcttataatatccatatgttgaagaagttactcaaaactgtatttgttggacagtgcttattgtatctatgaaaaaggaaatggaagaatgtgtgtgatatcgagactattgttctttcttgagatgtactttggagttggaagagatatgtttaaccctaacctcaactaattgcgcctgtaaaaaaaggtccagttagttacttatcagttgcctggtttggtgagttggacgcctgacaggttattaagttcttattgcaccttggttcttgtcatagtatggcactaccctaaactgaggtattgtttgcggcatctcttctatggttatctctttcatatacactggtttggctttcagaaatgcttttctttgtctggttgcttttgtgagctatttcttggttaacctgtatctctactatgttggaattctctattatgtcctttagtttctttcttctttttccaggcaacatatactgcgccatcatatgaagggagcacagcatgtgtggttgtcatcagaggtgaccaattgattgttgggcatgctggtgattctcgttgtgtactctcaagaaatggtcaggtatagtgactatttccttatcgaatttcttgttggtacctaatttgcatgctcacttattttcgtgcctaacatttgnnnnnnnnnnnnnnnnnnnnnnnnnnnnnnnnnnnnnnnnnnnnnnnnnnnnnngcataaggatattcattcacatgggggggcgc

SEQ ID NO: 6998 - DNA, 1236 bp, Oryza sativa
taagttgttcttcaaagatcttaaaaaagttaaacattgtatatttctttactggagcattagcaaatgtgcttaattacctggagaactgctttgatgttgtccatggtgagaggcatgtcgagggcaccttccttctggatcctgaggagcgtgtccaacaggtcctcctccatggcgcaatcatcacgatgcggctgcgcagccatggcgtcccttacctgctcgtgctgccggaaggcgctctcgatcagctcgttccccttccggatgctcgcctccgcgcggcgcgtcatgccgccgacggcggcggcgatcctcgacgacgggaacaggtcgtccaggctgaaccccgtgaagctcctcaccgcctccgtcatcgactccaggaactcctcccgcctctccaacctgtccccgatcaccacgcgcatcgtcgcgtccgccacggccgcggcgaccagcgcgctgacgttcacggcgtcgcggcgggccggtggcgacgacaacgaggcggcgacggccgcggcgaggttggcggcctcctcctcgcgcacgcggcggaacgagcgcacgcgccgggcgctgagcatctccacgacgcacaccttgcggagctgcccccacatggcgccgtagggggcgaacaccacgccctcgcggtgggggcgcagccggcgcacggtgggcggccacggccgcgacgcgaagtcgaggtcgtgcgtgcgcgtcacctcgcgcgcggcgtccgcggacgacgcgacgacgacggggacgccgccgagctggaggcgcatgagcggcgcgtcgtcgaggccgcgcgctaggtccgccatggtgcggtggacgagcggtccccggagcatcagctggtggaggttgccgacgaccggcagccgccacgggcccggcgggaggcgcacgacgtcgcggcgcgcggcgcccagcctgacgaggagcacgagagccaagaaggcgcatgcgcagatgaaccagtacgcgacttgctccatggcgaccaagctgcgcgtttagatggatctgtgagtgcaagatagaattgcaaaagcctaggccttgcaagcgtatatgtagaggtgagagtgtgagatgagttgcatttctacgtgccgacgtagtggctgaccttgctgagagataatagatttaaataaaacccggcctctgtatcccttggatataatgctctatcttggagatactattcggtgaaca

SEQ ID NO: 6999 - DNA, 4581 bp, Oryza sativa
  unsure (1)..(4581): unsure at all n locations
actcggtgcccctacattttgtacgggtaaactggaacacatgcaacaactgaaccactgcactcactagaagtctagaacacacaacagcccaaccacccaataatcccgaaataaactagaactgcaacttgcaaagcaaactgttccgagagcttaaatgattaaaacgaacctatacagcaagcgcatcagggcgccaggaaatcgaggagcacacgccgaataaacacagagatcatgaaccacaaacacgggcacagaacagaggaatttgcctgcgaaggctgcgatgagatcctaaggccgcagcgtaacacaatcccttccacggcaaatgaaatcagcaatggaaaaaccgatcgcgcagaactctgctacggaaccgatcaaccaccaaagaggaatctaagcagtgtggatgaggaggaggagggagactaaccagcagtggcgacgagatttgacttcccgaggtggaagaagaagacgacgacggcgaattgggcaatggatggtgatcttttccgggtgcgatttatagggggatcttcctcactcacacccgctttccatccacccctccactctcctcccccgccgcttttatactcgcggacgactcgtctctcgtcggcgttgttctcagctttgacccgcgcttagccgcctctctgctttgccacacgcccacacccaccaaccctgctcgcttactgttaccctaccaacatagtataaatcaccaatcttataagttattttttttaaaaaaaatagcgtcaatccgattgattgaactactaatataatccatccgtttcacaatgtggagagtgctagaatgacttacattgtgaaacggaggaagtatataaaaaatgtgaaccgtgaagcgtaacgctgtggtagaaccaagtcaggttcaagctctatatttactcccttcggattgataatacttgtcgttttagaccagggtgagatcaaatcttttattatgaatcatttttaaaatatttatctttcaaatatggctactatatgtataaattagtcttaaaaagtagtttaataaaattatatatttgttaatatttttatacacattataatgaaaaataatggtcaaaattatttttttaagactatgcctttgtccaaaacgataaatattatccggagtaacatggatgctcgtatttatcaatactgactttatcaatttgtaatgtatttttgtcaaggactacgtggcaacttcatcaatatatactgtgtttcaaataaaatatgaatgaaccggtagaaatagtttatcattaacatttaatatttgtatcacttgttttagcgatagaaatagtgcatcagtaacatttactcgctttatataagttaatagaaaataaaactacgacaaataaaaaatcctaaaatgaactctataaatttcaaattttatatttttgctgaagctgatatactgagatttacactcccgtcccgtaaaaaaaatatacttagatacatagttagaagttgaacatccataactaaatattgtttttttttctatggattgaagggagttgaagatgcaggcgataagtctgagatgagaccaaagcaatctgtggaatgccgatggattgtagttttttctatggattgtagttttcccgagtatcctcactctggtactctagtactctacgtggccgtgtttagttgtaatttttttcttcaaactttaaactttttcatcacatggtttaaatttcaaccaaatttttaatttttgtgtgaattaaacacacctagtgttggtgacaaagtttttcactttttccaacccatgaggccatgacatgacatcaaccaaatggcgccgcaaatcgagcatcgtctggaaaatcaattcacgagtcgaacggcgcggccggtggtatatctatcatccccatctctttgttctttttttttttctgtttcgatgatttaacaatggtcatcagcgacgtcacaaaatacgctaaaaagcaccacgttttaatcctcttgtggatattatgggtaccccatacccatacggcatggttatccgactagtcataggggataacttatatctatggaatatgtaatagatcatgactcgggtattacgtttccttatatattacggaacggcctaaagtcctggtttgataatattgtaaagtagatttaggaaaccgataccgtattggttaaggtttctatcttgtaatcctgccccccaccctatataaggtgggcaggaggccctctagggggcatgatgacacaaactagatcgtcagatctataatacacccggcggattcaaatccccaaacaggagtagggtattacctctcattgagagggcctgaacctgtctaaatcctttgtctccgcatccatccacttttaggtctcgtgcgctacccccttttattattgccgaattcatgtttcgacagttggcgcgccaggtaggggttgcgtcgagtttcccatcaacaagcgcgatggaatcaatttcatgggtcgccgacttcgttttcgctttgggagttttcacttcctttccgtcgaccacttcttcaacctcctcttctctgacttgatccaaatcagtcagggggaaactcaatctgatttttatcattgtttatcatattgatttttaatctcagattaatttcttgctattttttgttgttgttcgcatataactacgcggcactattgaggcgattgatgctggtcatggactcgaggcgtctcagctttccggtcgatcggccgcgagtccactccgccggcttgtcctcgccaccgccattgctgatagcaacaacgacttcaccgtcggccaccaccgttgatgggcatcgtcatctacgccgccggtctgcctccgtcgccgccgactggtgtccccgcctatacggtcggttggtcacaccaccgttgatgggcatcgtcatctacaccgccggcctgcctccgtcgccgccgactggtgtcctcgcctatacggtcggttggtcacaccaccgttgatgggcatcgtcatctacaccgccggcctgcctccgtcgccgccgactggtgtccccgcctatacggtcggttggtcacaccaccgttcatgggcgtccacgacttcaccgccggcctgcctccgtcgccgcagagtggtgcctccgcctacacggctggcctattatgccgccgctgttgggcgtctacgacttcaccgccggcccgcctcgtccgccgccgactggtgtccctgcctgcacggctggcctattatgccgccgctgttgggcgtctacgacttcatcgccggcctgcctccgtcgccgccgagtggtgcctccgcctacacggctggcctattatgctgccgttgttggatgcctacatcctcaccgttggctcaccttcgttgccgtcgactggtgtttccgcttacacggctgacctattatgccgccattagtgggcatcttcgctttcaccgtcgaccgccttcgtcgccgccgactggtgtcttcattgttattgatggacgactttgttcccacattggccacttctgccatcaccaaggggaatattacaaagctaagtcatcatttattttattctttatatgatatttttccttttcctctgcctcactacaccaattggtcttccattgagtagtgagtcgggtgctacagatgttatatcatattttttataatatttatcttgattgcttgcgacataatctgagtacaaaagtacctatcgagttatggagttctatcttcctatgctttccgtttggtttgccaatggatggttgcctttgggccgattcctagcacccgggggctcgttggatggaccgagtaacgcaaggtgctaagtattattcggaataaatcaaaagcatagagataagataatttattttctgctcttaataattgcaaaagtacccgaatagtaaactccgatccgtgaaactttgttccattaatgacgaactcatgtcactcatatgcatgtttgggaagtgcttaggccgactcccagtgcttggtggctatgactagtcgggcagagtgtttaaacgtaatgagtcatctgctcggggaaatcaaaattgacaagaggagaaatacatatttataaatattttaaaatacttgattttttctcgagtattatatttatatcagatactactcatcctatatgtttgttctgcaggatccagatccagatatgcataaaagggattcatggctttaagcttatctcttacgctccaggaatggatcagtcagaacatcaccaccggctcgcctcgaccgccgccgactggtgtttccgcctgcacggctggcctttatgccgccgttgttgggcgtctacgtcttcaccgaccggcttgccttcgccgccgccgactggtgtttccgcttgcacggctggcctattatgccgncgttgntgggcgcctacgtcttcaccgaccggcttgccttc

SEQ ID NO: 7000 - DNA, 4163 bp, Oryza sativa
ccacgatctacggcgccacgtagtcctccgtccccacgaacgagttcgacttcgccgccgccgacgagcagcgcgtggacgacgaggaggacgaggccgtcctggacgtggacggcggggaccgggacgacgaggacgacgacggcgacggccgtgacgccgcggcgcggcgcgaggagaagcacccgaagacggccgcggcggccttcgtgctgtcgcgccgcccgccgcgggagcgcgcggtttgtggcggcggagccgtgtcgggcggcggaggaggtggcggcggcgggagcgtggtggagaggtcgaagtcgacgagcatgatgtggccggagtcctggatgaggacgttctccggcttgaggtcgcggtacacgacgccgaggccgtggaggtgctcgagcgcgagcaccagctccgcggcgtagaaccgtatcgcggcgacggagaacaccctcccggcctggcggcgccgcagcgcgttcaggtcgccgccggcgcaccggtcgatggcgaacccgacgacgctgtccgtggccacgacgccgcggagggaggggagcagcgggtggcggagcgcgagcagcacgtcccgctcgaaccagatcctccggtgcccgtcgccgcccggaccgccggcgacctccgcgcacttgtgcctcgccgcggcgcgggagatggccttgagcgccatgggatcctcgtccgccgtcgccgacaccgccgcggcggcgccgccggcgggcacgacgtggaagacgacgcccctggcgccgcggccgagcacggagagggccttgaggtcggcgaggctcagctgcggcggcagcggcagcggcggcagcgaaggcggcatgctcaccatgggcgcgcgatcgcgagaagcgcgcgggaagaagaagcgacgcgaactatattaattatatttggagggtttgaggtttaggtgtgagctaattcgtctgggttggcttcgtttatagcctcaagctaatcaccgtaattaacttcaaatggaagcttatgaagaggcaaagctacaataatccgtgtattaatgcctgagcaatagaagaaaaaaaatcaagttagcaacagcaacatgcaacataactgtagcttccgtctagaaaattcctgaactaattcacgtgtggtgtgaaaggcaggttaatcagatttgatcatgtacagtgagctgtcatcaacaccgaacaggaaagccaacacaaaatagactggagtagtagtaaaccgacgaaataacttagaaaagttcacctaattctcgtgaaaaaggggggaaaaatacagagctctaggctcgccattgtagtggcatatcaatctgaatcccctgaaacgcaactcacgtgcaaagtcctagtactttctttctctgtagctcatcacattcacatcgctagattggattggaaccctatatactgttcatgacagattgcgtgtactaccaaaaaaaagatccagtaaaaacatagatatttcagtggtaagtttgagtgtccatggagcacaatcacaagttgatactctgatgtaatgctgcaccgtatctaagcgcatttcacagcctttgcattgcatcggttgcatccagtgcaatttgctgaattgaggtcaatacacaggaaatattctgctgtttacgtcagtaagtgaggtgtgactggtagcaagaatctgcagggctactgatactttagcaagttgtgataaaaccggtggatgaacagaataagaacctgattccagcatgaaagggagattccacacggtacttgctactcttctgatttctgaatggttaattggcgaccgatgctgattctcaaccttttccagttgaagccccagcagtaggcatgataagaatcagcacactgcaaatagatttagttcagacaaaaagaacacaggaaaaatttgcttcattgtcaccccggttgctctggaagtgtggattaccttgacagctgggagtgacaggaaatagctgttccccctgctgaatgatttcacatgatagaaatggtgaatttatcgtctctacctgtcaaaaaatactcaaaagactacacagttgatatcagtcaccatagtatttagcacactggcaaccacatatgctctgctgaaaactgaaatgagcagcacactaaatacacaataatagcagaaaccagagcagagtgtacaagtagacatttccgcagatgaacgatctgcagtcaaattgccataacactgaacgttgttgaacaagattacaagcatgagaacttatgaactggacagaaattcagaatttataactcgaacttcactcaaacaaggtaaaattaaaagcggataactggatatatacatctcaagttgttcacaactacatgctcccttttgtggctattagaccacctaactgtgtgcatcactgcatccttgatgacaatactccaattatctgaggcagaagcagtccaatcctcagaaacatgacagtattacagcaaccagatgtgtgcattctgtgaacgatgcaaacacaacagaaccgggtctacacatccctagaaaaacaacagtagaacacttggacatggctcattagctattagatcaagatcacacagttcccgtggccagtgatattaaaaatggaggccaactgattttactcaagattagctgcacacttgagtcactgaaacttatcttatttacagcacaacatgatctcctaattcttcctttgatgttaatattccatccttccaggccgaaacacaaagttccttgccttgcgggagcacagcaaagttgccaatgatacatagaagctagtcattgtgctgatacagaatgcacctagggatacccatccgttctctccatgccagccaccaagccaaccatggcgattgcttcctgccattttcccttctggcatcctagaatgcgcactgcatccttccccgctgcatatcccagggtttccagccaatgctcctggaaacttctgcaacccatcagttgtcggcaaaggcccagataggctattgtaggagagattaagcacctcaagctctgtcatggcagctatctcaggaggtaccacccctgacaactcattatgtgagaagtcaagggtccgtagcttccccatccccccaatacctgaaggaatctgcccatccaaataattacaagagagattcaaatactccagtcccttcattgcaaccaacccgtctggtatctccccacggagctcattcctagacagatctatcccggtagctgcttgaagatcatagcccagctccaattgccggcctgccatatccgtggacactgacacaaacagctgaggtggaagcacagcctctgatggactcccctgaccactgcctccaccattaaggacggcactgacattgaacccaccatccgggatgaaacccacaaacctattgccggacaaatcaatccactgaagtgttgggaacgagaacatccaatccggtagctgaccagagagctggttaccagccagtgataagaacctcaagctctgccatttggccacagctccactgagctcccctgtgatcttgtttcctgacaagttcaccacctccagagatcggcacccggccaacggcagcggaatttcaccagatattcggttgttcgacaaatctaacaccttcaaactgtcaagggcatcaagctccggccgcagtgctcctgaaagatgattccccccaagccgcaggtacagaagctggaagcagccggcaaggccagcaggcactacaccagagagcctattacgcgacaaatcaagcgcctgcaagtaggttaaattcccaatcccagtcggaatctccccggagagctggttatccgcaagaaacaatccctgaaggctccggatggcggtgatcccgacggggatctcgccggagaagcgattgtgggagaggtcgaggaggaggaggcccgaagcgtcggggtcggcgacgacccgcggcgggacggcgcccgtgagcgcgttccgcgagaggtcgagcgcggcgaggctcgccgggaaggagaggcgcggggagagcgggaagcgaagcgcgttggcggag

SEQ ID NO: 7001 - DNA, 26970 bp, Oryza sativa
gagcacccacccgccgccgcgccgtcgccgattcatggccaagttcaacgtggtgcagaagaacaggcgcgagtggaagcaggaccgcaagcgccaggcccatggcgaccccaagaccggcaagctcaagcagcgcacggcgcccgtctccgtctccggcaagcgccagcgcaagctcctgcgccgcctcagccgggtacgcttggttacccccccccccccccgacatctttccccctactcgtgtccttctcgcggcgcagcggcatgctttgtggtagtcgtggggatttcttattttctttgttcttatttggtgggatctggtgttgcaggagcagaaggaggctgtgatggccaaggcgctggagaacaacatgggcgacgtcgagatggtatctgcggaaggtgcgtttgcgatggtcattgctgatttaattcgtttgaaacttgcaagtgattgtgaattgctccacgttctgtacttctattacactgaatagtgatgcttgttgtacaattgggaattagctctattgttgtgcagtgattccatgcaattttacagtaatattggttatgttggtcatggttgcgacttgcagtgatgtcttcttttatgctcattttgattattttgggcccagttgcaatatggcaccatttgtagtcataatttccacctcttgttggtggaagactgacaactaatgtaggcaaaaaaaactttatgcttgtagttacagaggttggaacagctgtttttcacttaaatatagtattgcagacgatgaagataaggaaagtcaggttgttgcgtgacagtgtgagtgaatatggtttattcactagattttcatgatgatggatggttgtttttgtatgtgttgattcagtgtatcaagcaacaccattctgttctgttacgatgaatgaattttactgttgtctaggtgctctaagttgtaatgttgtgaaacttaccaggctatcctagctgtgtagtagtaataatttttatttggctgtatatttactgactgctatttggttgaacgtctgctgttaacacaaggaacttatcattgtacctcacgtggttaaactagtgtttgaataaataaggaaatatgcataacattttcttgtttgcatgaattttggtcaattgttatactcctcttgtttatttttggtgagctataagaaaaaatatatgaaatattatgtttgagaatgacttagtgatggtaagccaaccatcaaggattcttgatagttaatcctaaaggcagatgtctggaataaatttcaaatcaccgttttatatttagtttgatttgccccttttcttgagatttgttggaccttctttatgtgtgtgggttccgaagtttatttcctctggattatattgaactggtgatttgagatgagattctagcatatgttgctcttggtgttagtacgttttattctaggacggccatacaatcgtacactcacacttaacaacttagtctagctagctgtctgctactgctacatgcgtatccattgttttgcattgacacaaggcaaagttatgatagggttctcaggttgttccatactaggaagcaagtgtgagtcagcatgactagagttattagtcctaagttgaccatgttatgcagggtattctgttaccatgtgtttcttcactactactgccatgttatctggatgtgctgtttacataatgatttcgttgccttgtcctctgtttaggcaaccacatgtttatttttataagtatctggtgctaaatgtgacacctgattttgtgttttttgaacaggctcttcagaagctgcaaaggacaagtcacaactgaagtttaatgtgaaaaagaactcaagagtacagatcaaaagattaaaaggcaaaggtgagttattcgtgtttgattgacctgatattttcttcataggagttgatcactctgtttacttatatttagcttttgtcctgttagaagatccattaaagctttgttgtttcattcttcaggcagaaagaaagccaagaatgcaaagccgccgacaaaggacaaagttgacgccatggtggagtgactggatgtggttgataacactcagcttctacattgttgaagggatccgcaaggattgaaaataccatgagctatcaaagcatctttactgtcttaatgtttagtacaagctagttagctttctaatcaatgtatcctactaaatacgatgatcaagacctgagaggttaaatgcatggtttttggaatatttgtatgaaagcctgatttgcatggtttctgcgtatttagtcgtgacatcctgtctgcacttcctttcacgttggacacaattttgatcgatcaatcaagcaaatcacctgactcgcatcagcaggcagcaggggcgagctcatattccaattattacattttcgactccagtaattactatttgctaaaggctcgtcttggctagctcaggatttaaaaaagggaacactctgcattgagtgtttgagaccatgctaaactcttacgttaagctattatcacaattcatattggagtgaacgtaccatcccgtggctggagtcaagcagaattcggtggcacggtatatgctctgaagtctgaactgctacaatcttacaatactgattggaagctgaaaaattcagctcgttttccctgcctgtgcagtcgcagaagtctttcaatattttgtggagaacaggagtagtgtaattatagacaatataataatgttggaacaaattatataagggaagtttctatttgggcctacgtgggctggttcaaaggaagcacattaacaactttccacgatccagtaacacaaggcttgtgtggctgacttgtgggcccgcaaacagctaggcgctcccgccctcccaatggtctaacgcgctcgtcttcggcgcgctcaactcaaaaccacgccgaccgaaaattctcctcttttcccctccccgctgctgctcctcgccctcattttttccgagcacattggtcgccgccttccccaaattaatcaccaccaatccgcgtcctctccccctcccccaccggaggcgccaccaccgcggcgaggaaattgcggcaacgcgtgtagcggcgcctgcgcctcctgccgccgtcgtcgtcccgttccccgccatcgccatcgcgccgcaggtatgggccgtctcgcgcctatgcctctaccgcacttcatcctgccagaaaaccctaaccctagtgccgccgaccagttgcgtatggatcggcgaccagccgcacgcgtgtcacgcccagaaattcacgaaccagaatttctaagctgaatgtgcattaaacccctgtccagaaccagccagggtacacaaacgacaattgttgacatacagatccacgtcttacaaaagtataaaagattacaaatgcagcggaaaagataaaagcgagctaagcctgaagacttgactcctgcagcgggcgattccattccacaggcatccttgacggcagcggcgaaaccaacttcttcgaaacatctccaactgagaaaaacttcaactctagtgtgggggaaaagagagcaagactgagtactacccagtgtactcagcaagtcatactggaagagaagttatgatgcaggatatatccaagggaggctaaaggttcttttgcataaagctagcatttaaaagcagtagttgaaagcagtaaaacagttgtagtaattaatcaatattaaccaatcactgtcaaacgctacactacgttgcaacaggcccaaccaaccacttgaactacaccagttcattagctaactaggggtgagacaatcacggtgaatctggtggaccgcccataaccgtgggcacggctattcgaatagtcttactcatatcagaggtgtacaactgtacccacaagacacagccccacaacacatttcgtgcgccgacatgccaccacgacatactggaaagaggccgtgacaggacccttcgcataaccccctctaactaatcacaccacacctcgggtttcacccccactcctcgcaaggcagcgggcagtcccccctcgtgccacggtgaatccggaagccgatcaaccggacacgctggccgacccacgcgccagcaactcgcgatccctccccgcttccttgccatcgccgccgcccgccgctgcctgggccgcctagatatgggctgtcccgcgcgcctatgcctctaccgtacttcacctcgttgcaaaaacctaaccctagctagcgcggtctaccagtcaactacgaaaggatcgaaggatcggccaccagcctcgccagcaactcacaagtcctctccgccgcttcctcatgttcaaggccatccccgatgtgcaaggtatttggccggtatctctcttctgaattctaattaccgaatccgcttgaggctttttcgatttgatcgggtctggaaacatgaagcgattatgcgatttagaaatgttgatccatgcacaaatgattgttgcaacttaggtggtgaattatacctctcccaagctataggtggataaatttgcatttgtacataagaggaataggggggagtttggtttctggattattcaccgcttcgtgttgtgttcatccgtacgagtttcatactatctccgtgcgtcgcaattaattagtcggtcttgctatgctgatatggatgtcgctcattctcctgtctgtctcttgctttccctgctgagtttgttagctgtttcatattccaaattgcctttatcttattatttgatcacattttcatttcctactatcgatcgaactattttgtttcctctagtaaccatttaatagatttggagaatatgtgtatcttattaatcgatgtttttgtgattgtgcatagatcttccccaactatctttctctgattaagtaacctcgatactgagcttgtgagatcactcggacgattccactttttttttttaaaaaaaataaacaaatgcagaagctctgtttcattcattctcttagattccacgtttcggtttatcccgaatccgagttccatttttatagccatgagctttttcgttgttacaaaaggatccacaagaattataaatgttttcagcttgaatcattgtttgaatttgctctgataagcttcaatcatttcagcttggtcttaaaatgaaatttcatcatttattcgcttgtggtgaagaggctaatgattgcaacccaatccacccaacttcaacaccaacagttatctatgtccaagtgccagggtatctatcccagaagaaaagggtgtctggacaaaatctgattgtttcaaaggtccagaaagttcttcctgaggaatcaagaataaagtcagatgctacaataaaatgggcacttcagcttcatagtgctggctattctcttagtggaaaatttcaggcctctgatctctgtgtcgatccatcaacagaattaagtgtttagtcacaaagagtgctgcttaagaaagcaactatgaagaacaaaaggaaggattttaaaagattgaggctaattatcaagcaagacatccttggaatcaaatgtgaagctgacctcccaaatgatgtcaaattgctattggaccttcttaaagactatcatgctagtgactaggtattaattgctcatcacccggggttgatgaatgaagataacaagatttctactatattccacataatattcactgaacttgaagctctaatggtaacagatgccgtgaagtatcagcgcatcatctctgctttggcttcgctgtatggaaatggttgctggaaaccttacgcctattgcaacaagcatgtcaagggagtttttgttgacggctgttaaatacaaaattctcgccgtcaatacctgcataaaaccataaaagtaaaacatccaatatagtgataggatttatttctaaccatttccacaaatgttggtgtatattcgtatgcaggtaatcaactaccaaagatgggaaagaatgagcatgaagaatacaaatatattttgtgctgatggacccacaaggttttgagctacagcatataaaatgtgcaatcattttgagccaaaacatggtgtaccataaagtggggcccacatgttagcattctgaagaaggatatgggccaggggagccggccacagttggaccgaacccccagctggcccaatccagcccaacttcggcatgatagttgtacttctcatcctatgacggttgtggccgttaataccggtggaaaccgtcatcaaaagagacacttggcaagagaaggatgaatatgctatttggattctatggagaatattccttagcatctccactctctcaagtcacctccacactataaatatccctctcctctccctcattcacacacactccaagcttgagctgaattataagaggctctattgtactactttgtatactagaattagaaagagagtagagtagaagaacttggaggaattccggagttctcggtaatcctctcctatttcttttattctgttaattactctattttcaatagaaatatcttcctgagtaatttagatttacttgcaagaattatctattggttagttcctaatcagcatacgagattattgttcactataatcaactaaattataataattgctttagtgagttataaacactagagtagatattaattgcttacatatggtgtttaggtaatttatatctagtaattgttgtgtatcccacaatgcgtaggtggtaacagccctcaagagcacttaagtccttcctgttcgggtacgtagtagagcgacatttgggaacaacgggttgccagtgcctgaagtattgcgctaggattaaaattaagctttccttggacactgtttctcactagaaaatcgtctctattattggctaactttagctttgtgtccttagatgaacatgataagaaagtaatacacattccttgtggaaatcgataactaaaaatactcccgggtgaagtgccacatcggtatcttccatgcgcttgcgaattttatttgaaacgttaagaaataccaacagttttcaccttcaaaaaccgcatgaccaactatgaagattctgctgaagggttttatatctttacagaaactactttcaccatatgataaaggatcactctacgcatgtccaagaggtaaaactgtggtgtttttttgtgcacaaacagatggaacacatgttgggcacaattctcttggggctcatagttcaattgatgatggagctacccaaatagtcagttctgggtagcatattttgatgaaggaatgaagctgataaacaatggttcaattgagtaattgccaccacgctcggattttgcgtactaccttttgtcaacttaactctgtagaaagaatgattgtacggtttaaagataacattatttgtttacatagatatgtacatagaaattacagaaaattgctttgacactgggctaattaagaatgattgtacggttcaaagagaacatcattcgtttacagtgatatgtacatagaaatacagttacagaaaattgctttgacgctaggctaattattttggtagtcattttttgcttagcagtagggtcctctttacttaaaggttcggattaaaaaggattaatggcaaacttgtttgcttgtcctgatacagcctcttttaactatgatatttatttcttctgttactggtctgtatttgcgaactaccttgtacttattgttggtttttgtacatctgcaaaactatgcagcctgtagtttggctactaatctttgagtatactgttctagttacaattggtggtgtgatatgctctcatgatcaacagctatacaggttgtgatattactgcatggtggatattgtttgctagtttctaggagtacttgatttgatacaaacaaagcccactttaggtatcgtggcgaatggctgtattaaagtgcgaatcatgtgtcctgagaccttacgttaccagatccggcctgcacttaattggaattgtattatttctttcgattattctggcttaaggattcccgtattaattgggttacttctatcttctcttccaatgctttgttttgatgtagctctgtacatgctttcagtcaacaactaaatttgtgagtgcctgtacattctgcatgtattcagttagctcaactaaagatataacttattctgtgcacgttcatagggttgtgtcattgtgtgcatctcagctcttcattcatcctcatttgtactagttacgtgcttctcaccagctcggcaacaatgggacacatcaggaaaagacaatagaataatctatgatagaatatttcatgttatgcacggtttcgatttcagagcatcagatgcaaacctaacaggccggacacatgtcaacatgctatgatcggttttcaccatagaatcagcacaaaaatctgcatttgttaagatagtgactgctcataggcattttggcagggaaactgtgatatgatggaaatgagatctttctacaaagcataccgtttcaaagtcaaattacaccggtttcagttaaaaaaaatcagattattacattatattgcaacaaatagtgcacaatgtttcaaaacaatggacacagaaaatactttcatgaagtcactgttcaaaatttcaaatataccatgtttgttcatcgctacaatttttccaaacttgcttacagccacagttatcaggtaatgctattaaggcaaggatttgatgaaattaacaataagatagatgtgggcatcaaaagaagggcctccaaatggatgttggcaccttctttaatcaactgtgtatcaaacccgtctggattcatagacttgagtatgactacgtcatcatgatgcctgccgagtaggattgaggacatcagaccacattatgggtactcaacaggccaatactaacataaccagtcatctgttcagccttatcatctgcagatattggaattggtgcccctgcatcaggaagttacagttagatgcatgcccaaacatgatctaacagctgtaacaatggctgaagaaaactgaatggataactacattatattcatccttcgatgcaaacagaaactatttcattggtctccagtcactaattcagtaacagttgcagtggacatggttgacataataaaatcttgatagtgttaagcaagacaaaaaggacaccacattattcagtactcatgagccactaagttttaggctagattaagaatgatgtagtaacatgtatagcacatccaagcgactttacatttcctacaaggggggatttactgaaagatagtgttgctaagctaacaaagaatatatatctttttccattagattttcttatggagtggctcactgatgttcagattccaaagccctaaaaaattagataaaacctagcactaattccagattctacgcatgaagtatctaaagtggatagaccgaaatagcaaaatgccacatcatttggaattattccattgtgaaaatgatagatccacaatcccacaaggctgaaaaaagcctttgcaatcacacgttctaaaagaagtagaagattcaagtacatgaaagatagcatacaagtagaactaataattcagtgcaaaaggttgtctagcagaaaattacacatgtaaattaacaaaaaaaaaactcccttttactcataattgtctaactttggcaggcccttactaatataactgtggtggcctcaggttccgttgtgccaactttaggtggcaatccaaacatgcccttactctatcaaatcaaataaatgagcatgtacaccaagtatgtataccaagcacgaagggagatattatctttgagatcacaggcagagaacgctccctttgagattgaagccttttattgacttccacctacaatttagctaccttttgcttcctaagctgctcatggaacttgttggttagtgacaatctgtcaatcggacaacacaggagcaagataattgtagaattcattttgtaatatcaagttagaaagatcacacccatgcaaccacatgataaagtggtagctatattacggcatacatccaaaacgccataggactctttagatgatcatcgtaaaccgttgcaatttcaggcagttgataggatccaatgtggtggcattttgcaattcgcagatcttcgtgcttgtcatacttgggagagaaagtagttatccgaagcagataacgaatgcgttgaggcaggaactccttccaaatgtccccttggtgattgtcaatcgatagatactgcacgaggcagaccatactcctgtcaccacccatatgcacaagggttgcgccaatgtgtttctccgcggtgtccacgcaaaacagcctctccttactgagcttacaagctgggggctgcccatcatcgttgtcagctgataaaacataacaggcacagatgtggccaagggtgtccggatcacaggacaacccaacctaagcatccaggtcatggtcatagtagccacgacctttgaacggcaacgcccatgcaccatgctgcgtccaccgggagctctccaagtcaaaggagaaggtggcaagaaggccggtgcgcttcttcatggaatacttcgtcatgctgaagaccatggtccgttggtcagggtgcacgccatgagagatcacattgtggaatggtggcgatggaagcgtgcaccatgaccagtcgaacttgaccttgacgcctacagcaggtccattatctcgcggtggtggtggctcacgaagcatctcgaagatgccttcgtcgatgatgaagagcttcccatccacctgcacgtaggcacaacagaatgggctggtctctgagtcacaccgaggtgaggaggtgagagtgacactctcagcataatgggctggctctcagcataatgacgctcgtcggaataggcttgcgtggcggcgtggacaacccattcaataggggaccaagcataatagtcgagcagtcgtgggctcacctatcgagggtagaccatggaggaagaggactatgatagagcttgatggtgtcgtgatgaggaaaaggaacacattgacaggaagcgaaggacctcgccagaacttatggaggaagtggaggaccatgatagagcttgagaaggaagaggaacacattgatgatgagcttgtccatgcaagaaacaactatgacatatagctattgctgggaaagaaggggtcatggtaggctgagggtcaaggatggatgtttttcttatggtgaatcacaccttattttcatcactatacacgcacacatttgcagtactagttacggtcacttgacatagtgctacattatttctgtcctcaacaataaacaatgcacattttctcgttcggaagtgtcgggatcgaggtccaatctcacccacccaaaatgcttgaagtcagcagtccatactttgccgtttatatgacatatgctcaatctaaagacggataaatcattgaatacctgagcatcatgccagcccacctaaaatacttaaaatcgaccattttctccatgatgctagttgatgatttagcacttctaaatggagaatatgtcatcctaacccatacattacgaattcagagaagaatctcacatatcactatgaattcatgataaatgagaatctaaaaatgacaaatcatcatttttctcatgcagttcaggaaggaaaccacaaaagcggcatagacgttccccttgcgagccatatactatgcatgcgaaagattttattattttttaaagatttcataaaaccccatatttattgtcaaatttgtgcaaaaccgctgatattttgtcttgtgtctcataaccatatattttatggtctaaatgtttcataaaacaccatctttatttaaatttcagttgaattcaatatatctaaaacaatatattttaaaatggtaaatagttaaaccgacaacctcaatcaagcaatcaacaactaaatgtttcatatacacgttatatattttatgtttaaaatttttagtaaatacttgacaacaactccctccgaaaaaaaaggagataaactctaactatctgatacagcagctagagtttactttttttttctttaagaacggatggagtatatatatatatatataagggtggggggttttcaaaactttaaagtgttaggtgccgctggttataatacctgtggttttatatgcaacttgcatcataattcataatgagtggggtttatcgaaatttcgctctattttgaacgaaccgagcaaataattcgtgattcgagcaaatataaatagacagaaacacccgcctttcctttccttgcgcgcactccctcctcccacccaccttccccccttctccccttccccctcacacctttcgccttcacctacacacaccggaatccgagatcccggtgaccgcgtctcgcacgcgtccccctcccttccccgccgccggatccagcccccgcgcgctcgccggagtcgccgccgagctaaaccgcgcacccgtcccccgcccccgcccaggccgagcccccgggtctccgcgcgcacgtgggggggacggcgccgacgccgacgccgcgccagatctgagagatccgcaccgacgccccccatcctcgccttccccgaggcgtcacgccagatcccccagatctggaatggtggtggtgttgttgctgctgctgctgccgtaggtatgcttaggtgagtccgtgatcctcgggactcggtcgccgcggcccgcgggtagtgggagggaggcaaacctcgtcgtcggcggcggcggcgtgaggtgctgcggagaggtggtcggggaaggaagatgcagcggaacggggtggtggaatgcagcgtgtgccggtcgcggctggtggtgccgagcccgcggagcgtgtccagggcgtacgacaagcaccgcagcaagatatcgtccaagttccgcgcgctcaacgtcctgctcgtcgtcggggactgcatccttgtcggcctccaggtgtggcttcaccctccttgtagctatatatttcattcaagtatccaaccgctaggtgtctgtgttacatgtttagccaatcccaaatactcggtagtttggtgaaatggtctgacgaaaattcctgtttatgcttaataatcatcctgagcctggagagctgtactaatgatttgctttgtatctgcagcccatcctagtgttcatgtcaaaggttgatgggaagtttcagttcagtcccatcagcgttaactttttgacggaggttacaaaagttgtctttgctatcgtgatgctaataatccaggtgtgtacttttgctgatgtttcttggtgtgcttgcattctgatgatgagtaatttaacccctataaaatgatatgtagagtacacttatagtttgtcttgatggctttggattggtaaaatactctgttagttcattagatcacttgtactcttacatgagcagcctactgaattcttctggtacaattcttctgcgtccaatttcttatagtacattcgtgtatcagaagtgattgcacatttaaaaaaaatggaaggagcagcaaatttgtgctaatcttccaaattgataagctcaactaatgcagaactaaagatcacaacaacagcctttcaagatgtgaaagcagtttcggttgatattctatgtgctacctgcacttcattatctttatgcgcaatttagcttgtcagcatgttcactgttccttgaaaatttgaagtcctacagattcgcaattgctatgctgcaacagatgtacattttatgccttctatatactttccattatgatcctacctcttacttgtttaccttctcgatgctgctttctgtgtggcagtctagaaagcaaaaggttggcgaaaaaccacttctggcacgttcaaccttcatccaggtgatttgttttctgctttcatgacttatatgaaccaccagtagaacttttttacatactcatttttaaataccttttttctttaccaataatttgtttccgctacctatgttctaacataatactgcttgttgcatgtctttttgtgacattgtctgatcatctgactctccatcattttcatatgtaggcagcccgtaataatgcactactagcggttccggcccttctgtatgccatcaacaattacctaaaatttatcatgcaggtgaatctgaagccatagttgtcgcccttctatatacccctctattgtcatcatccatgaatatatatttttatgttgtctgacatttttgagctgattatgcagctgtacttcaatccgtcaactgtgaaaatgctaagcaacctaaaggtacatattttatgcactactcaggtgttgtgcttttcttattagtgtgtatacgcatatatcataccttttgtaatccaaatttctctaggtgctggtcattgctgttcttctgaaatttataatgaaaaggagattctccgtaattcaggtaagcttgaggttgtgttgcagttatttctgactttatatatataggttgcattttgggggtaaatataaccaaatttttgtgctatataccatctgttagtcttctaccactatagtgcaatttaaagattactgggtcatgtgttcactgctttgtgttacatatcctctatagaatcatattgccagtattcggctactttgtacatagagatgctttaggagtattagtaaactcttaaataaaatcaagtgtgagagaattttgtaagtgattttgcatagtaaagctgagtctcaataaagctagcagtgatagtgaatgtttgtctattgtctttgtgtcagtttccactggtcttatggtatgtttcaaataagtctgcatcacaatgctaggttcaacttgtactttactagaattgccatgttttatcatttaatgttgatgaccataatcttcaatctggattacttgtaactcactatgttactgaggtatattacatgacaaagtgccttttgcatagctcttacgcaacattctagcatcatcaatcatgctgattttctcctgctctcttgccccccttaattttgtcagtgggaagctcttgctctacttcttattggaatcagcatcaatcaacttcgtactgtaccagcgggcaatactgcatttggccttcctgtcactgctattgcgtacatatacacactgatttttgtaagtagcttccacaccatttgacctcttaggatttccattttctttcacttcattttctcagctctctcaacagacaatatgctttaaaattatttatattctcttgcaactgtgcattgtaggtaactgttccatcattggcttctgtctacaatgaatatgccttgaaaagccaatatgatactagtatatatcttcaggtaaattacgtagtattggaaatttattgagtaatgatctttattcttctatccaactatctacttatttcgtattagctattttgtttagttgtccaagattgtattttgtagtataaggcatatgatgattcttttttttatccgcattattcttgtcttttgtttgcttcactgttctttttatatactttgcagaatttgtttttatatggatatggtgcaatattcaacttccttggcattcttgggactgccttattccaaggtacaattattttttttggagtgttatcatgcatgatcaatatttttatcagtaatcagcgtcagattctacaataagacaaccattaactgtcttatgtggtcatattcatataatctttagtgaacgccatgttgtctaatgttttgacaatcaaagcaccatttctttgacataatcatctcctgtctatttgcagggccagagagtttcaatattcttcgaggacattcaagggctacgatgtttctcatatgtaataatgctgcgcaaggcattctttcttcattcttcttcaagtatgcaggtaaattccgtgcgtacttttttttagtttcctgtgtaaacactatcatttgctgttccgcctatattattctataaatttatatcttcaaattgttaatgttataatcaatttgcagacacaattttgaagaagtattcgtcaactgttgcaacaatttttactggtctagcttctgctgccttcttggggcataccctgaccattaattttctactgggcatatcagttgtgtttatttcaatgcaccaggtgagtttgcctgcttaactaaatttcattgagacgacattttttgtcttccatatacataactgctatctgttctcagttcttctctccactcgctaaagccaaagatgacaaaccagctgaattgttagagttggaagatacacagaatcatcggtacgtttctaccttgttttaaatggttggatcatggtacttgttgccatatttttttggttttcaccttcgttctaatcaacaaatgacaaacaaggttatagtgactttaatatgtactgtgcatctagatatgtgctaatttccaaatatttcttgctgcattacctcataagatacatattatgttgcaggtcatctgaatcttcttttgtaaatatgactgctggcgctgctgaagatgtatgtgactcatttatttctaaagaaaaaaagattaatttgtgttagaacaattacattattagttgcacattatcatttcaggccagccataggattggaactgatgagaggcaaccactattgccaacatgaagtatttttttgaggtacgcatggcttctttaaccagaacttttagtttggttgatgtggcttgtttgctttagtgactagtaatatggcacaagctaagatatgaaattatggacaagtaaacagagacgtgcttgtgcccacaaactggtggatagaataactagattgatttgcgggaattaggcagagacagactctccgcatagattaatagcggcatcaaatgtgtgacctgaatatctgatataaaaccgaagctcccattgtttgggtattgggtcataagttttaagaccaaagtgacctgataaattttacctgtaagttagtctgatatgggttccagaattagctttttgttcctaaaatggaaggaaatcatgaaatagtcagataccttgtgggtgtgatactttatctaattcatctgtccagaactaagtttctgaaaatgtatgttcttttgtttctgcaggtagtgtagaggacaattctttttgccatccaacttggaggcagcagagtttatatagcgtggcgagtgaaataaactattgtacactgtaaaggcaaagaaagaaacatcgatgtatttttcccctttgtcatttttattatcttttgtgatagggagggttgtcagctgtggcctaacgagtgtggcacaacattttttggataggcaaattccacatgaatccccagatacgatactagtataaagcaattttttccctggatatgtatactcaaatgtatcaatgagttactgttgttatatggaacttttgtactatcacactggtgttacatattgaaactagtcggttctagacttaccatggtagctatgaatggccttgagccatctcttcaccattgcatggtctgtcttttgtgcctgttctgcctggagagctggataaagattgcatataatggagatccaacaagcatttgcatagaagcgaggacttctccgtctaatttatgctcaataaacttatctgtggtgcttgctattcatcagtcgtcacatctgaaattttctcgtccttggttgcccggaccattcccccgggcacatggcgctgatcacactcaatactgtggatattgttcataggcctaagattgtgagcggatggtgcatatttctcctaacgcaacctctgcattttgtactctatccatttgcttcaactcgccaactcgcattgccatctagcttgtgatcctacgcaagcgcgcgaggcttggtgtccagtccgaatccgaaccaatcctactcggatttttgggagagtccgattcgaatcttactcggagacggtatcagccatcgggccataaaagggcgggaacgatcggcgcgcgcgcccttttgtcctgtctcgatcctgcattcccgccacacgttcttggcttcttgctccgccaccaccaggcgagagcgagcgagaactctcgagatcttcgtcaccaccaccgtccccggcgatggaggagatcatcggccgctcctccccgcgcggccacggcggctccggttccctcctcaggaagcggtgccggtcggagatggaggcggtgcgaggcctcctcaagaaggcggaggcgctggtgcgcaaggcggcggcgggggcggcggcgcgccgcccgctccctcgccgcgtcaaggacaaggaggccatgaccatggcccagaaggagcagctggtcggcctcctgtcgtcgctgccggcggggatcctcccgtcgcacgtcgccgacttcatgcggcgccggtgcagctggcgcgcggttcccggcgttgacggcgacgacgacgagctggagatcgatctcggctccacggaagacgccgcgctgttcgagctgaggaagatgctcgacgacgaggccgccgttcgccgcacgtcgccccgcggactcgaggacggcgaggtcgccgatgagtacatggacatctgcggcggcgtctctcccctgccggcggcggcgcgcaagcctcctcctctcgccttatcatcaccacctgcagccgcagagcaagaagacgatctcatcgacatctttggcggcgactctcctctaccggcgcacgaggatctcctcgacgcgtcgccgctcgtcaagccagaagccgacgagttcgtcgacatcgacggcgacacaatcgacaagtcgccaggaaatcctagctcaaccaccaccggttcgagcagcggcaacgcctccggatcatcaagcacatccgcctcctcttcaggcagcgactccgactccgacggcggcggcgtcggcgacaccgcgagcagcaacccaaacacagcaaaccatctccccgtcgtcgtcgtcgaagctgtggccaccaaaccattggagccgcagccgccgcaggtcgccgaacaagcttacaagatgggggagaagctgacccggagccggagagaagcagctccagctccggctccggccggtcggatgagcgagctcatcgccagagcgcaagcggagaggctccgccgcgacgccgagaggaagagggcgcgcgaggaacaaccacgttgatcgggatcactcatcggagtagagggcatcgtacggagaaattccggcggccggccaagccgcggcgtcggcttcttgatgagcggcaactcggattcatcaatgctgtactctgcaggtcctgcagattgtcatactgtcacattaggaacttgtactgatgatcaaagagatgatcatccatataccatagtgttgtactctgtaggtcgtagttgtaaaatcttcttttaatatatatatcgatggagatggattctaatagctggagtggacgtccactcgtttattgcatgtcaactaaatggttatgaaaaatttttcaaaaaaaaaaataccaagatagatcaatatgtaatatatcactccaaaaacatgcaagttcaaattcaacttctacaagttgtaacaaaaacaataaatttaattgtaaatatacatataataatttgagttttgtttgttatttttgttacaacttgtagaagttaaattttaacttgcatgtttgtggattgatatattacatattgatttatcttgctcatatttttttaatttttttataaccatttagatgacatgtaataaacgggtggacgtccactcgagctgttgaaatagtttcccatatatcgatgtgcaaagcttttgcacgtttataaaaaagatctcttaattacttcctccgtttcatattataaatcgttttgaatttagtcaaacctttttagatttgattgttttatggaaaaaattagcaatatctaccatactaaattagtttcactaaatgtaacattgaatatattttgatattatgtttaatttgtgttgaaaatattactttattttcaatcagtttgatcaaacttaaaaatatttaactagtaaaaaaagtcaaaacgacttataatattataatatgaagtggacggagtattgttctcacgtttgtaagagtcgagcaatttgatgtgtccggtcatctggtgtatataaagatttaatctttgcagccatttcgtgctgtaatctgcgttgttaggagcatgtgctatttttcagacaatgattacgcgagccaatttgtgcattgaaaatttagaactgaaccaaacaattttatactctgtatccgtaggctccgagcttgaggcacattggaaactttgtactgatcatgtgtttcaacactattgttgcttaatttgggaaacggattctaatctcgacagatatatatcctcgtgtacctttgtgtgcaaatagttgtaaataattacattgaatgacctccttcggtcattccggtaaaaaaaaaagttgtaaatgtatattttttaaaaatatatagcaacatttatcattccactaaaaatcaattcaaattcaatatacagttgttcatttatttctcaatgtgtgagttgagtttggaacttaaattgcatgttgcaaaaaaaaatgtcaaaatttttaaaggatttttttatagtttttaacgggaatatcctcgagagatcagcgtagtttcatcttaatccactagcaaatcagcaaaatacttttaaactcttgagggaaatgtctaattgtttgctcaaacaccatgcaaatagttataaagaaaatctcaaaatatttgacaacatttattcaatatatatacaccactccacaaaaccttaggcctaaactcaactcacacctcaagaaattaaaaataaaaaaaataacgtatgaacaaatatagttcaaatttgtcttttttacttctaaatgtgtagattgagtttaaagtttatttttagtggaatgatagttattactccatccgtttaataatgcgtgggcaatgctagaaagtcttacgttacgaaacggaggaagtactactctacattgtcaaattattttagattttttcataacaatttaaattaaatttaagagataacactacactccttcgagattttagaatccattcccgccaaatcgatgtgctaggaatgcgtgtagtgtgtttgcttgctatgatacgaattgtgtcaaacaatatttttctttgtctcaatcatatggccagtcattcatatgtgcttgacaagaatatggctacagaaaatcttcagatgagactccaagctccaggactgatccaattttggggatcccagcttatctgtagcagtacgtgaaacatagacacttaagcagcacccaaaccaaagcatgcagaaatcaaaatacgggcatcaaagtatatatatggtgttacgtctgtttgtatgtgcgtgtgtgtgcatcttccgtgtaattgtaaagaaaaatttaaatctgaacatgtcggggtttttgaaaaatagaaaatccaagtagggatgaaaacggcgcgagtatttcctgaccgctggcctgacccgagacttgcaggaagaatatgggagacaaaatgggatgctcgatattatcttagtgttgtatctgaattcgtaaaataatatgggttaggatataggaagagttgtatcttcccatatatcccatattatgaaatttgtataaaattctattataaattcacctataaacatgatgaaatattggttagtaactattttgcgagttcacgtataatattgtacaatttgctccttgatatatctcgtcttcttatattaaatatttatcaattagagatacaaatagatagtatccgtttccgaatccaattcggaggaaataatatgggatgagtgaaattttacccgatactacctataaccaattctgaatttgaaggaaaatatgagttaggatatatgaataccatgatccgattgtgcggctcgttttcaccccaaaatccaagaaataccatggacaaacatccaagtcgaagaaatgtcatcgacgaatgcgagttacataaaatgccatcatacaagcgattttacccccaaaatatcgtcgtcattagggttccgttcatcctataacaattaacggaaaactgctaaccgaaccctaacgctgatgacatttctaggatgaagtcgtttatacgataacatttcattaaactcgtacttatcatttattggaataagacgtttatcaatgatattttttggattttctttttttttaaaaaacaaagtcaaatctgaacatgcaaaatccgtatcaacatcaacagggaggttagcacagacctctgaataagtagcatgatcgtaaaaccaaaaactgcatcatgccaatgtttttagtgccagccaaagctgaacttgcaaaatccaaaatacagtagttctaaaaccgaaccctgcatgcatgcctgcagcaaaccaatgcacagttcatatgcaagtcaacatgtcctctgaattctttcgagagtgctataaccaacctatcgctaacggttttgatatgaaaatttttcaaatcaatcggccgaaacactcgcactttcaatcctccctctcgattgtaacattttggatccttttgcagccactcgagagctacaaatgacaggttcaattttgtcaggcaccaaaattttgtcagacaacacattgaaacgtgtgacgatcagttcgttataaacctgggacgaaattcccgcgctcgccgcatgcacgctcgccatgtcacgcgccacgcatgcggattccgaactaagggcctatttggtacagctccaacttttaaatataactccaggagttgtctgtagtgaagttgtggagctgcctaaacccagctccacaactctagtatattttgtgagagagctccacccaactccactcccaattttggtggagctgaaactgtttggctgagctccagctccaagaggggtggagttggagctggagctgtgccaaacaggccctaagtacgcgcttagttaaaaatcaacatcatcttggcttagtagttagcacgcgcgcttaaccctaatcaaatcggagtcggattaacacccatgacatgcacgataaaaggcgagaggcaccatgcatcgtccccgcgccacgccacctgcacgagcgtacgtgcaaactttcttccagccgccgcctctcgctctccctctcacttccgttgagacctcgccggacttcttgctgctgctgatcacacgcacgcagcgctcccaggtcccagcaatgtttgggccttactccggcggcggcggcgttccgcttccgcagatggatgctgacacctacgtccgcaccatcgccgccatgcctccgcatccgcttgcaccgccaccggactccccccgtacccctcacacctacgtcggcttcctccccgtcttcggtgatcttccaccgctcaccggcgccgtcctccaggagcccgtgccggtgccacccgagcagcgcgccgatcagccggtggccgtggccaccgagaactcggcgccgacacggccgcagctgtgcgcgccctacgacgacgaggtcgaggccaccctccgtgccatggagacgaaccccgcggagcggccgtcgccgtacttcttggagacgactcagggtgggcggatgagcgctttggtgcgcgcctcgatgatcgccttcatgggcgagttcagccggaaaaacaagctcgccgacggcacgctccagcgcgccgcctacttcctggaccgctacctgtcggtgacgcccgagtcggacgacgcgctgcagctccgccttgtcggggccacggccgtgttcctcgctgccaagtacgaggaccagtacaccctgaggaagatcgacgccagcatggtcgccgcccggtgcggctacaccagcgagacgaggcacaagatggtgtcgatcatggagaccgagatgctcgccgcgctgggcttcaacctcggcggcccgacggcgtacacgttcgtggagcacttcacgaggtactacggcgacggagaagaagagaagcagttgaaggaggcggcgcatcgggtcgccgacgggacgctgctgacgtacgggttccaccgctacctgccgtccatggtggcggcgtcgtcgatcttcctggcgaggctgcacgagctggggcatgagccgtggagcaatgatctcgcggagctgacaggttacaaggccatcgacttgatggggtgcgtgtgcgacatatacagtcaaattgcatgtcctcgctttgctcttttgcaagagtacttcttcgaggatccatagcccatgtataggaagaacaaaagagtctgtaaaagcacaagcatgcaaggcatgaatatgatggcttaaattttgcactgttgcctgtacattgatctgtaaactcaaaattgtgcgtgttatttggttgaaatatatgtgattcatcaattcaaatttataattactagcttttagtactctgatctctctacaattatggcccaaccgtggattcgtggagcacttcacccggtataacagccggggagaggaagagctacgggtgcagcggctggagcgcgacatcgccgaccagtcactgatgaactacggctgcccgcgggctacctgccgtccatgaaggcggcggccggcggcgtcgatcttcatcgcgaggtgttcgctgaaccggcccgaccggtctggactctggagcacggagctgcaggagctgacgggtacagctccgaggacctcgttaactgcatcgatcctcgccatgtagaacgtagtgatcgatgaggacaccggtaggagcagagatctcttgtaaacatgttctgttgattgttcatggttgccatgcaatgcaacttgattgaggttttttttggccccctcagcaagatcctaactagagagtctttgtaaatatggcaaggaggttgtcttcatttttttttctcgaacacgtaaaagacttatgttataaaaccggtccgagatcattatcgaaaaccaaacgagaaagaaacatcataggagatccaaacacgatgacgatactgaaacacgatatttgtttacgagattcagcagtaccctacatcccagggcgctgattacgggcactcctctctgatccaacatattacgacgtattcgagttaaaatgaccctcggccggacgtcgtcggcagccgctccctctcgctatgttaagtcgtcatatcaccatgcggttacaacatttctgctcctctatttaagagaaatcatatgatagagtcgactattgctctgttcctctattttatgtatgccttttatttttctccagtgtcatttcacacattttttatagctcttttctttcatggaactgttgaattgtttatttttacacttcaattggaaatttggaatatttgctccctcagcaggtttacagggcgctgttatacgaaagaagcaagcacatcttgtgtggtaaactggtaatcattagaggaaattagatcattgttggaatttcacagctagccatttaagagaaaaaggtcatagagcatttcagattaattggatgatttggaattcaaaagaattcctcttagcgacttagcccaagatttatgagaaaatttgatccatagcacaggaaaaaacacggtaccaaaaattagcacaacaaatttttcacttcgaccagaaacacaggagaccaattttccttcgatacatagcacttcccttgtattttaagctaatggttttagtttgcagtagaaaaaattatcctcggactaatttacccttcgaccatgtcatctcgtcgttgcagccccgtgcggagcagctactgtgccatgcgcggtcgagcaaggagccaccgtcgtcgcctcgccgtgcctcgcagccatcgcatggaccaaccgcgcacggtcgaaccaccctccagccatcgccgtcgtcgcctcgccacacctcgcaagcagtcgccgccaccgccgccgccgtaaaccaagtcgcctcgcttcgcagccgcacgcggtcgacccacctgtgaggccgtcgtcgtcgttagaggtgatgctgaggccgatgacccaatgggcggagacggagctggtggtgccattgggagcgtggacaaaggggattcggtggctggcggagaagccgatggtggagaccccggctggctccgacgcgtctcgctgtccaccaaagccagcggccgcctcaacgtgtcagcccgagcacttgcctcccttggccacgtgcgcgctggagtcaccgccgcctcgcgctgtagcggccccctccaccgccgaagccggagggccttgctagatccggcgacggcagcgccggatctgccgccggctagccgggagacctcgctgccaccactcaccgacaccggcgaacg

SEQ ID NO: 7002 - DNA, 14165 bp, Oryza sativa
gaggaggagggaggcgaggtggtggaggggagaggcgttcggcatgggggggagttggctgggctgggctagggtttgggcggcgcggcgccggcgtggagcggaagcagcgcaggtggtgcaggagaggagcagcagcgggggcgtgtgggcggtggtggcttccgtggggtttatttttgggggaaaggtggcgacggcggaggaatttgggggtggggttttacgagccgggggaagcgcgcacacgtgacagcggcacggctggttcgcactcgggcgtgggatgcactgtagtctgtacgtgtaggggggcgccttccggcgaatgtcagatggcacgaaaaactttttaatggtacggactacggagggcatttcactggtacaatcgtgaatccgtcgggccatctataatatgagccactcctcgtggggaaactcagcttacaatggaggataactgtggatgggctactcaaaatctgaagcaactcaatagagacactccaacccatagtgggtatgcagccacaaaaccccatatatatttttactaccctacccctaatctctctctccagacccttcttttctttttttcaccgccgcacgggtctctccctctcgccgctgccgccgctcgcctctctcgttgccggcggctgcgaggacgacgaggagggccgcctctcccatcgccggcatccaccgccatccctctctccctctttcccgtcatcggttaggggcgccagatccggcgccgtagtgggcggatctgggccccccgcggctagatcggggaggatacgatggcgggcatggcgccggcggtgacgggcaaggcgccggcggaggaggccgagcaaggcgcgcagtggccggatctcgtcgctgtcgtccccaagcatgacgaccacaaccacgacgtcgtcctcgtgctgcttggccgtgagcacgggcgcctcaagcccgtcgacggcgccgagctcgacctccgcctcctccctcgctcctcagcccgtcgacggcaccgagcgcgacctccgccgcctactcccgttcctcgccaccgctcctgctgcagcctcctcccgctcctcgccgctactcctgccgggtggttgctgtggcggcgaagggcccgagagaggggaacgggcgagagagagaaagagagagagaggagaggggtggaaggggaatctgtcgctggagacatggtggccacaggagcccgtcgctgcaatgcgtcgctcgcctttgtcccctggccgaaaagtagcgagaggcgcgtcccctagccagggcgcgcacggactcacgaggggatgacgcggatggaaagattgacggatggtgctaggggcacgacctaggggcacccgttgtagatggcctcatactactggatacttcctccgttataggggtgggtagaaaaagaccgagatcgataaatgcggtcatcaatttggtcctaggcagggaaataccaaattttgttcagtcaattgttagtctcctcggttaaatgaatagaccgaattaacaaaaaaaatgtctaaatacaacctacaatccactatgttcaataggattaaactctaattttcacgttcctacttcttctaggcatgcaatctaacaagagtctttactcataagcgcttatgatttttttatttttgtgttgaaaatttccattatttctttgcatatatgaaaatgatattgaatttcggtcaggaccgagaccaagacaaaaagactgagaccgaatttgttggtcctgatatttttgcgttgaaatttggtcttcacttttcaaagaccgaaagaccgagaccgaaattttcggtcagaccgaatacccacccttactccgtggtgttggaattggatcgtgccattgcaaattattaatttgaacaaatattactacaattcgcgatatcagctagataccattgaattttttttgcaaaattgaaactgtatcgtcgttgtcagggttatggataccacatacttaatagtagtcgactaaatctcggcaggacccaccacatatcatatcttatacggaaacaaccttaggatataggaggagttccgcataaggaaggatgaatagagttctacatgaaaacgacaaggactactcggattgtatccatattggtctctgtcggtgatatgggaccgggagtatcgtgaccagaggcttgaggcagacacaatcgcccacgtggcctggcaccttcggggacgtcgggcccgagggtgaggtgtccgccctcctcctgatttccccgagggggggtcgggtgactcctgccccggccccgagggccgaggcgccccgaccccttgtggagttagcgccacatgaatgggttgggtgaacacggtaagcctcacctaaccacatttattgcggtctggtcgaacgtgtcacgctgcatgcagcgtagtgcagcgcgttcctttatccggtctgtgaccagtcacagaccggtcagatcacgggttaggtggcgactggcggtctgacgcacgccttgccccatcccgtcaagacgaaagcctctaggcactcgtctcaagccggagctagcgtgtaatctcttagagatggcacgttagccctggttagatttataccaggcttcatcccaaccattacaggcaagatgctacatgaagaagggcaaacatgcacgttgctaagctgacacgtggtggacaaggatgactgatttgtgaccggtctgacactggtcgcgtcatcaacagacagccataatcccacgtcgcacctgtttccggcggaagtgggggtagatatgggccgtcccgtcagaagggcacccggagagcaaccgtaccgatctccgtccatttatgaagagaagaacagtccagtttggagagggagaggggcatgtggtatccccttgagatataaaaggaggaccttgcccacttagataaaaagaggacttttggacacaaggccttggccagatccgatcccagagcgattgggggctggttgacactttgttacttgttcatacacaaatccaccaaaacacaggagtagggtattacgcttcccagcggcccgaacctgtatacatcgcccgtgtctcgcgtttcttcctagctggcgatctttccacataccgagagagcttgagatttcaccctaagcccccggccgaaccggcaaaggggggcctgtgcggtctcccggtgaggagccacgagctccgtcatctggcgcgccaggtagggggctcagcgtgtgttttctgagctctcgtactcctccgtgtgcgccaagtttttcttgttcagcctaatggccgagcaagcaaaggtgcacgacctctctccgagtgtgagcggcgacgacggggagccaaacccacgccgtcgagctcgtactcccccaccccctccacaccaaaatcctaagcagggggaggcgctcgagagggtcgaaaaatccgcagcatcgccagtcgtgggtgatgcaggagaacggcgagatggggagcgtcgcctcctcgtctacggcgacggcagcacgcctcagggcgcgcttcaggctgttggcgcgctcctacgtcacccgcccgtcgtccctgacccggagtctccagcccagcgatggctggacgacgtggccaacttggtcatgacggcacagcagcgcctgggtgctggtggacggtccgccaccaccaagacctccggcgccgccactaccggctccgtgtcgtcaagacggagggcgcggcgagcggcggctgttgcacgccattcggctgtcactccctcgtcagcacctccgactcgggaggatcagcatggagagccggatgcccgcctcgacatcgagcgccggcgtaatagccggcgtactccccgcgcaacggagggcgcctcttcgtccagagtgtcacctcgacatggacgtgaggaccagccctccgtgcccccggctggtggtgtcggctgtagagcctttgtggcgagtcttcggaatgtccgttggcccccaaggttccggcccaccatcaccgagaagtatgatgggagtgtcaaccccactgagtttctccaggtctatacgaccgggattgaggccgctgggggtgacgacagagtcatggcgaatttctttcccatggccctgaagggacaggcgcggggttggctaatgaacctgccacctgcgtcggtccactcttgggaggatttatgccaacagttcactatgaactttcaaggcacttatccgcgcccaggcgaagaagcggacttgcacgcggtacagcgaggggatgatgagtcacttcgctcgtacattcagcggttttgccaagtccgcaataccataccatgcatccctgcacacgcggtgatctacgcgttcagggggggtgtgcggcacaaccgcatgctcgaaaagatcgcgtccaaagagccccagactaccgcggagctttttcagctcgcagaccgagtggctcgtaaggaggaagcatggacctggaacccctccggttccggagtggcagcttcggccgcccccggatccgccgctcagacagggcggcgtgacaggaggaggaagaagaggtcggtctattccgacgacgagggtcatgtcctcgccgtcgagggcgctccgcgggccacccgaaaggggaggcctgcgagcgacaaaaagaaagaggctggtactcccaccagggagcgcccagccggcaagtggtgctccgtccacaacacctccctccacgatctcgcggactgtcgcgcggtcaaaaacttggctgagcgaacgaggaagtgggaggaggacaggaggaaggaacgccgtgagggcaagtcgccggcaactccctccggtaaacggcgaagtgaggccaaacaaaaggcccccgctgttgacatcgatgacggtgatgatgacctaggtttccaagaacctggggccaccattgccactgtcgatgggggagcgtgtgctcacgtctctcgccggagcctcaaggccatgaagcgagagcttctggccgcggcccctactcatgaggcgacgcgccgggcgcggtggtcggaggttgccctcactttcgaccagaccgaccacccaccgtgcgtcgcccggggagggcagattgtgatggtggtttcccccaccatctgcaacgtgaagttggggcgtgtcctcatagatgggggagcggccctcaacatcatttcccccgcggcttttgatgccatcaaggccccggggatggtgctccagccgtcccaaccgattatcggtgtgacgccggggcacacatggccgttgggtcacatcgacctaccggtcacctttggtggatcagccaacttccgcacggagcgggtgaacttcgatgtggcggacctcagtctgccctacaacgcggtcctggggaggcccgcgttggtgaagttcatggcggcggtccactacgcctacctccagatgaagatgccgggccccggtggccccatctctgtccatggcgacctgaaagtcgcgctcgcttgcatggagcagcgcgcggaccacctcgctgctgcgtccaagcccgagggtggtgacgagaggcttggcaccaccgcccccaccgccccgaggcagcggattgtcacatgcgccgaggtcccggtcaaggaggttgccctgggcgacggcccatccaagaccacacggatcggtggtcttctggatggcaaataggaagacgcgctcgtctccttcctgcgggcaaacgctgacgtcttcgcgtggagaccggcggatatgcccggggtccccagggaggtgattgagcaccgtctcgccgtgcggccgggcgcaaggccggtccggcagaaagtgcggcggcaggccccggaacgtcaagccttcatccgcgaggaggtggcaagacttctggaggccggattcatccgtgaagtcatccatccggagtggctggcgaacccggtggtcgttccaaaggcgaacggcaagcttcggatgtgcatcgactacaccgaccttaacaaggcatgtcctaaggacccttaccccctgcctcgcatagatcagattgtcgactccaccgcggggtgcgaccttttgtgttttctagatgcatactctggttaccatcagattcgcatggctagggaggatgaggaaaaaactgcgttcattacccccgtaggaacctattgttatacatcaatgcccttcgggttaaagaatgcaggtcctacttttcaacgtactactcgcatttctttgggtagccaaatagggcgtaatgttgaggcttatgtcgatgacttggttgtaaagacgcgcaaccaagagactttactctcagatctagcggaaacttttgaaaatctccgctccgcccgcataaaactgaaccccgataagtgcgtgtttggtgtacctgcgggcaagcttctcgggttcttggtctctgcccgaggcatcgaggccaaccccgagaagatacgagctatagagcggatgcgcccccccagcaaacttagggatgtgcaatgcgtcaccggttgcattgccgccttaagtcgtttcatatcgaggctgggagagaaggcgctacccttatttaagctcctcaagcgctcggggccgtttacttggacggaggaagctgaacgtgccctcactcagttgaagacatatctcagctctcccccagttctagtcgccccggggccaaataagcccctactactctacttagcggcgaccccccaagtagttagtgcagcgttggttgcggagcgcgatgaagacaatcctcatttcgcgcacccccgccctgtgctgacttggcccgggagcgagcagggaggagaagcccccgagtcaaacggtggcctaaggcccctgacgaccggagtcggccctctgcccgcttgtcagacggtgctgggtgcccccgaccctcaggaaggccccgaggccactgcgggaaggccgcacctatcgccctttggccccgaggttaaccctgtgctgactcgacccgggagaaagcagggagaagaggcccccgagccgaacggaggcctgaggcccctgacgaccggagtaggccctttgcccgcttgtctgacgacgccaggagcccccgacccccaggacggccccgaggccactgtgggaaggccgctcctgtcatcctccgaccccgaggtcatcggcacagaagacgagtgcgccccgagaggccacttggacgaagaacgccccggggatgcggcccctagcgaagaggatcggccccgccgaaaggtgcagcggcctatctactttgttagtgaggccctccgggacgccaagacccgataccctcaggcccagaagatgctttacgctattctgatggcctcgaggaaactgcgccattatttccaggcgcatcgggtcactgtggttacgtcttaccccctcggtcaaatcttgcataatcgagagggtacaggacgagtggtaaaatgggcaatcgagctttctgagttcgatctacactttgaaccacgccacgctatcaagagccaggccctcgccgattttgtggcagagtggaccccggctccagagaccgtctcaatccccgaggccagcacggacccctctcagctgcctcacaccgcccactgggtgatgcagttcgacggttctctgtctctccagggcgccggtgcgggggtcatgttgacctctccgaacggagacgtcctcagatacttagtccgtctcgactttcgagcgactaataatatggcagagtacgagggactccttgccggactcagagtggcagctggactggggatccgccgcctcttggtgttaggcgactcccagctggtcgttaaccaggtctgtaaggagtaccggtgctctgacccacagatggacgcttacgtacgccaagtgcggcgtatggagcgccattttgacgggatagagcttcggcatgtacccagacgggataacatggttgccgacgaactctcacggctcgcgtcctcgcgagcccagaccccaccgggcgcctttgaagaaaggcttacccagccgtcggcgcgacccgaccccttaggggagacggatgcgcctgaccggcccccgaggcccgtcggagtccaggcctcgggacccgaagggagcgctccaagctcccttagattgattgcttggatctctgagatccaagcatacctcgcagataagactctacctgaggaccgtgaagggagtgaacgcgtccaacgcatttccaaacgctacgtgctggtagaagggaccctctatcggcgcgcggctaacggaatcctcctgaagtgcattcctcaggaacaaggcgttgagcttcttgccgacatccatgaaggcgagtgcggagcccattccgcctcgcgcaccttggttggcaaggcctttcgtcaagggttctattggccgacagctctcaatgatgcagttgatctggtccggcgatgcagagcgtgtcagtttcacgccaagcaaatccatcagccggcccaggccctgcagatcataccactttcgtggccatttgctgtctgggggctcgatatcctgggaccgtttaagcgggccccgggcgggtttgagtacctgtatgtcgcgatcgacaagttcactaagtggcccgaggcttatccggtcgtcaagatcgataagcactctgcacttaaattcattaagggcatcacggcccgttttggagtgcctaaccgtattattacggataatggcacccaattcactagtgaactcttcggcgactactgcgaagacatgggcatcaagctctgcttcgcctcacctgcccaccccagaagcaatggccaagtggagcgcgccaatgcagaaatcctcaaaggccttaaaaccaagaccttcaatattctcaagaagcatggcgattcgtggatcgaggagttgccagcggtgctctgggcaaaccgaaccacaccaagccgagcaaccggggaaacgcctttcttcctcgtctacggcgcagaagcggttctcccatccgagctcaccctgaggtctcctcgggccaccatgtactgcgaagctgatcaagatcagcttcgcagagatgacctcgactacttggaagagcgaaggaggcgcgcggccctccgagccgcgcgctaccagcagagcctgcggcgctaccatcagcgccacgtccgggcccgatcactctgcgtcgacgacctcgtcttacgccgcgtccaaacgcgtgctggattgagcaagctctcaccaatgtgggagggtccgtatcgagtgatcggtgtcccccggccgggctccatacggctggccacgggcgacggcacggagctgcctaacccgtggaatatcgaacaccttcgtcgcttctacccctgaggggggggtcgagtgtcaggttttggctcgggccaaccccgtacccccctcgggtgtgcagggttagccggggggctaccacgcatgcacattcttatttctcttatttcagcatttcaataaaagcagtttcaatttcctaaaggttgtgtctgtgccgttttttccttttgaagaatcttgacttgaaataaggtcactcgtactcaaccttgccctcgggggctcggttcggtcagctaaaatcgccaaacggggcccagaaccgagccgtgccccggggcgtggtgaacttcgggggggaatcggcaaaaacccacaatcgggtcacccataaccctcggtcaccacattcccggcctggccagcctcgacatgtggatctccccaggcactagccccgacccgagccattagaggactgggacttgggcacgagcccttaaatcaagctaagacacaaaagaggaccacggcacagatcatcctcatctcatacgcatagcaaaataaaattgacacgaattttttcatcatttttgattgcagattaagttggtctatacaaaaaagaggcatgaaggccttaaaaaaaaaaaaaaaaaactggagtctggcgggggcctgggggctcagtccgatgcgcccgggtcgccggcctcgtcgtcacggtcgtctgcaccgctggcgtcgccctcctcgtcggagttgggggcgaacgcgagccgaggggccgacccctcgaaactgtggacgatgtggtcggcggcatcccggacccgcgcgcgcgcgtcgtcctcggtcccgggagggaactcttccagcgccatccatggagagaagttggggtccctggcctggtaactcgctagtacgagttcaaccgctccttgggcgaggtccctcgaggatgacttgatggtcttctcgagctcctcggggagttgttggagagcccaggccatcttcgtgaggtgcggagcgaggccttccaggttggtggggtgtgtcattgactggcctttccagaggcccgcttgccgaccggcgcgatccaggcgggagaccgcatcccaaagcatgccgggccctatttcgcccgccaagcggagggcctcggcttccccggcggatgagtctagcgcgcactgcatgtcggcgacggtgagttcggcagctgcgaggcgggcggctaagtcgctttcgcccgcagccgccccgctgatacgcgccctcgcgtccagctccttttcccgcacctcgaggtcggcagcccgctgctccagtgcggctctctcggcgcggacggattccaaattgcggcgtgcctgctccgccagcgctgcctcacggaggaaaaggctatccgccaaccgttgcgccgcggcctcggcctcttcgagagctcgctcccgctcagcgagtgcgtcctcgcggaggcggagcgcggactcctcttcggcgcaggcggcctcgtgcaccgccagcgttgtctcccggatagcggcggcggcctcgcggtccgccaagcccctctccacggcgccggcgtgttcctccaatgccatagcacgggcctcaagggcctcctcgcgccgccgggacgccgcttcgatctccgttgcccgccgctctcgggcagcggcggtgtcaaggaccccttgggcggcgtcgagctttttctttagctccgcctcccagctcccgtgttgaaggcggagggtgtcctgcgcctcgatcatcgcggtggtggcaatgagggcggcctcccgctcctcctccacctctcgggcgatctctgccagcgccgctttgcgggcttcaagctccgagacgtgacggcggtgagccttgcggcccacctccaccatgacatccaccgagcgccgcccctcctcgacacgcgcccatgcggcctcgagctccgctcgttccgctcgcagggcctccacttgggcgctgaacccatctagcaccgcggtgtttgcggcggccaaggcctgcagaaggggctcggcgctcagcggggcgacagaagacgaggagaatagccgccttggagagaatgcgacgcggctcggcccgccggaggacgcactgggctcggggatgtcccccggacccgattggtcctggacgtcgcctggggaagtgggcccaggcgatccgcccgcagcctcgtcgcgagccgccccggaggctgtcgcctgagcgtcgcccgagggagtaggcccaagcgacgcgccagcagctttgtcgtgagctgcctcggaagacgccatcgcctcagcctgacgagcccgggcggcctcctccttagcagcttcttcggcttggcgagcccgggcgacctcctcccgagcggtatcctctgcatggcgagcccgagcggcctcccgggcggcctcttcagcttcccgaaggcgatctgcggcctctcgccggtcagattctcgcctccgttcctctgcggccgccggatcttcggcctcggattggccggacttgggatggcgggaggaacgtgacgggacatcgctgaagcaaaagaaaaaaccagaagacaaacaagatgggtaagagaaaacttgcttttgggataaaagaaagacggtcgcaaagagagtgggacgaacctgcgagggggtcggttaaatgaccaccttggaggggaaatcaggtttccccaggatggttccgtctcccccatcttgcggagccgcttcttcttgcgctccccctcgggctgcgatgtcggcgcggccccctccgggtgccgactgctggcacgcaccgccccgccccctcggggaggagatgggggaggtgttcctcccagcttcctcttcccctgggcgtcggcagggcggctgctccccgagcccccgacgcggggcccagaagcacgaccccctcctggggtagattgttccccccggcggctctcgcccgcgccgtcgtggcccttaggagtttcctcctctgaggccccgacccccatcataatggtcagaatggaggcgcggtcgggatcgctgcagagggggaggattccttgagggatgagagacgcctccacggagctgagattcagcaccctttggaccacgatcttgaagtcctcgggagcccaatcccatctgactccctggtgggtccgcatgtagtcttcggacccggtgtactcccaggcgccccgggcgcgccgttggagcggcgcaatccggcgacggaggtagtcgccgtacaccatggcccctgtgagcccctgggatcgcaggcccgccaggcggtcgaggacggcgtcatagtcatcccccagatctaccggcgcccgccagctggagacctgcgccgggggctgacttggaagtcggaggcgcgcttcgttggcgaggggggtgtagaaccagtcgctcttccagtcgtcccacttcttgcggagggcgcaggggatgtagcggttcaacaccggcccccgcggctggaagtagcagccaccaaccaccgacggcggcgacaccgactgcacggtgaagaaccaccggaacagccgaagagatgggcgcaccccaatgaacatctcgcacaggtgcgcgaagatggccaatgtcatcactgcattgggggtgaggtgcgccatctggagatcgtagaaatccagaacatccataaagaaagaagaaaatggcggaaccagccctgccattgcgaaggggaggaagaaaacggaccgccccgggtagtctggtgccgggcgtccctcgcccagcatcactatctcccggccggtggcagattccggcataaagcggcgcggcagcccggcgtgcctctcgctcacgatgcgagaaggcggaagtacgcttccgtcgagcagagcggaacccgtgccatggcgccggaggaaggatgattgagaacgagcgcgtgtggcgaaggaaaggcgcagcagagaaagagttagagctcaagcagcgaaggcaaggggaatagtggcgaaaggaagggagcaaaccctttcctcggtgtctttatacctttgccatcgctgtgcccggctcctcgtttctcgcgcccactatctcgctccctcgtttcttactatcccgctccctcgtttctcgtgcccacgcttccactaatcccattcgcccgcttgcggcgcatgaggtagatatgcggttgtggcagtcgagatagatcgtatcgtgcgcgcgttaattacgctcgccgaccgaagcaacgttaccatatctccaggcgaagcaaatcggctcacccagattcgtacgtcgctcaagtaatgtggcagtcttgaagagaccgcccattatggacagccaagtcaccattaccgatgtgcatgatttgagaccgttgggtttctgcccaaccatggagaccggtcccacctgtcaccaagctttaggagtggcgtcacgcccgaccgcttcccttgagaagggcgatcgccctggcataacgccgggggctactgtcggtgatatgggaccgggagtatcgtgaccagaggcttgaggcagacacaatcgcccacgtggcctggcaccttcggggacgtcgggcccgagggtgaggtgtccgccctcctcctgatttccccgaggggggg

SEQ ID NO: 7003 - DNA, 3121 bp, Oryza sativa
gcgcccacgtggcgcgcgttggatggtggtggggttgaaattttgcaacggttaccccgcaacggctacttcaacggctaaaatttgaaaataaccgttggaggtcgaaaaaaattcaaaaatatatgaaaaaaaactcaaaaattaggaaattttttcctataaatagggtagccaacccaaacattctggctcatccaaacattcaatcttgtgctctcttgtggtattttgtgtgttgtaggttacgactttacggtcttccgaatttttggcaaaatttctctaaatattgccaaaaataaaaataactaggggaagacatatattcctatttgtaagctgcaaacaaagagttgaagaaggtaagaaattattattattattattattagtgttattatttacgtatatgttaattttgaaatttcagcatggacgatccgaattacccaatatttgacatgagcgagtacgacccaaatttcggcatggagcaaggtggcagcatccctgcaccgatgccggaagaacctgcaaccacacaggtggcttcagaaggatcaggaactgtggccgcgagtgggtcaacggcctcgtcctctaaaagatcgagaacttccaccgtatggcaaaattttgatgagatcaaggagaccggccctgatggtaaagaggtaacgttggctagatgtaaaatatgcagaactaaattatctggaaaatcttcaagtggaacaggacatttaagtcggcatgcggcgtcgtgtgctaagaagcaaggcatccaactgcgacaacaacaactgatattgaatcctgatggtacggtacgttcgtgggagtacgatcctcaggttgcacgagaatctcttactcgattaattgctagacaagatttacccctaaattttggtgagtcaactgcatttgaaaaatatattcaaactgctcataaccctaggtttaaatctgttagttctcaaaccacgacccgtgatttaagaaagttctataaacaaggtcgtgatacactgaaagaattatttaacacttgcacattttctgttagtatcacatctgatatttggagtggtaaggccaaggaagactacataagtgtagttgctcactttgttgatgataattgggaaattcagaaaagaatcattgctttaaaattaatagatgttgcacatactgctgataatatcgcggaaagaatttccatggttgttcaagagtttgaccttacaaataaaattttcgctataacactagataatgcagctgctaactctagggccatggaaattctacaacctgtattctctgtctatggtcaatcatttcttttacatcaacgttgtgcatgtcatatcattaatctgatagttaaaactggttttaagagggtatctacacatattgattctgtgcgtgaggcaatctcatggttatttgcctcaaacccacgggttgcaaaatggaaaagattttgcgatgcatcgggtatgaagccccgtaagttccgcacggatacagatcatcgatggaataccacgtacctaatgttgaggcatgtgttgccttataaggatttactaaccgtttttttgcagtctaataatgctacgaacagtgatgggcaactaataatgtccgagccaacttggtatgtagtagaaaagtttgctgcatttcttgagatatttcacgatgccactgttgctttatctggagtttattatccaactgctaatttaatgttgcacaaaatccttgaaattgctactttattacaagaaaatgagaatgaccacctactatctgctgcagtctttcatatgaaacaaaaatatcttaaatattggaaggaaatccctgtactgtatgcttttgcatttattcttgatcctaggggtaaattacggggattggttaatatgttgaatattattggagagataatgaacatagattatactaactattattctgatgttaagactaaattatatgagacatttgccaagtatgagaataagtttcagggacttcgcctacaaagacccccaactgtctctgtcgctggtaagaagaaaatacaatggggacggatttggggtggtagttcctcttccactcctgctgggagttccgcttcaggaacaactggtacttttcaaggcacccaagaattgtcctcctacttagacagtgactgtaccagcactgaagatctcaacgtccttggatggtggaatgatcacaagacccaatatcccgtgctctcaaaactagcacgggatgtgttcacggtgcccgtttctaccgtatcctctgaatcggccttcagtacatgcggaagaattattgaggaccgacgaagaaatctaagcagcgatatggtggaaatgctgctcatcgtcaaagactgggagctagctgctgaacgtgctcaacactccgcagagaacttggaattggttgctcagttcgaagatctctacatcgatacagatgcacaagattagctagttttttctaataattttcgacttataggctgtactcttttttctttgtcatggttttctcaaatatgagtttttacatgacaaagtttttaacgaggcagccatgtaatatcaaaattaataaatatcattattccatttttctcatattctttatatttatttagctttttcctattttttataatcatcttttttatatttatgtacctaatttcctatttttttctaaattataatcatattttttattttcccttttttccttttttttaattttccccctattttcccttttttttaattttttccctattttcctcactgttttttcatttttttattttttccctatttttccctcttttcctccttttttccccttttttttctctattttccggattcccgggctgcggccggcccacgtgcccccgccggcccgcgtgctgattcgtgcccgtgccggcccggcacggcacggcagcgtggtgggccgtgcctgggccgcgcacgcggcacgcgggccggcacggcacggcccgctacaggacacgtgccgtaacgggccgtgccgtaac

SEQ ID NO: 7004 - DNA, 8624 bp, Oryza sativa
  unsure (1)..(8624): unsure at all n locations
caaaaaaaaaaaaaaagatccatacaggtttcctactttcagttagagtagaattgtataaggagaagcaaaaaccttgactttttcatctcttatgtgctcaggcttaagagagacaggcttttccatagccaccaaacagaagacctgcagacaagagcgaaatcaatacagaaagggggcctcaagtcgtgaaagtggaaacagcaatattctcttttgaggaattataatgcatgacaggttgctgctctgcctcctcgtggtataacataagaatggtgatggaataaagcaccaatcattctgaatggtcaagtaaaatgttcagcagtccccacagaccacagtaagcaaatgctaatgtagattcacattgggaagtgaaagtgcacataaaactcccctagaaaaggcaagtgcatggaaaactatgctgcataccaaaaataaatatatttacctgcaacaaatggttctgaatgatatcacgaatgatgctgcagcaacaaaagcgaggtcaaatatttacatcagcgaagacgaataacgatgcacgggaggtcctctaggtgattatttgtctcataacataaacaccataagcagttgatttattttaaatctagcaaatactgtattatcataaaaactaaagaagtttaatgcctagaagaaaataataaaatgcaatttgtatatttctaatggacaactgtacacgatcgaatgacttcatgtgaactatgggaaccataaaccatttacaatatatcaaagtgattttacacttttatagtatatccacagtcacaagcatatgtgcttacaacaaaatactttcagtaaaaggaactttcatgcaaaataaagttactcccaacatacccatattgatcaaagtaccctccacgtccttcagtcccaaagtcctctctgaatacaatctgcagcatatatttattatgttcaagcacatgttgttcgcaccatgataatgataaaactttccagaatttccaaaactaatccattcaactttataccaataacagaggatgtcatagatgtaactacagttgacaaataaaaatacaaaggactacatagaaaagcatattacctgtacattagcaatgttatcacgattccaaagaggtaggaacaaacggtttgcaaagcgaagcacaagctgaaatatattgaaatatgttatagtagcatggaatatatcgttcaactaactagacgaagccatacaacttaccagattttggaccaattcttttcctaaatagtggtcaattctgtacagctgttgttcattaaacagctctccaagctgggcactgagttcctctgcagactccaagtccttcccaaagggcttttcaacaataacccttgtccagccagaatgagaagctgaaagcacaatatgacagttacagaaggtgactagcataaaagaaatgaaactacaacatagtatagcacaacttctaaaaatcaaacttaaaaataattaatttgatttttaatttactatgaaccaacacatgactcaattaataactaagagcaaattcattgcacccaaattgcttccagaaaaccaaaactttatgtttcaaaagtcccaatgaaaaagcaatgtcaggaaaagagtcggcgactgctaggaattggtatgcttagaaagttgaaatagtagcaaagttccacaaggcaaatacttagttaaataaagaggacaaaaggaaaatagtacaaacaagagtggatacaaccaaatatatttcctatattttgaaactctgttgtggataacttcactacaccaaaggaagtgcagcagctttcaaaatccgtaaaaaaggggaagtactcacatggattcatgcagtatgatcttatcattttgcatactgaggggtagactgatggaggcaatgccaaataaaatagtctacgtgagcttcctggtttgttgttcttcgaagtttcattctctgaaatggcgttatttaatgatgcaaatccttccccgctattgtaggaaccactaacatatttaatctgcaaagaaaattcaacgtgttacgaaatctaaatgcaaagaagctattcatgatatcagtgacttactaattgcaaaaattgtgaaatatgttcatctgaagctcctttgaggtatctgcgataacaggagaatgctatttaggcactagtatatcatcagacttaaaaacagagaaactacttcctcatacagaacatcccaatttatttttacatgaaattcttaaattattttatggtaaatgttggtgctaatatgtatctttcttacccacgaatgcgttctcttaatccatcatccgaaatatttgatcttgcatacccaaatatatggacttctccagattgtagaaatccctatcaacaccaaaggttacagttcagaactttgtacgtgtgtcaacctgacaaaacattatgtacatggcatgcaatagcaatatagcattataaagtgctgcagtagaatttctgagcaattataactcatcacgaatgcatcaattttatttctttttcactacaactctttcagaagtttgacaactatggaagaagctagtataccaaactatgtaagaagctactagttacaatcaaattacctgctgaaagaggtgaaacagcgctgggaatgttttcttcttagcaaggtctccagaagcacctaggaccacaatggacaagcaaccagactctgaagacagttctaggtccttcaaacctgacaaagaactgaagctagcccgccctgatgaaggggaagaatcaccagatcctcctgacatgatgaactgtatggtctcttcctttggagacaaaacctaagaatgtaaaaaaaagtactgttagtctcaatatgaggtattcacaaataacttataatctatccaaaactttaatctatgctaatatgaacaaaaaggtctattggttgaatgatggattcttgaactgaatcacctgtcagtacctaacagccaatttgcaacagagtgtaaatcaaaatgaatgtttgcttcagaaaaaaaaaatcaaaatgaatgggattaaagttggtttcatgaaatcagtactaaactactaatatagctaccctgaacttacatcagcgaactactcccattgtttgccaacttatagtcaaagttctcataaaacacaaacaggtactgtagttatgctagtcaaatgcttctatgagattctaatacagaaaaaaaaaagtatctacaagactacaaatgtaaatcaattgaactcggtgcccctacattttgtacgggtaaactggaacacatgcaacaactgaaccactgcactcactagaagtctagaacacacaacagcccaaccacccaataatcccgaaataaactagaactgcaacttgcaaagcaaattctgttccgagagcttcaaatgattaaaacgaacctatacagcaagcgcatcagggcgccaggaaatcgaggagcacacgcagaataaacacagagatcatgaacacaaacacggcgcacagaacagaggaatttgcctgcgaaggctgcgatgagatcctaaggccgcagcgtagcacaatcccttccacggcaaatgaaatcagcaatggaaaaaccgatcgcgcagaactctgctacggaaccgatcaaccaccaaagaggaatctaagcagtgtggatgaggaggaggagggagactaaccagcagtggcgacgagatttgacttcccgaggtggaagaagaagacgacgacggcgaattgggcaatggatggtgatcttttccgggtgcgatttatagggggatcttcctcactcacacccgctttccatccacccctccactctcctcccccgccgcttttatactcgcggacgactcgtctctcgtcggcgttgttctcagctttgacccgcgcttagccgcctctctgctttgccacacgcccacacccaccaaccctgctcgcttactgttaccctaccaacatagtataaatcaccaatcttataagttattttttttaaaaaaaatagcgtcaatccgattgattgaactactaatataatccatccgtttcacaatgtggagagtgctagaatgacttacattgtgaaacggaggaagtatataaaaaatgtgaaccgtgaagcgtaacgctgtggtagaaccaagtcaggttcaagctctatatttactcccttcggattgataatacttgtcggtttagaccagggtgagatcaaatcttttattatgaatcatttttaaaatatttatctttcaaatatggctactatatgtataaattagtcttaaaaagtagtttaataaaattatatatttgttaatatttttatacacattataatgaaaaataatggtcaaaattatttttttaagactatgcctttgtccaaaacgataaatattatccggagtaacatggatgctcgtatttatcaatactgactttatcaatttgtaatgtatttttgtcaaggactacgtggcaacttcatcaatatatactgtgtttcaaataaaatatgaatgaaccggtagaaatagtttatcattaacatttaatatttgtatcacttgttttagcgatagaaatagtgcatcagtaacatttactcgctttatataagttaatagaaaataaaactacgacaaataaaaaatcctaaaatgaactctataaatttcaaattttatatttttgctgaagctgatatactgagatttacactcccgtcccgtaaaaaaaatatacttagatacatagttagaagttgaacatccataactaaatattgtttttttttctatggattgaagggagttgaagatgcaggcgataagtctgagatgagaccaaagcaatctgtggaatgccgatggattgtagttttttctatggattgtagttttcccgagtatcctcactctggtactctagtactctacgtggccgtgtttagttgtaatttttttcttcaaactttaaactttttcatcacatggtttaaatttcaaccaaatttttaatttttgtgtgaattaaacacacctagtgttggtgacaaagtttttcactttttccaacccatgaggccatgacatgacatcaaccaaatggcgccgcaaatcgagcatcgtctggaaaatcaattcacgagtcgaacggcgcggccggtggtatatctatcatccccatctctttgttctttttttttttctgtttcgatgatttaacaatggtcatcagcgacgtcacaaaatacgctaaaaagcaccacgttttaatcctcttgtggatattatgggtaccccatacccatacggcatggttatccgactagtcataggggataacttatatctatggaatatgtaatagatcatgactcgggtattacgtttccttatatattacggaacggcctaaagtcctggtttgataatattgtaaagtagatttaggaaaccgataccgtattggttaaggtttctatcttgtaatcctgccccccaccctatataaggtgggcaggaggccctctagggggcatgatgacacaaactagatcgtcagatctataatacacccggcggattcaaatccccaaacaggagtagggtattacctctcattgagagggcctgaacctgtctaaatcctttgtctccgcatccatccacttttaggtctcgtgcgctacccccttttattattgccgaattcatgtttcgacagttggcgcgccaggtaggggttgcgtcgagtttcccatcaacaagcgcgatggaatcaatttcatgggtcgccgacttcgttttcgctttgggagttttcacttcctttccgtcgaccacttcttcaacctcctcttctctgacttgatccaaatcagtcagggggaaactcaatctgatttttatcattgtttatcatattgatttttaatctcagattaatttcttgctattttttgttgttgttcgcatataactacgcggcactattgaggcgattgatgctggtcatggactcgaggcgtctcagctttccggtcgatcggccgcgagtccactccgccggcttgtcctcgccaccgccattgctgatagcaacaacgacttcaccgtcggccaccaccgttgatgggcatcgtcatctacgccgccggtctgcctccgtcgccgccgactggtgtccccgcctatacggtcggttggtcacaccaccgttgatgggcatcgtcatctacaccgccggcctgcctccgtcgccgccgactggtgtcctcgcctatacggtcggttggtcacaccaccgttgatgggcatcgtcatctacaccgccggcctgcctccgtcgccgccgactggtgtccccgcctatacggtcggttggtcacaccaccgttcatgggcgtccacgacttcaccgccggcctgcctccgtcgccgcagactggtgcctccgcctacacggctggcctattatgccgccgctgttgggcgtctacgacttcaccgccggcctgcctccgtcgccgccgactggtgtccccgcctatacggttggttggtcacaccaccgttcatgggcgtctacgacttcaccgccggcttgcctccgtcgccgccgagtggtgcctccgcctacacggctggcctattatgccgccgctgttgggcgtctacgacttcaccgaccggccgcttcgtccgccgccgactggtgtctctgcctgcacggctggcttattatgccgccgctgttgggcgtctacgacttcatcgccggcctgcctctgtcgccgcagagtggtgcctccgcctacacggctggcctattatgctgccgttgttggatgcctacatcctcaccgttggctcaccttcgttgccgtcgactggtgtttccgcttacacggctgacctattatgccgccattagtgggcatcttcgctttcaccgtcgaccgccttcgtcgccgccgactggtgtcttcattgttattgatggacgactttgttcccacattggccacttctgccatcaccaaggggaatattacaaagctaagtcatcatttattttattctttatatgatatttttccttttcctctgcctcactacaccaattggtcttccattgagtagtgagtcgggtgctacagatgttatatcatattttttataatatttatcttgattgcttgcgacataatctgagtacaaaagtacctatcgagttatggagttctatcttcctatgctttccgtttggtttgccaatggatggttgcctttgggccgattcctagcacccgggggctcgttggatggaccgagtaacgcaaggtgctaagtattattcggaataaatcaaaagcatagagataagataatttattttctgctcttaataattgcaaaagtacccgaatagtaaactccgatccgtgaaactttgttccattaatgacgaactcatgtcactcatatgcatgtttgggaagtgcttaggccgactcccagtgcttggtggctatgactagtcgggcagagtgtttaaacgtaatgagtcatctgctcggggaaatcaaaattgacaagaggagaaatacatatttataaatattttaaaatacttgattttttctcgagtattatatttatatcagatactactcatcctatatgtttgttctgcaggatccagatccagatatgcataaaagggattcatggctttaagcttatctcttacgctccaggaatggatcagtcagaacatcaccaccggctcgcctcgaccgccgccgactggtgtttccgcctgcacggctggcctttatgccgccgttgttgggcgtctacgtcttcaccgaccggcttgccttcgccgccgccgactggtgtttccgcttgcacggctggcctattatgccgccgttgttgggcgcctacgtcttcaccgaccggcttgccttcgccgccgccgaccgatgtccccgcctgcacggctggcctttatgccgccgttgttgggcgtctacgtcttcaccgaccggcttgccttcgccgccgccgactggtgtttccgcctgcacggctggcctattatgccgccgttgttgggcgtctacgtcttcaccgaccggcttgccttcgccgccgccgactggtgtccccgcctgcacggctggcctttatgccgccgttgttgggcgtctacgtcttcaccgaccggcttgccttcgccgccgccgactggtgtttccgcttgcacggctggcctttatgccgccgttgttgggcgtctacgtcttcaccgaccggcttgccttcgccgccgccgactggtgtttccgcctgcacggctggcctttatgccgccgttgttgggcgtttacgtcttcaccgaccggccgcttcgtccgccgccgattggtgtttccgcctgcacggctggcctagtaaacagccgcccaccaaattaaaaaananccccc

SEQ ID NO: 7005 - DNA, 9033 bp, Oryza sativa
cttcccgtaccgtgcttttgttgcttcgatggttttgaagtttgaggtggagtgtggttttctgagttggaggaggaggctgatgagcaccgaagcttcatggtgtattgatcttgctgtgtgtgtctcaaagtctctaccagtgcgtgcgcaaaaaattagaccacgtcaattcgtttctcttgtctgcttgtattttccagtttgttcagttaattttggtgtgttgcgggagttcagtttctgaaaatttattaaccagatgccgccttcgcccttcttgttcttttcgctgttcctgatgcaggatgcttcttctctatgtgtctctctgacgtgttctcttggtttagtttctgtttggaaagaactccatgttctctctgacgtgttatcttggtttagtttctgtttggaaagaactccatgttctgttcatacaatgatttctgcatgtgtagcttggttaaactgcttgtttttttttccctttttgatgagaaatcttctgattctttgcatatcaaagaagctttcatctcttgaatcttagatttgggatccttctaagcccaacggttttggttctgcaagattgtacaatttcttcatgtttgttacctatattttacttctcagtgacgctgtcatgttgtattcttcttgctgaattctactataagtgcacgctgctgtctctgtttttcttcttctgttcacttcatactctgtttcgaattattgaagttttaatacaccaaagaggtggccatatcgggaggaaatttattgtccttgtacaatacgccttttctgtttgtttcctcttcatttcactttggaatttggtgttatgatttgtgtcagaaaagcttatatggcgttcttacaaaaccttgtatgcattttgttcacagtaatattttattttaattcttccttgcttgattcttgtataagatataagattaatgtgtataattactgcagcattgcaactgaagattgatgatctcatgttatatgtctcaaaaatgcatttaggggccctgataaatagtgtcatatcatgttatgtctagttgactccttttcgtgtttttacgaaagctcttatgtatttaattgatctgtagtgttttgtaattgtattcactttactctttctccatatttgtcaataaagttattgtatatttgtattcatgttataaattttcagcaaaacaaaggtctgctatgggtaacagccttcctgtagaatcaaagttcactgatgaaaaagagaatgacagaattaagtatgttgtgtcgtctatgcaaggatggggtgagaaaatggaagatgctgtgagtaaacttgcagccttttgtatgacaaaaaaaaggatagttctgcaaaaatttcttactgatctgtaagtaattgtgtaaaatactgtgactgacatatgccctctatattctctagcatgcagctattctaaatcttgatgataccatgacgtcattctttggcgtttatgatggccatggaggtttgatcttcattctctctcttttttttttttttttggtttcaaatcctccaaatcgtcggcataactgtttacatcatgctttgtttgtctttgtatgtcatgtgtttatctgcgtgcatgttttgaaaactttactgtttatgctgaaacttttacctgtgaattctcaaataaatattaggctacagttctggataatgaaccaagtttgctaattagtactaatcacctttgtgcggtgtgctttctaggataacatgaactgcttaaacagaaatattattttacgagggataaaacactgcatggttgtgagttaatattaacagtcatgataattaaaaggatagccactgatgaacatgttggttaatttatgtgtggtgctatttttcttatgatacctatgaagtgctgatctgctgtgttcatcacattgttttgctttataagcttctatatgcacataggagtaatcttgagccaccattctgagttgtttattttctatctcaggagctgaagtagcatcatattgtgcaaaacgatttcatattgagctttgcaatcatgaagactacgacagcaatctaagtaatgcgatgaggagtgcgttttacaggttattttcgcctagtctatatcattttgttgcactgaatgatgctgcacttgcaaatttggaatatcattgttcctgtgtaatttctgcagcatggatgaggacctgcaactgtccgatgcttggagggagttagttattcctcgtaataatggatggatgtattttatcaaggctggtgtctgtgctaacctttcgcctttcccgcaggtagtgatcctttaacccctaaacatcttataatatccatatgttgaagaagttactcaaaactgtatttgttggacagtgcttattgtatctatgaaaaaggaaatggaagaatgtgtgtgatatcgagactattgttctttcttgagatgtactttggagttggaagagatatgtttaaccctaacctcaactaattgcgcctgtaaaaaaaggtccagttagttacttatcagttgcctggtttggtgagttggacgcctgacaggttattaagttcttattgcaccttggttcttgtcatagtatggcactaccctaaactgaggtattgtttgcggcatctcttctatggttatctctttcatatacactggtttggctttcagaaatgcttttctttgtctggttgcttttgtgagctatttcttggttaacctgtatctctactatgttggaattctctattatgtcctttagtttctttcttctttttccaggcaacatatactgcgccatcatatgaagggagcacagcatgtgtggttgtcatcagaggtgaccaattgattgttgggcatgctggtgattctcgttgtgtactctcaagaaatggtcaggtatagtgactatttcttatcgaatttcttgttggtacctaatttgcatgctcacttattttcgtgcctaacatttgtgcttgtttctgttgtgtcaaaaggccagtgcattatccgtcgatcataaaccagacagtgagtctgaaagagagagagttcagaatgcaggaggagtagctgttgggtatagttatcgtaaaataatggggaggtgggtaaccaagaaacaatggggcttcactgattttaagggaagagtatcaatctcaagatcaattggtatagtcttgcctggatctgtttttcgtttattgcagataatagcaccgaaaaaaaaacatattatgttgtgatttgctgatgtgttgtacccacttacatttcaggggacttcgcttgcaagaagaacgaacgtttacctcctgaagatcaaatgctgacatgtaatccggacatcctgactgtaagtgcaactatgtttgtttagtatttggttgaatttgaagtttgtactgctgtgtggggtctgatggaaaatccccctttctgtgtcagatggacataactgatgacatggagtttcttgtgatagcaactgaaggcctctggtaaattttgaacaaaaaataactgacaataattattatttgatcattttgatgtcactagtactctttgtgatgctgttttctttctcctgctgatgcatatatagtttcatttatagttgcatacctactgtactatgttttttccatgcaggtgcaacatgacaaatcaaaatgtggttgatcacacacatgaccgtcttttggtgagtccttttcttttgctcagtttgtcttcttggcaggacaagagatctcctactgtaatagcaaaaatattttgtgtcaaattctaggaaatgacttcactcaggcaatataaagcatccgattttttaaaaaagaaaaaaacaagtgctaataagtacactgtcatctgctttgtgattgttcgattcttttgttgttaaaactgctgttccttttgccttgatcaatattgctgtgactaatatcttgcatgtttacgtcaaaaaaatatcttgcatgctcgattgtttcgttgttaaaactgttgttccttttgctgtggccaaatattgctgacttgctgtgaccaattaatatcgctatgcaggagggtgcagaagcgcgtgtcatctgtgaggagcttgttcagtttggcttgccatcgggcgacaacacgaccgtcatcctggttctgttcaagcccggcgcctaccctgctgttccgccggtcgacaccgacactgacactgacagccacaccggcgatgatgtcgacaacaacgaccccgccaacgaggttgatcccactgccaatgccgggtctgatgacagcaacaccagcgatgaggtcaaggtcgacgccactgccactgccgtcggcagcagcagtaccaccgccgtggctgccgacgaagccaccgtggtgtcgttgtcgactgcaaccatcaccattgtggacaactacttcttcattaacaccagcgaggaggttgatcccactgccaatgccgggtctgacgacagcaacaccggcgacgaggtcaaggtcgacgccactgccagttccggtctttccgattgggaacttatatattctgaattctgatcctgttagtggtagacgagtaatagcaccgacccgttgatagtagtagtttggttgtgctactttgctagactgagacaccttgaattaattgtttacgaatcatctctagcctttttagttctgaaggtgattgatctagtgatgcttttgttgatcttcattttgaatctctgtgcatggtagtggtttatgaactactagtagtatttttcccagtttccttttgaccaaagttttcttcattcttctagtctctgtgactgtgatactcaaaatcttttctcgggaatctgtaactaggattaaggcacgaaaattttctctcctttttttcaagagatatcctgaatttgcgacctctctcttccgccttccccgcgcggggggtaaaaaaaaacagaaagttagaaaaaattatgtataaaaaatttgaattcaaattcaaatttgaatcaggtatgtaaacttttgacttataaactttggatctataaagtttagatgtatagaaatactatatatagaaaatatttgaattcaaattcaaatttgaatcgggtatataaactttaggtctataaactttagatgtatagaaatactatatatgaaaaatatttgaatttaaattcaaatttaaatcagatctaattcaaatttaaatttgaatcggatatatgaactttaggtctatgaactttaggtgtataaactttagatgtatagaaatactatatataaaaatatttgaattcaaattcaaatttgaatcggatatataaacttttagcaaaaaaaactttagatatgtaaacttgaggtgtataaactttaggtgtataaatttactaaaataggaaagtaatatggtgaaaaaaaaaataaattaggtggagggagggagggagaggagggggaaatctaatcgccctgggcgatcgctcagtagcatttccgttccccgcgttcacttgcccacccgtccgcttgatcgtgcgggaaaccaacaggcaacagcgatgcaggagggagttctatgtattgggtactgttgaatttgattccaaaattgaatctcaaaattcaggtttccaattaaatatcccttcctatgaatccttgccatctacttctcccaattccaaaaatatcgaattcatattcacgctcccatcggatggcctaatcagtcaaagaaaaagccaaatgttaaattttcaaacttaattttaagatattttcaacgtagtttctttttcaccattggtttttaagtcataaaaacacgtatataaaagttttatctataaattcatttttatttcctaataagccgtaggaaaaaagccaaccgatggggacctcagtttaccttcttgactccttgttgaacccttgagttcaaatatccaatttgaattcaagtccaaatcaaaccagaccccaaatttcttcaaataatttcctggaaaatggtcaaacattttcccctctggtgggctgcctctcctttctttttagataatggaaatggattgcatctccggcttctgtcataagacacacagccataaatttaatagtaataaaaatgtaagataaaagtaaatcaaaatgagaaataaggtgatgggacaaatccccaactcccctttattattgactaatgttaaaccacataaaatattttagctagcaattcttatgaaactacgccacccatagtggaataagagacccttggctaccgattccaagagtgtagcaccattgcgcatagtatcctgctcctcttgtggtagcattgtagaccataagtggagccagtaggaagacatgaagataacctgcatagggttagataattgtttaccattaaaaactttatcattgcgacaacgccaaattgaccaacatacagcgctagctccaattagaatcatcttcttaatggacctagatacccctctaagccaattatcgaaaatgtttttggcgttacggggtggggggatattaaaaacaaaaaacacacatctccaaaaacaaactgagcaacatgacactcaaagaaaagatgttggattgtctcttgtgtatagcagaaagaacaatgtttgtctccgccccctccaattttcttttacccaggttatctttcgttagaaatactttcttgtgaagaaactacataaagaccttgatctccagtggaattttcaagtcccacagaattctctttttgatccgaacattacagttcatgatcgcgacatacatagatttgacggaaaattgaccattcttatagagcgaccatacaaagcagtccttttcatttgacagagttatattagctagcctgaggatcaaatcgttccactcgattagctagcctctcctttctatgtggaaaaagtacattgaaggtccctcgacttgtcatcgagttacaaaatcatccctcacccgtaaaatcagatatatgacatccttcaacttacaaaatcgttcattttagatcctttagtagttttgttctggttttatttgacatggcggctgagtcagcgtgggacccacgtgagccccacatttctggatgccacgtctcttcctcaccagtcaacgaggttttttcctatatgccattaagaaagatggtgcctgcttctgtgccactaaaaagtttaagcctccctctctgccatcgttaaactttatcgtgccctccacactattccgtctgtttttgttgtaacggtgggtaatggcgcagtaaaatgacttagttgccctttggtccaatatgctctctcctagcactctcctctctcccctcagatgcagcagcagcagccaaggagcggaggggagaagacggcggcactgcgacagcgacggggcgctgcgacgacgacgatgacgacgggggcagcgctgcgacggcggcggcggcggcattgctgcgacgacgacggtggcggcatcgctgcgcgacgaagacggcggcaacaacgctgcgacgacgacgacgacgaagacgggggcggcgctgcgacgacagcggcggcggcagtgctgcgcgacgacgggggcggcagcgctgcgacaacaacgacgacgaccaacacaactatggctgcgaggactattgatacttgctactggtgttcatgactgttgatgcttgctactagtaatgcttgctactagtgatgccaggaccagcacaacgacggccgacggcggcgaggactattgatgcttgctactagtgatgccagcgacctcgcctgatcagccgcgcggcacatccaggaagccatcagacccacccagctcgaccgaaaaaattcgcaagaaccacagctcacagccacaggaccaagtgtccgtcctaatttccgcgaagacgagtgcgagagattgcttactcgggccgccgaaggggatgggtccggggttgagcccggcggcgatgctcggcggcggctggacgtggagcacgacgagcgcgccgtcagggcggaggcggaggttgtcggccggaggtcctcgccgctcgtgttgacgccggcttgcatctgcgtcagcggcggaggcggagccgccaccgcaacgtggactggttcgttgaactccatgcggatccacggcatggtgaagctggaggagccggttggaccgaggttgaggaacagcgcaccgacgacgaggatcaggacgacgacgaccgggccgaggcgacggcggcgcggtgccccagctgggcggcggcctgaccgcctgagggagaagaggggaatcgagggagaagactgagtgaaagggcaagagcgacattttttctacccgggcccatatgtcagagctgccaaatagttaaatctaaacggaatagcaacggaacggtgtggagggcgcgataaaattcgacaatggtataaagggagggctcaaatattttagtggcacagggacatatagggccattttggtttgatgccaattcttgccctaccaattctttggtagttttgaatagtacatgttagcattttggattggagccaaattttgccaaatcaatagagtggagccaaatctgtactataaaaaatttgttagtgccaaaatgtgcctaaggtttggtactaccaatattttggtagggtttcaaaccaaacaagcccatactatctttcttaattgcacacggggaagagcctcccagtcaccacgtctcttcctctctcttctctagtcgtcctgtcgaggagcatagccgacaggggaggagggccgcgcccggtgggcgcgccggcgcccgggggggggggggggtgggggg

SEQ ID NO: 7006 - DNA, 36923 bp, Oryza sativa
ttcgttccgtgggccgtgccagcccggccggcccacctggctgtctatatccagaacagtcatcactattcactcctctcctttcccattctgtttctcttctgttggctcatcgttggtttcgcccatattcctcttcttgaaggggatcgctgatcagcaaggtactctctcttcgatccccttcccccccctctctctctctctctctctctctctctctccgcgcgcggcctgtcgcggctgttgggctctgcctcgcgtgccgctcgccgtgctccgtgattacttctgtgctcgtcaggcttccttcgccgtcgtcatcctcgcgctcgcgcgacagaatatctcatgatcgatccgtggtgacgttccgacacgcggtcggtgggtcgttcccccgtttccccaccgtggggtgtgcgttggcacggcttttgcgcttggggacttttagcgtttgtgcccggccatcgtagcgatgcgggggaagttgtcggcgatctgctgatgcggctctgatcactgcatatctgatcagttacgtgtccgatccgttccatccctggttggcggtgaaattggcgtgcgtattcgcgtaactacatatctacatgtgctgtttgatcaatctcacgtttcggttatgtgcggtgatgaactgatgatgtagcttatctgaattctcatagcaatgggctttgttcgctatcaagcaagcgttaattctcagtacagtgctttgctttagatgttcagttagtataaagctattgcaggttctgaggtgctcctgacctgcttccacaatgcaagctaaagaatccaaaaagtcaaggttagatccatctcgagctctcaaatgccaaatttattgtttgatttaaaataaccatttcttcatttaagttagtatactgttgtgtgcagggacaggggccgggaccgtgtgaaatggaatgaagaaaatttgaatgacattgagtcgaccaagccagtaagagaaaaaatcaccgagcctaagacgccatatcactcaatgattgatgaagatgatggtatgtgctttggagcttgcatatagaatcatgttttaatacagctaaagaaaaaattccggacaacatgcatctgatgcttgcatctggtccaagggactgtttctccaaaaagaactattgaagaatcagtggataagtccactcatgctgatgcgattaagactgctttgatggaagctgtttcaagtggaaaattatcagcaagagaacatttggaatcctgtagtaatgaagaagaagaagaagaagaagaagaagaagaagaagaagaagaagaagaagaagaagaagaagaacaagaagaagaagaagaagaagaagaagaagaagaagaagaagaagaagaagaagaggtggccatcaaacaaggcacaggttagtaatctgcagtcttttcttattgacaatgaaaaacgaaatatccttgtgagtggtatcttgactcttaaagtcttaattggcattttgtattttgatgcttgtgcaagtcgttatgatttcggtgctgtactgccatatagcatatcatgtctgatacatctcacataaagaagataaacacaggaaggaataatttcaggtatcctggtctcaggctatggggttgattaagtaacctgatcctgtgatctgtaaatctgatttgaattgtcacattttagaccgatttgtcttcctagctccagaaaatatctactgatagaaagttcaagactcccttttgtctgattactcctttatccacttcacttgtttttttttttaattcaaccctgctgttctattggcatcatggtatgccagaccaaaacttttgcttgatagcaaggtaagagctaatgcagtgtacaccagtaggttagctctagtcctggtttagtagctagttggaccatcaaaatttgtataattgtaaatagatataaatctcccgtgtgtgttttcccgaatcagttggatattttttgtgggatgatgaccattggggaagactggttgcaagctgtgttgctattttcctatctctagttcagattccggaagtcctcaaggcactggtggatacgcttcaatttttactatctatgtgttttgcaagagtaacctcaaatttcaccatcttgttttgtgtttttttttcaaagtaagaatgactgcttttacatgctttcatatagatttcgaagagcaacggaaggctcactatgatgaattccgcaagatgaaggaactgcgtcggaggggaacgccgtcacaagagggtgatgaatgatgactctggcaccgtcgcacaactcggaagcatatgatcagcgaatcctcggcatgttaaatattggcagtggcaggaatgttttacagatatcctactaaaccttaaaaagctcatgtgactatctgttctcttgcttaattattagtactggtcctaggacagtaccaggtaaaattttggctcttattatggaggtaagaaaatctgtatcgatcttgtactcaaaacttatgctcttgttcatgctgttgattacaaagttcgcaaatgtgacactctctgtggtaatctggtgtgtaatttgtgcaaattctaagcaaatgcaaattgctgggaatattatctatttattttcggcgcactttgctgggcatcgttcagaaatgccaacgtcccactctgtgtgcgaggtagcaaaatttgcattcagcacccgcagtttctgcatattgtcataacccccctatctggacacggtcacacgaaaattggagttattagaggggtttatctgcaaaaggaacaggataaacctggccactcccgttactctcgtcgtcgacctcctcccgctgctcccgttgcggcggtcgccgtcgccgccgacgatgacgagcttggaggcggccgcacgcccgagcagccgccgcgtggcaccgtgcgacccgcggggacgccctcggcttccgccatggcggctcatcctttccccctccccttcctcccgcaggtaaagcctctgcttccttcttcacgcgcttttaagtggaattggccttgctagattgatagctgagtggaaatggaagctgtgtgtggagtttcctcttggctcttgtgattccagactcgatttgttcacctgcgccattcacatggagctgcagttcaaacccttaggttttagcatctgtgtaatttggagagtaggtgctccagttctacttatagacgaaagattcatattatagtcctggtctcagatggggatgccaatgactgaggtcctgttagaattgtgaatttcaatgtcagaaccaattttgcctcctttctttgggatcaaaactggcagtcattcttttcaaaaagaaaagaaagagaaagagaaagagaaatggcagtcatttaatttgtttgtataaatgcaaaagggtctcaattttagttcatttgctacttttgttttggttggactagaaaaccatcaagctaaaacataaactttcaaaagtaaagtaacattgagtatttaacattgtccaataattgttcactcttattcttatcatgatatcatcatcccatacattcttaacgctgctatctgttctacaggctttgcactctaatttctagacaacttcccatttgcaatgcacaatcatgtgaggttacttatttatcccttcttaagatcttctccatgtatgtaagcaactaagcatgcaagttatcgttacagtgcacatcaattctctgtgatgcagatacggataatctgtggttagccagtggtaatgctcaaagctccgctgctgttcggtcaaggttgcttgctgcagaaagagaggaagcaaaagctgtgctatcactatttttaagacagaaaggtttgagaagtatactggctgcacgaattgccaataaggcagatggtttcattgaacacctagtttcaaagctccacattacttacagatcacgatatgctgaaggtttgctttcttgattgtgctttttgcatatctattggtttgaacttttaacaacacgtttatttttcaggaagggagctcagcacaccggagattagagatgctttgattccatatctggaagccctttctaaagaacatggagatggtttggttgaggtggtggagaatttccccgatccatttgctatggaacgggaagccttgtcttcttcaatggttcttacgcccacaagctcaaataaacacaaggcaatcgctcgggtaagcgcaccaacctcagggggagcccttcctgagctagttctctatctactggaccttggcatggatcatgaagagatcaagaatgtcgtgcggaaattcccagcatttgcatattacaatgtggatcgcaaaataaaacctctggtggcgctgctacttgagcttggtgtgccaaggtcaaacataccaggaatcatcaagaagagacctcagctatgtggaatcagcctgtcagataatctgaaacctatgatgacctatttggaaaacgtgggtatcaacaaagataagtggagcaaggtgctttcccggttccctgcacttctcacatatagcaggcagaaggtggagacaaccgtgagctttctcactgaactaggagttcctaaggaaaacattggcaagattctgacgcgatgtcctcatatcatgagctacagtgtcaatgacaatctcaggccaactgctgaatacttccagtcaatcggtgcggatgctgcgtctcttattcagaaaagcccacaggcttttggtctgaacattgaggcaaagctaaaaccgatcacagaatttttcctggagagagacttcaccatggaggaaatcggcactatggcgaatagatttgggattattcacactctcagcatggaagataatctgcttcccaaatatgaatatttcctgacaatgggatacccaaggaacgagctagtgaaatttccacaatacttcgggtacagtttagaacagcggataaagcctcggtatgctcggatgattgattgcggagtgaggttgattttgaaccagctgttgtcagtttcagatagcagatttgaagatattctacggaagaggatggatggaatatgagatggtcataatttcggataaccatggtttaggacaatctcatttgtaacaagacttgatcgctgccctggtatatagtttatcagaacaagtagtgtcctggaaatttgtacttagccatgcttggcagctgaccaattgttattgacagtttgatgtataacttggcggtttatgatgctagtttagctatttttgcatggagtactggcaaatgcattttgtacagctgttgtggcatgctaatgcccctttgccatcctgaagataatgcacttgtatttgatatcaggaaaagttgcagcaccagcacgtataacatggattctcttgcacatcatagaagccggaaaacagacgaagtacatattctccagtatacaactaaaattttagaagctaatcagctataaagagtaattagagagtacactaaaagcatgcagtgcactagaactctggtttacattacgaatatgtaagtgcttcgccatcactcaccactcatcaaggttagtgataaaatggataaaacacagggaagccctgctttttctttaacaacagatgtttgccagggctgcgttcatgaatgcgctgcaaaacgggctcctccttgttttcctgcgcttcagcgtcagcatcgcatgggtgttcgttgtacttcagtgctgaagtttcagatcatgaagattccaacaatagccaacctaataaaaaggaagcacatcaagaaatgctgcaaaatgatgtgatgcaaggactgtataacgtaatttaccaaatgcaactaagacattacactgatgaggaaatacacaaagcagagaagtcaatttgacagaatcagtaaggtaaaacatcagaatttttgcttcaaaattagcaaaaatacacagttgaaaatgcaacttggaagaaatattccaatgccatcaacactaactccaacctccacagcccaactcaaggagtcaaaaagaaagaacgttgacactaaatatcagctatttttaagctttaagtgttttaagtttttgactatttatgccatgaagggcaagtttttcctcaatgcgtgaaagcttctcaattgaatatgtgaaaaatccgcagtagcatgttagccaatttaaatccaaacatgcttttcatatcaaataaaaatatgacagcagaccttttatcactcaattggttgatatatatgaataagttattatggttcacggctaacatttcagcatatgaaagatctgcttgcatggagtttgataccacgtcccgccatgttcaaaaagatttattttatcatatgcagcataaacaaatgaatgatatgcacaacaatcaactaaccagttgcagtagaacaagtttgagtgtttcaattgttgaagacttgaagcagcgatttcaacctactttcaatgtttgcacacatgagcacatatatagtgcaactatgagatgaaaaattataagaggccaactattgacaaagtgcagctcttagcagaattaaggcaataatgaaaatgacaaaataacggactacaaacaaaaaccactatgctaaagcctcttgggtacatgactaaattactcccagtaaagaacactacatcagttgaataactcatcggaaccatgaaaagtaagaacacaccatctctcctagcggcgcacattgagcatctccttggcctcttcctgctcaacctgcagggcgtcgctggtgtacttgctcagcagctccttcttcttccgctccaacaccatccgctcaatctccttctcatcgggtagcggcacatgcgcgataaactccttcccagcctcctcgcccttctctctctccctcttctcctcctccagcctcctctcctcctcaacctcctcctccacctcctcgaacagcacctccctagcagcctccccgccgcgcccacctgccgaggccacctcgccgctcactacccccttcatggcctcccgccgcacccgctccacacggtgccactcagtgatgacctcattgcgcatgcgcttctcggcaacggcctcgagccgctctagcatgccgtcttcgtcgtcgtagtaaccgtagtaccctgcgttgatgcgcttgtggatctcatagcgggtccgccgcttacggacctcgggtggcttgtcgaagagctcacggacgccagggagcttcttggcggcgccgaagtagcggtacccggggccgcggccggaggggttgggtatggcgacgatgttgccgtcgaggtcggtcatgaggggcgcgttggagctgcgggagtggtcgcggccgccgagctcgacgatgcggcgctcccagtggccgcgctcgcggaggagcttgttgatctcgtcgttgaggtcgcggaggcggtgctccccgaggccctcgttctggatctcggcgaccttggcgccgatctcgcggaggatctcggagcgccaccgctcggcgtcggcgaggtcgcggcactcggaggcgaggtacggccgccgctcccgtggcttccgcttctcctcctgcttcatcgtgatgaagcggttcagcatggactgagccttctcctcgtttcgcgccatggcggccggtcgggaggcggcggtggccggtggccgaaggcggcggcggcggcggcgaggttcttggggctgggagagcgagggtttgggaggcggcgggttcgatttggggatttgcgggttgggtggggaagagggaggctgctcccccgattcaatcgtgatgccttttcgggtcggtttggcgtctgatgatgatccaacggtgcggattgaatttgggattcaagtactcatttttgctattgaaattgagttgaacttgcgaagatttacgcccagaatttgaattcgtttttagtcaattcaggcatttgttcaatattgtacggaccatcgatggtggagatttgagaaggaaagtgatgtgttttgagtgcatatggaaaatgatctctttggcctttcaggatctttgatatggttagaatctgtttgttgtaaagcttaatattcgtgttggataaacttatgctgaaaattctatccaaatccagtgtgagatgttcataaatcacaagtacatatgctcaaatctatgcgatgcaatgaattgaggaaatcctagctggttaggtaacttattgaaattaagttataaacttaacacatgtaattgtgtatacggctttcaaggtgctaaagtaaggcgtgcatgtgcatttataccttgtttcacaaaaaaaagaacgcaatgatgtgtttcgaaaaaagacatatgtatttgccatgtttacattctaacttttttcttcaaacttctaacttttccgtcacatcaaatgtttggacacatgtatggagcatcaaatgtggacgagaaaaaaaacaattgcacagtccgactgtaaattgcgagacgaatcttttgagactaattgcgccatgatttgacaatgtggtgctacagtaaacatttgctaatgacggattaattaggctcaaaagattcgtttcgtttacagacgaaatctgtaatttattttgttattagtctacatttaatacttcgaatgtgtgttcgtatgcttaaaaaaattttggcacgtgaactaaacacaagtttgaatgcgtgtaaactttgaaacttgatagtgtctcgaaaatcactgggaggacttgtcaaaatcctatggcccttttggattccacggcccaaaccagcggacggcctgcttaaaactagccgccgacttccggcggacggcggcgccggaaacccccaccacatctcccggcgattctctccaaagtccaaaccccccatggctcggaagaggaagcgggggcggacgcggcgcgccacgcaggcggaggcggaagtggagcaatccgagcgagaaatggtaggggatgaagccgtggaggaggaggaggacgacgacgtcacgaagatgaatccgccgccggcgacggccggtgagcgcgaggaggaggaggaggaggaaggaatcgaggggcttctggagccgttcaccaggaacgagctcctcgacctcctggtcgaggcctggctccggaaccccgccctgcgctcccgcctcgccgccaccgcggagtccgacgccgcccaccgccggctcttcgtgcacggcctcagccccggcgtcaccgccgccgcgatggccgccgccttcgcccccttcggcgcgctcgacgagtgccacgccgtcgccgaccgcgccaccggccgctgccgcggctacggattcgtcaccttccgccgccgctccgccgcgcgccgcgcgctcgccgccgacgcctcctctaggctcgccgtgggcggccgccccgtcgcgtgccagctcgcgtcgctcggccccacctcccccgaccgcaagctcttcgtggacaacgtgcccgcgcgcgccgcccacgacgagctgaggaggctcttctccaggttcggggagatcgaggcggggcctctcggcgccgaccgcgccaccggccagttccgcggctacgccatcttcttctacaagtaccccgaggggcttacgaaggctctcgaggagcgcaaggtggtgttcgacgggtgcgagctccattgccggcgcgctcacagagtgaacaaggagaagcatctcatgaccatgcctgcagatgcaggggcacagagcaatggcttcgagaacgctgcctcacccatcatccatgtccagccgaaggagcttgcattggcatccaccacgcagacgcctcttggatcaaatcggccagttgagatgatggcgaaggggcctagatcaggcacggttccctttcgtcagaacgctggagctggtctcttgggtgcatgccctgtggctacggtcacgtcctctacgccagatcagagcacaccggttagccattctggagcttcaatttccacaccccggactgctcagagattggctaaatcaggtttgatacagagttagtacctttagttatagttataaatactatgagctattgctagcccacaaatgcaatggaacataatcacacagttaagtgggtactaacaacataggcattttctttctcaaaataaggaataacatgtgtgttttacaacaataaatctcatggttaacaaactacagtagaaataaagatcaaagtgtggttttgtgaggtgttttaagtttctagagacaacttagaattggtgaccgaatgcatgtctattgtctaatatagcatcctggactcctggaggacaatttgggaactagagttaagttatggcgactgcttttaatgcatcctctggataatgatgagaaagaataacctgtaatggccacgcatttttgtaggaccttcttatcctcattttacttggggtatccattttttgtaggagcacaaggatgaagagaaatatgccttttctctctaaaacaaggatgaaaaaagaaatatcgaagatgactcctccaaattctgaagttgttttctttctatcaaatgagaggattacctgcaagataatctcctgctgatcgaattgtgcttcaactttgatgtaatctctgtttgtttataggcagagctcatatattgcaggtaacacctgtcccgcctttatagtggggactgcgagtagctaacatggaagaagattttggtttacatattcagttcttgatattatttctattttgtcatttcaccatgcatgtggtaaagtagtttcatagaaaattcgacgaaaagtggaaagtgatgaattcacatttccatattccttcattccttttgagttttgactgaccaagaaaagaagtggtggctctatgcatcgacaatgagtggtccttgtgactttcttgtggtctcacatatgcaaccaagcacagggggaaggcataactgagatagatttgacatgttgcaggaacatggcacatcaacatgaaaggttcagttacttttctttttggttcagacatgattccgtcctgttcaggcattataatcagagttgttttcagccaatggatcaatttgagttttgtttccctatgctgcacatcccattgccccgacaggtctctaagccctcttgttggccatgcagcgcagcttgtgaagcagggcattgtgatcgtgccatggacagcactttcacattggtataacaccaggatggtggttgtcgtgctggatgaggtgggacaaggaggatgtcagtagtgtaaccttgtgatctgatgtcctggttctcggtaatgtgtggcttgctgtggagtttatcacatcatgtcaaaagcagatgcgcttgagtgcttccttcagcgaatggctccagtttcttgggcataattctgttttcatataagcacctgatcccccgctgtgcctagagctgtcaactgaagacagatagaatgaaaagaaaacttgagtcaaggagactatggcattatattgtgtcactttggctctctgtatgaacttggaggcataatctgaccaagactgcactcacatgttgggacagatatggatttataactcgaatggccttctgcttctgcaaaaattagctttgctgctggtggtggaatctgaaagcatgcctggtggatggtgggaggattctgaattctgattcatagtgaggtcatcagcatagatcctattgaattggttttcattacatgtgaggtgatggaaaaagaactcctaggcctatagcacctacaagctgtggatcttacagttttcactgtagtttccttcttacacttctaatccacaattagatgttgctttgcatgaatctggtagagtcttaacaatcctggtagagtcttaacaatcacgagggattcttttacttgcattatactattatacattaaccttaggcttctgtatcaagaagctgagatggaccaattatggagaattatcacatgttaagtgaaggtcatttcttctggaacactgtagtcagtgtttgtacagatcacaaagtaattgagaattaagttgcattacagtccagcatttactacccatatatggtgtgcttggccttatgcaacattcaatcgaccctcctgtttgtagaggaggaatgtcattatccaacttatcatctaatgtatcgtctgccaccacaaccattctctctttggcagttgaagaacacggcagccaccggtggtcctaggttgtaaagtgccgagaaatcccttgtgttaaaattttgtcgccatccaggtgcataaatggtctgttggacagattgacggaaaagcacaaagacaaagcgatgtattcccgctgttggctttggactttcatagctgactatctcatttcctgaaatagtttgtcaggacttcttagaacagattggtgtaagtgaaaaacaaatcttactgccattgttacataagcatttgtgctggattaggagtagaatctcttttgttctttctggcttaagagtcacttcaaacctgttcagatcttattttttgacgcaacagatatattatatgttgcagagcgacagtcatattatgcaatttttaagccgccatcattcaaatatatttgtaatggatcaatgtggaaggtcattgtggcagtgtgcccatcctgttgttttgcgatgagtaatagttttaccttgtgcactttttcaacagcaatagttttcatcatattgtttgtaaaatcattttgtagattttattcttgatagagttcctatattatttttaatgccaaaacaagctagatgtgaatatcagcatggttgccaaagatagtttcatcttaaagaactctctagttcttttaaatgtgtactcagaaaaaggagatgtaaaagaatgggaagaccataccaaagctcgcatttgttgtttctggaatgtccgtcaccaacctgtgtaacattcgcacaactttaattttgcttttattttgagcataataagcaagtgatttcaattccattcattgcaaatgtctcaggtcttaccaatgaaggtattctcttttggttggattgcttggacttggtgagtcaggatccaccatcacctattggtaagtttgttctcactctttgttagaagcataaactggagttcttattttataaataaattaatcatgcgaaacttgtgcttaaacattagtattttgccacttgtattgcaaaatcttagtatgtagtaataccttcacataaccacttatatacataacatgtatttaacaaaaccacagtatataattctaactgggggaggttttcacccaatgacttagcagcatagtgttgaacaccataatatctacctctttggtcatgaaccaaaggaactcctgtttggtttctaggggacagatgggaaagcatatatacatgctcatttcctcagtgaaataaatgcccatttctgtggttttatgaaacaagtgacgagaacatagtgacatacttatgttaaccgtaatttcctcagttattattaaatcagagcaatagtggtgctgaattatttatgcatgattagtttttcttgtcttctattaaggcaaatatgctattccttgaaattgttgtcctgtgcaatttgattattaggatctgagctatttgattgttatgaatagcgcttgtattcattacagggctctaggcctgactatatagatgtacaggtgtaagcccaaattcaaggaaacccctcacataacgtgggagggggggggtggaggggggggggatacaacacatactacatatcttgaataattgttcgatattttttacacaaaatgtagtgctgccaggtctactcaaatgtttgttatgtaacatgaaacatcttattgagtctagcaaagaatatggaatattcacattttatggctcagattgctgaaagcaattgtgattttttttactcatatataggcagatgtcctaaatgtctaggccaatgtgtataaattttaagtttaatctcttcatgcaaaggtgatgttatatgttctgacactagcaaatgcaaggtggtcatctttacgtcatatattcgaaataaaatatggaagcgcacaaggcctttctgtatcaagaaaaaacagcttctaaatctgtgcaaagtcaagattcttggttttgagtaatctatggatactgaaaacaactttgaaatggatgtactctaaattgttgtcctgcttgatgttttatagaatgccagtgatctgacttgggccctactattgtagcttaaggccatttgcttagatcaaagaaagaaaactttcttttaaattatattgaattttgaaatgaggtggacaggttgttatgaactcaccaaagtgtaaagtgtcctcatgtcacgaccagcaatctcaatccttggctcgttcgctacttgtgaaggcttgagctcagatccattagtcagttccctattgctgtaaagcactctgagtgatgctgatttgataaatgggtccaagatatccccaaccacattgcctacaacaagtggatcccttgacatagttagctacaattggtattttttcaggaaatgagtagtattgttctggggaggctgagaggctaacttggccttaactgtgaagttgggtgaagtgaagggttcaggtttgtgctctatatatacttgcaatcccaaatgctgaaccatttgtggacaaggaaactagtagctctggacgacatggtatcttactttaaactgtaaacaataatatgggttcccatcaaatgaaatatttcgggctgtccaccctcttggcctacaccattggtaagcagcgctcactgcaattccacgtaggtgaataaaatctgatggatcatactcacgtatcccctatacatagggtctaataaatagttgtccgtagtgaaaaggggattgccttttgacttgccacatggactgatgcatcatgttctttgttttcagctattaaattcccctcctttttcacagtgaagggtttgtagcaaacacaagcttcattcacctaaggctctttatctctgtttacaacttgctgtttatgcatgatagaaactaattatgtgttgatggtattgcagggatgatcattttttctaagtaagatgaattgctaaaggtattttaattggtataagcttggtgggatgggaatactattctgcaatgataaaaggtggcaatgggttttcgtgacaattgtatcaattgttggctgtcttctcttaagataataattttcatgtccctggatcgcacttgtatcaattggatgcttgagatgctagtttgtggtacaagtgtatggtctatatcattgtatgtcatcatccagaattcagaataatgtccagttcatctatcaaagattataatcagaactgtttgttttcacataatgatgatgattggggcatcgacatatatcagtctcctctccaattaactatgctgcaaatttgccactgataccggcttttccatatttctgtcatcttagggaaagccagaaagagaactgtgcctatgtttgtggtcaggtatgggtggacaccaaagccatccaagttttagtcctcttcggtgttgatttggatgcatttctccttaataaaaaaggtaccgacttgtcctattctctctctctcagagtcaggaggggattatattagagtttttcttatgccctaaacacttggaacatacttttaagatctattctgatctaccaacgtaagttgtggataaagtttcgattataatttagccttattctgtaattatgctctctctctctctctctctctcaaagaggtgtcattaaatataaagacatatactccgtcttcatttgcttttgcctccttgaattttctgactagcctatgttctatcagatattataatgttatcctagataaaacaaagcatctttgtagtgttccattcctttaataaaacaaagcatctttaattagtttcttattgatcaacaaccatatcttgctatgatcagctaatgcagtcgaagttaaaatcaccatatcatacttaaaagtttcacagtttcacttggagtaccggttctgttgtctaatgtgcatgtgttgccaatgcacccgcccaatcacaatttactcaactttaccttttctattataaattgatttgttcagatatgatgtttgaggcagtaacttcatgagttcttgtgaacacttgcagaaatttatttgttctttgacatatgtgccattccaattatgtgatcaaatatcattttcaaaagattcttgccaagttgctgccttttcttttaatacaaaaaactgccatggcaatttatatgtacttgagacaagagaggaggtaaaagcatgttagataaggtttacattgattttgactacttggggaccatagaatcttatttttgtatttatagttttatgtatactttattttttggatactgcatgctaccttaactagtgtattctgcatgttttctgctgtgcaagtttcggcacaataatcctgagactacttccacagtttgcagcaagttctgtatttgattagagaagtgccccacacgcttcaaatcaaaggtaactaacattatcgaacctaaatgttgaaacggtcatgccagcaagtaaagttgcaatgcatgatgatggattgatgatgaatactaaagctgatggaatctatggatgtcatttggttaggttatggctttacaatctttgatttttttgactgtggaataaagcagttccgtccttcacgtgggcatatcccattaatccagccactccaacagtgaatggaaacgtcccaaatgatggacaccatcacatgggtttccaaagacaacaaatggacgtttgacagagctcccagaatggaatttacatgaaggagacacaaaggcggaaagtttctttaggggtggaaaaaagaaaaattcctacaagggtgctgggcttattattgcaccggctacagcaaccacgaaaaggaaagctggcagaattttgacatatcactatctaccagtattagttaccacagaaagtgacacggcaaagctgtctactcccctgttgaagtgagaattctggcataccaggagcaaatactgttcaggtaatgctggtacatgctatatcttttggtggcacctacccatctttgtcactgtctgtagtgcaatgctagccactaactatctactatctgccttgatgaatggaggacgtaggctgccatgccatgaccgttgaaccgatcatatgattgcattccaggatctggaatccttccggaaacgactagctgtgtgtgtgcacttgaggtaagtcctatataccatctcttcttatgattggaagcattctgtctcttgctgccagagtagctgctagtagcaagtagatagcgtacgtgcggcattggtacatgtgttgcaagttgcactctgctctgctctctacctacctgcccatcaatggagccagtgtttttactcgagccgagtgccgcgcgccatggatggatatgaacatgatcacttgcccgtgctcacttcatccgatccagaattccagattccacagcgctcgcgtttgcatcaccatcttatcagtttcctgtagacccggagaaacgtcaatgacgtaaaggtaaggctgagaaggagagatcaaatgacaggtcggcattatgacactttgtgctcttctacatcaacgctcaaaaaggccattgcaatatatatatgtctgtgtttttggtttattgttacagttgtgacatgccacaattttttatttttggagcccaattataatatacttatgcttatgcctttttttcagaccttctattaggtaacgacttcgtgttgatcatggcttgacaaggtgtcacaatgttcagaaatgaacctgactatttcataaattggtcttattggctacatgccgaaagtgcctcctatttcccaaaagatgggctcatgatgatcgatagcgtcaactgcatggtaagctaatgtccaatctgtgttgcttttcttttgactggtactatttctggcgtcttactttttgttttttcttttggtttgcgtggttcgacttggatagttgggtttagtttctactctaccttaacttgcttgagacctgtttttgctgctgtccccaaattcctaacctagcagagaagctctataagactagagaaccagtcgatcgaagttttagagatcatggatacacatatgtaggctgcagacttatacttggcttgtttggcacaggttcaacgctcaattttttcggagctgatatttctagctcctaaaattcttaagagttgtagttaggatgaacgagcattattgagcgagatattctgtttggatgttggactagaattagcgtgtcgaaaaccactttattttattgtagaaactatattttctgaacctataagttagacctgtcaaacaccctacgtcaacaaatataagggattgctccatttatccacatatacaagggatgagttctacttttccttcaactgtctcatttaagcagttacaccaaaagatgttatttatcctaatcaagtactccctcaggacggagggagtaaagtttatgggacatcattgagtgaatagctaatttagtccctcaagtttcactgaaggctcaatttggtcttttaggtttcattttatccacataggtcctctaagtatttgttttggcttaaaattatccttgggcccacttaatatgccatatggttatttctagtcaacaattctgttagaaaatgtcccttccgctcttaatttgtatacaactatacactagaaaaaaaactaaaatgaataaacaacattgcatatgtacttcccattatttcaacatgtgcacatgaaacttgagcctaatggctatcgtatacacttgcaagtacttaatttattttgttttatataaattgctgtgcattatctataaaaagaattcattgcatgcaattttttctcttatatatgtgaatgaggggtataagtgttatttatcaagagagttgttggttatgttggtttaaggataagtttaaattaaaataaaaacttgaaggactaatatggataaattgaaatattaaagactaaattgattcttatatgaaacttgaaggaccgctttagccttaaactctactccctccattccataatataaggcatagcatgcatgcatgtaggcaattaactatgaccccttctctattaaattattacttttttaaatactttactctcatgttctctaattctattggatgcatgcattgtatttattaggatgatccaaactacaagatgataataattattttcttgatttttgggttaggggtgattatgccttatattttagaatggagggagtacaaaacagtctatcataaaatatattagtgacttaggattggatgggacacattcttataacttatagcgacttcttccgtcccatgaaatttgtcgttccaagttgtttagcatgtattaaggttagaagaaaaagactataatattccttaataaataatgtataatcgaatgtaggatggtggttaggggtagaatgggaagaaatttaaattgaaagtggttgatgtgacaagtactataaagcgacaattattttaggataattttttagtgctagaaagacaagtattgcgggacggaagaagtatatagaactggatgcgatacatcgttataacatggtaccatgatatatctatttagatatattttgggactgaggaagtagaatggatgtgagccgccgctccaactcaatattcccttggacggagcaacgaaagatcgcagtccgaacgcgttgccgcttgcatccaaccattttccatagcaatcacttcgtaacgtcggtgtcacagccaaattccgcagttctcgctcccatgcatggttcggtgtactaactggaaacaaccgatgatctccgccaatcagcagcaacttggcaaaggagaaaagaaagcataaagcccctcgtcgcggacgtcatgtgccagtgacatcaccgccaccaacttgtgtgagcgctttgatgacactctcgctgcgagaccgctgcagagcgaagcaacagcccgtggtatttaatccgagcttctgccctattagcatccagattcattccagcagcatcgtgtcctggactcctggcccttgctgccttgcattcctgatacgatctaatcctagatcaaccatcacttttctctctgctactccctccattttatataggggtgaaaacagagctgattcggactgatagtagtcataccatatcctaaaccatattttttaagtggattcgaagcggttgcggatagtgtgcggatacggatacagagcggattggttcggatgtcagaaatggagtggagtcggtgcggaatcggttcggaaacggattaaatttatcggatgttacgtgtatatgcaatcaatacaacatcgagttagcaatgcaatgaataataatacaataattaataaatgacctatcgtaataattatatgcttaaggctaaacaagtaaacaacatgaatacattatgtccataatataaaaaacagctacgtaagtataatatgagacggtgaaagtctcatattaagaaatctaggttaattgatgaattagaccattggatggaccaacttatattatatgtaatagatagagtggttacatgtgttaataatttcgtattatccggcaaacgttctatcggataatccgatagaaaagtcagataatccgcatccatcggatttcagaaataccatatccgcatccgcatccatatccgccggatttctaaaaactcctaccatatcctcgttacggacggattcggagcggatcggatcggatattatccgatccgttttcacccgtaattttatattatggagaaatttaacaatattccatctattatgttgctttgaatcgatcgctagtcaaatttctttaggtttgataaaaaaatagtaatatctataataccaacttagttttattaaatataatataatattgaatatattttgataatatgtttattttgtgttgaaaatgttactatgcttttttttataaatttggttaaactcaataaggttttgatatgaaaagttaaagcgacgatttataatataaaacgaagggaatattacataattaacgtgctgctgtattcttaatctagatcgagcatgattctggaaacgtcactctcagtctgagatatggttcggcctgtaaggaaattaagagatgattatgcactgttaggcacctgtaatttggctctctctagctccaagttgcagaaagctgggcgttcctattcgtaatgcagcattagttttttttttaaggaatgatgcagcattagtgagcagtagtactagattctattctagttaagcctgcatgcagtgatgcaggtcaggtcagttgaactaaagaattcaaagcagccgccctaagctagcttgaagcccgacactcgaataatgcacatatcattgacgagagtgagaggagtgtggtgctatatgcctttctttctttttctgttcctcgctttcagatcgccgggcgtgcattgcatcgaccggtttgcaggtcctttcccaaggtcgcatatcgcatcgatctctcaaaggtgagagatcaaatataatccaagcgtcatactactagtcaaagaacgcgtgcacattcttaaaaaggaagagatcttaagtggtgatgaacaagttgggggcagccagtgaccattggcttcctcgaaacggctaagggcccctttgaatcgtagggtagaaaaaacggaagaacggaaaaaacacaggattctgacaggaattgaagtgtaaaacagaggattgcaaaacacaggaaaaacacaggaatggttatttaattggagcacaggaaaaacgcaggaatcggatgagagagatagaatcaaaggaaatttttcaagagattggagctcttgctaaatttcctccaaaatccacatgcaatgtgccattccatagaaatttcataggatttgaaaagtttcaatcctttgaatcaaacgatttatgtaggaatttcatagggcataaatcctttgattcacagggcctaaatgggcattggctatgatatggcgcatggaaggaacattggccaggatccgtgtgcgcgtggacggcccaatcgccaatcggccgatcactcaggtcgttcggctgcatatgtaatgcccccgtttgcagtgacggcgtaatagtcaccacgtagaaacataaaccagcttccgcggcagcggttttggagtgaagagactcgtggaggtgaagtcgtcctctttcaaggggtgaaattattggatgaaatgcttatgattccctagcttccaaagtgtgctaaaaaggctttttatgtagaagaatgttttaaattcattttcaactttatggtatttatttcatttgtatccctttctttttaaacgaatagcaatagacaacaaagttcatattgatatagtaggagaaaaaaaaacaaaactacatcgccaagaggatataatcaggagaaaacaaaagaaaaatagccaaaaagactcggtcagtgaggccaaacacaaccagctaaccacaagttgaaggagcatagcattgtgttagttatcgttatgtgagaccgattgtcgctaggcgcacaacggaaccacaccacccaacaccagcaacgctagacaatcgaacagagacgtgtgtttccgtttgtcatcccagctttgaattatacagggagagtacaagagagaagaaagatccgcttgtcccttgtataacccattgctagtatgacaacgaggtgctgctcacaaatgccctcatacaaagtcaaccttggccattagttgatcatcgaaaaacgtggactcccggacgccaccataaaagagggttgcagaggaaaagagcgagagggaaaaaagatccactcatccctcctacaaacctgttgccatgatgataatctgagggtgccaacgctaatgagagaaagttgttagagggcgatgcgcaaagacatagcctccaatgaggtcatgataccgagaaatgctatcaccgtcgcccacccaattaatttggacaaggttttcatctagagagtcccatagtggaggagaattaaggcaccgtgacaactagaggaggataatgagttagctcgtctcgtttgagcttgttgttttaatgagccagttcggcttactcgttaacgagctagaaggttgactcggctcgacttgcaagctggctcgttaagctcgttaatgagctatatctcatttaccattttatcatatattaacataataataacactaaatagtaaacaaagaactcactaaatatgaatagttttgatgtaattaaaatactaagcactagttaaaacactaattatataaagatacgatgatatcttatactaacgagctaaaagactagctcaattcgactcactaagactgtaagtttgagccgatccgagacgagctctttacgaaaccaatctaagccataagtttcgagttttttatccgctcctatcgacgacacctccaatggaaatcacaacgcccaaagcgtcgccgttgccgttccggcggacttttaggctcggctttcgctgggagaagacgcgtgggggtgatgattcgtgattacacgaggggatacgcccgtgccgggctgccttactgctacggcccacggcccaaacgctcgggccacgccatctgattagagatttgatcctataccttcctaaacatttgaggatttattcactttccttgtctcactgttatgctcgcgctgcctcacctcccgggagaagtgtgaaaaaaatctttaatatagtttaaatggtatatgttgtgagatcatataatgtcacttgtcaattttcagggctaatttagattgctgtcaaaataaacctttctaaaatttgacaatactaaaattttgataagttggcaacattgccaaatttcgatagaatcgattaaatatgttattgccaaaattctttaggtattatatatgtttggtaataaactaaatgtatccatatgtttatcaattttactttaaaaaataatatgatttaaaataacatcaatctgaacgggctttcaatttaaatggaaagtataggatcaaatttcacccagatggagagtaatctcaattgttgttgttaagcttaaccattaaggcaaggtatcaaattgttctctataagaaaaaaaaaaagcaagccacggaattggtgatctggccgtctcactgccaagtgggccatcccacggatgcctttttttattactaattaacgccttcttttcctactaaacgctcccatccctcctcccgttccctcgatctctgcctcctccccccaccgccggagaaggtcgccgccggcgagcgagcgcgcccgccggagttgtagccgcctctctcccccccgcggcagcctgacgccttcacgcagcgtgatctccttccccccctaccgctggcggggatccgtgctctgtcggtcggtaagccctagcccccgcccctcctcgcagtcgcagctcgatccgttcccctccacctccggctagctccctgaacgagcgccgcgcccgggatttcgcggccgccgcggcgctgccgcttgccccgtgcctacgcgtggtggtggtggtcgtgtcggcaaaaaccctcgcgcagctctgtctcggccctcggggttctccctccgggtgtgaggtgtttgagcatggggaaccgtgggataaccgtggctaaaagcacttgaaatcatctagctcagcgttcacttccctgttaatgtagactttataggtgatgaggtgaatcaagtaaaatgtttgtagcatttcacccgttagagtgtattcctgttgaagagtaggagatccttgagattgttgatgtccaatcctttgtattttgtaacttgttcctgcgatacctattgccgagcaatatgttggtgttgggggtgtgttgggtaattggagcaatgcaagctggtctgccagatgtgcaactgtcttgttagactagcatggaaattagtttgtacttttgcacattagccagttaacacgaaacagatttaagtttggcatgctaggaaaatctgcgtcatagatagaggcttctataaccatggctagattttctgaaaatgtccgcatgcagtcggaagcttaaaatgttattgtgggaatccaacttttccctatttgttggacattattctactaatgctttgaatgaactggcaaatgttagagttaatctagcatccactcatgtgattttatcaggttgtactcactgaacatgcttcctgctggctcttactggccccaatgcgattacgcttgcaagctgataggttgccgcctgctcctattgccctgccccctgccccctgccccctgcttgcgttcatggataacagagtgtagactgagatgatactctgttttgtaccattccaaccagagcaatggcaaactggcaatgatagtcttagactcttagtcctagtcccctagacttctgaaacttttttataagaaatggaagaatgcccaagtacaactaacacttacactgggaatgtttgaagaatgatctagacatatgactaagttctttttctctacattgtctgacatccctttgggatttgcagagtgcagactgatcttctaatatttttcatagttctgctaaagttgaaatgtgacagactgacagtgccatggtgctaattttaatacttggacacattttcaagaaaaataatatgctggtatacctttttttaatatatgggtatctgaaactatgcaggttcagttggtggactggtgaactgaaacttattgcttggtgctagtgtgatggcgtacgagattagcgagatcaaaagtgaagttctattctcgaataagacttacatacagcaagcaatcgaaacacttcattggtctaatacttaggacaaatttttttgcaacatgtatctctaaacttttagatcaccccttaaactttggggtaaagtccatttcttaatcttacaaaatggacattttgcgcactaatcctgaggatagaattaataggtcactcaatatcccatgctggttttaaagttggtttttgccaccattcgaccatggatactggcaacaatttctttccaccagttttagaggtggtgttatgtgtgattataaaggaagatggacatatggtttgcagggatttggagtttattaatagtatagtaggtactttgtctacagcaattattttcacattgtaattgttcttattgaaattttaaagctaattgaaaagcatggcatacaagaaaagagagatagagaaagaacttggagaagggctttaagaatagagtatttcagtatagtatctacaatagtaattcaattccagtttcagaaagttgtcacatattcactcctgccgatctcacctattttacctctttcacaccttagttgagtactaataattttttaatttgtctatgtagaaattggcataggcctggtgggctttggcatcctattctcattctttggcgttatccttttctttgataggggcttgttggcgttgggtaatgtatgttacaacgaacaaccccttcgtctgttgtgtcagttaatatcaaataaaactttattgtggtgttacacttgctatctttcttcttttagattttcttcttgactggaatcggcttgttgcttggttggcaatctatgtggcagcttttcacaaagaaggcaaacattaaggtacttgagtcaaagactttgatagatacacgctactatccatttctttcttatctatgaatggataagatgtgacaccatgctacaattattgttttctacttttcttactaaaattagataataataactttgtagttggtcaagttttcaagttgatgcttgtcctaatatgcatggcaatgacataatagttctgcctacataattttgtagacaacaaacttgtttaggtgcatgtattctgcacgagtacaggcatgatcactagcctttaatctgttgcaagattgctatggaacaaagttgaactatagatatctggtaccggtctactggacatgcaaagtattgtagatcgcattctccaggatagcaatttttgtattgctgcaatacggcataattgattggtccaacttatttattgtttctgtgcatcacatggatttctctccacatacatgtccagaagaggtaatgagtttatttgggcagggatctgttcctttcttccttggtctgtttcttctctttgtccgatggcctgttgctggcataataatggagctatatggatcttttgttctcttcaggtcactgtctaccagccccaactttttgcccaatattcatttcttagtagtcctttttggcacttatttcgcttcccttccatttcttgtgcagtggttatggacctcctatccaggccttcctataccagattccagtcattggatggattctgcaatacccattccaggtaaagtttctcttcctatgagagaaggagggcgatcatgatcaaattgatgtttcatggttaatttttttttttatctttattctgccatgagtcctactctattgtcttcagattatggatatgccatatggatataactgatgttgcagtattcatctggtttctgcagctgtttggtcagttcaggcgtaaacgtgcatgacaactcacggcagaaattacccttcgtacgggagcatattttgtgatgttaatacggaaacctgctgtgtaccatctgccacgatgcagtttaattcttgtgtgcatattcatactttcgcctttctaatctggagtttatctggcttttgctcattttgctaactggcagtagtttagtgttcatatatagacgatgtagaggcttcaaatgattgttgctagaaatttgggatctgggtttagcaaaacatgtggatcttttagcctatttctaacaaattgtgagccagtaactattgcttgaaaggtcttacaccgatgattcttccaaagaaacttacgttgtactcccttcatcgtaaaataaataaacttagtatgggatgtgatagtccatatccgtagtacttaaaaaatgtcacatccaggtttatttattttgaaatgggtggagtataattgtactaggtgtctttattgggttaattcaatccatgccactacaatctctttgattttaaaaaatacaattactattcatgccattacattttgataaaaaaaatatatatgccactatatactccttcaatgtattcataagaaaaattggaccaaattacccactcttcttcctcctccctctctctcctctcttacctgggatccaaatgaagccatggtcacggagcttctcgcgctagctgtgttgtggcgtaagagcagtcccaaccctctatctagaatggtgtctatggcattaactacattgccatgtaagacttttagcttatgtggcaatatattaattaagagatagagagagtgaagagaggaagaaactgggtctcatgcaagacacagcttcaacacgagaacatatacactagacactatcaagttttgcattggaagataatagtgtcttcataatagatgaagaataaatatgattggtagagaataaatatgaatgtatttattaatggtccactttaagaaatcatgggttatatggtgtatttctattgtaatatcttattaacatggtaccatggacactgcttatggacactatgggttgggactgctctaatggatgagctgcatggtgtgctggcagttatgcttcggaaccttgccaccggcacaccattggaggtcgttagaccaacgggctcgatggggattggaccggtagaagagatgattgattagagagagagggagaaagaggaggaatggtaatatggtctaattttttctataaacgcattgaatgggtaagtagttgcatattttcattttctattaaattgtaatataatgtcttcaaatacacgaataagaatgatattttgtaaaaatcgaagaagttgtaatggcacgaatccctcgtttattttgcgatgaagacttagagtgcatgtcaggcatatttttcaatttactctttttttgacagcgactcattgagggttaaatgcatgtgattatgtccatactgcaatagataatgtgcatataattagtccctggacctaaccagcgatgatgcgctatgagctcatcgtggatctcattgataatgcatttgcgcctctcatcattgctgcctttgaatcttgcttctttttgttcttttggcagaatttgccgtcttggccagtgccgtcctttgatcgtctatatctatggagatttcgatttgatcgcggtcatctctatccaccgagtcactgtgaccccactagttttagacgttttgtcattagaatttgatgatggcgattggttgctgttagtagcgataaactagtaatttgtttgtttcttttgagtttagcatttgtttccaatgatcgttgcgttgaaactaaaccccaggccctagcagaatttctaccgttttgtttcttcaggtgcttgcctaactattgcctatataccaatcaccaagtttgcgtaggtgtatggccatgatttacctaaccaaactagttagccagatgtgtttttctaagctaagggaaataccatgtttttgctctcctatgtcataaaatatttttgattgttttgtttatttatttttatggcttatctgtcgtagcttaaatgatcagagctactccctccgtccaaaaagaatcaacctagaaaaggtcacccgtcaaaaagatatatcttaggttaggttgattatttttgaaacggaggtattacgcttgaattctgttggaaatttctctcaaatttgtgccttccttccaaagtagcccttgattgcatcagcgcaaagttgatgaaatagaaaattcctcatcattgcgagagtacaagtatcatttcgtttgaactatacgcctccgtttctttttctcgatccgttcacggggagagccaaaacacttccaattttttcctgccagagccttgcattctcatacgggaccaacggacagcattttggtagagtgacaaatagtaaattcttccgatggcaagggaccaccactggcaacacctgttactgctctgctgtgctcactacggacataactgattgctctgagaataaaaactagattgtttttaataaactagattggtagtcaatttataaaaatctagaaaaactgaatcttttttaagaatcatgaaaagtgggtttactggtttcttgacttctagttggttttctgcattagaacctaggaaagcgggtttctggattctcacctaatagtttgttttgtacattatacaattatattagaatctgaataaaaagctagactcttatgaattaggacatgcgttggagaaactccctaaaccggctctagattttatttactcggcctttgcccattgctcggctacactggtcctctcttgtgccacaagacgtcaaagccaacaatcatcggcagtgctgaagggtcccgcccaattactccgctttccatatgatttctccgagtgggggatagccactgctagggctagatgcaaaacaggaggaaatttcttgaatagtaaaaagaattactcatgtgtatcataaaattctcgcacagctatagtttcccttattcgcggaataagcgaaacaacatatttgcaaacgaaaagtaatttgtaaataaaactatatgcatgttcttagcgatctaaaagcaactgaaaaataaacttcgatgaaaaaaaaacctcgaaatcagctccaaatttaagattgaaaaattcaaattttggttcataagtataagtataaacgaaaagataaggcctttgagaacgggagatgcaattgccatcacaatttccatgtttttccctaaaaaaacaatttccatgttaagggatcaaatgaccattagttgatacactgaattcagaccattgctgctatttgatcgtatggataagacttgtagttggatccttactaacaaatgtcttctaaacgtttactttctggagtatatattaattttctttcatatatgtcagttaagtcatactccctccctcctattttaagtgcagttgttggtttctttgttcgacgtttgatcgtctgtcttaaaatattgcctactggtgttcgaatgagtaggatgggatgtgcttatccccacatgcaaaacgaaatgtctcattagtatatgtttaattaaatattatatataattgttttaaaggaaaatgaactaatatgagtttctaaaacagtttatctataaagaaaatgaagaaaaaacattgtttaattgttcactaagcgtgtacgtgaaaatggagtgagtagaagtcgtcgaacaaagccttgaaaagttgttgtacccaaattttccaaattgttttttttaagataaagtataacaaactgatactccctatgtcctataatatagcaacgaatctggacaggtatctagataggatatttcatataacaacgaatctagacatatgtctagattcgttctactatgaaatatttcatctggtctcaggttgtcacttttctatccagatttatcgtagttatttactactacgtcgtcactatagaagttggtaaacgcatgtaatttacactttttactgccacaaaaaatcccacctgttccaaatcctactcgtgttgtccccatgggaacaaggcaacaagcctccctttgcagcgccagaaagattcctagtcctcctctcctcctcccctgagtcccctcccctccccagctcccctcccctcccgtcacatctccgcccaatgtggcatataaaatcccccagatccagccctccccacctccactcccttcctcattgcacacacgagaaacacagattcacacccacgagtgttcgttcgtgcccgatcttgcaggtggctctgtgttccgttcttgttttgttccggtttcttgcgctaatccatcatgttcgcaggtgggggtggggggttggtggtgatgcctgggcgcagtggtttatcgatcccttccctgccttgtggcgctgatccaggagcggcgaatttctttgagagggtgttctttttttttcttccttttggtccttgttgcagccaacgacaacgcgggaatcgatcgataaacctctgcatccagttctcgcctttttgtgttcaagggcttgaggcagtagtactggctattgcttcttgcttcttggctgctcatggggtgtaaacatgtttactacttgtttaggcttgatatatatgtttatgtaggatatgtctctttttaatgacatgactatggtgatagaactgtaaaaatcttttattctgatggttgcatgatttgatatgtgcttctgataggttcttttattctgatggttgcatgatttccatgtttacatggtagctgtaggttttgcactacaaatttcccctggatatattgtctgagacttagcatcagccatactttgaccatgccattgctaatgtgtaaggataatgagatgatgcattgatgcttgatgtaatttgtgggctttggcctattttatgcttccaaagtattttgcaggtgattgtgtggttttgttttgtcttctaatagtgggaataagttccttgctctagagagattagttctcaattgcaatttgtatccattaatggaactacgcgaggtggattcttgttggatcttgcttgctgccgtcatgagtcatgactggaacaggttccagttcatgtggagtgaatcaaatgcagaatacgttctaatgccaatgggtcttcccttgtattcccaatattcttttgcctattgctatggtaaaaaaaaagttgtttgcaataataatctttaaaaaccttttaatttgtacttctattgaatattattgtaggtagtgaatccatctcttgtctctacaatataacccctccccccccccccccctccttgtcttctgtaattatatgaagattagccagcaaagttagatgtaaaataagatactttctagctaatgactgctagaatggagtaaatcggtaaatgctcataatgcattaggatttttaactttgaattttcttcatgaatacctttcaaatctaggaaagctcaggtgattgttgacattattcgatgcttcctacaggaatcaaaaaatgaaggtagccgtccttgattctgtcaattagatccctttattctaacagcgttgcctctaacctaaagaatgaactgagtgcacaatgtctctattgctgaggactcgttctgttcaccaaatgaaaccttttttttgtggttttgtagattttcagagactcagaccgatgcttgttcatcgccaggtgcccaggttttccgttcttcttggtgaagttaagtggatctgccgtttggtggctggtaatattgatctgaatctgatacatatcaattatatgctcggtgcttgttgattgccatcaataataccttgtgttcatctggaaaatatcatgtatagtgtatttaagaactctgtatcagagcagttcgaagattgaagatttcggcaggctactgtggcttgcccaaccttgctgtatcactgttttacaacttcctaataggagatgtgtttatgtaactctgattagataccgttttatttggagggattatataacttactactctctccattttaaaatggacgacgttattgacttaagacatgtcttttgatcatgtgttttatttaaaaatttagtgtaactttgcaaaaaaatgtaagtcatgcttaaagctttaaattacttctaatgataaaacaagtcaacaaaataaatgacacgtgcatttgttttgttttaataagacgaatcgtgttatgtcatgtataaaagttagcagcaccatacattttaaaaactaaaacgaagtttttttttgtttggaaagtaacattgtccgtttatattttaattatccgttctcagaggacgttttgttcgttcgtatgacaatcgtattacattgtcagatgttggcacgttgaaacattgctagctgaggtgactgccagttccatttttcttacaaacagaacaaaattgcctaattcctcgaaaaaaaaaaattctacttactggacggtacattaacgtgcccatggtacattaacgtgcgagggcccagaagcgacggtttggcccaatctggccccaagccatgtcttgtgtatccacgtgcactcgagttattatattcatgaaaatgaacaagaaatatcaacaaatcgagttatctgcatggaaatgaacaataatactcctatgtcaacaggtcagcctgctcctcagtaatcagcacatgcttatcctcattttggcacgatcgtcatgttcggtgatgtatttaggatttttatatggctgattcaacttatataatttttttaaataccctaaatataacaaagttagaagtataaattgatcatatgcgttttaaaaaagtttatttacacatatgtatatatatacattggattagaaatgttttgggtgattccgggaccatatcccctagatccacctatgaccatgtccgtgcgacaattcaccgtcgacaaaagaaatatcatattgagttgaatgcacgaggttaccaacgagcgcaagcatcacaagttcgagcaaactgtcaccttagatgtatataggttgcgtaggacccagaagcacaaaatctcgtgagcagatcgatcagcagcagagcagaatggctctcctctccttttggtcacgagaacggatgcgatcttggccatctcttttcccaaaaggaaaaattggcaagattttgctttgcgcctttgcctttatttttcgccgctcacgtctacatcggcgacgagctttccgggagcatattgatactactagcacagataaggaacctgacagctcaagcactagctgctgctgctgaaattatggcaattaaagagagcgtaaagcagcagcagaagttgttaatcacacttggcacttgcaaagaagggtaatcaagggagagtaagagagcgaagggtgtcatctgcatcccgtgacaatagatcagagaagccaggaggtcaggtgaaaatttgataggaaagcagtggccatcaaatattaatgtagttgtggctggattacaagacgatcagctcgaacacaaccaaccaaactgaactgaatgatgctccggttacaccaaccagtatgataagacaagagaaaattctctcaattcctacgaaaattgaaccaaacaaatcttactctcagtacatttctcctgcatttatttacagtaccatcaagttgtattgttttttgtataaaacttatatttaatttacaaaagggagtgaaagaaaagggtatccatatgctatgcttgcatttcggtttcgaagaaaatattcatacgttagaagtcaaaaaaatacggagaaatcttcatctctccctctgtcactgccggcctccggcgcggccgtctctacggccgccgtctcgccggcggcggcggcggtcgacgcagcgaacgcctcgtgcagcaccttctccacgtcgagcgcctcggcggcggcgcccgcgtcgtcgtcgtcgggcgtcgggatgaacggcggccgcgccacgtggaggacgcggtcccagtccacgccgcggaagaaggcgtgccgcttcacgccgtgcgcgccgagccgcctgcccgggtccttctccaggaggagtccgatgaggtcgcgcagcggcgtcggctcgccgggcatgtccggccgcgcggcgaggacgcggtggaacgtctcccgccggctccgcccccggaacggcgtgcgcccgtacagcatctcgtagagcaccacgccgaggccccaccagtcgacggcgtggtcgtgcccgctcccggccacgatctccgcgccacgtagtcctccgtcccc

SEQ ID NO: 7007 - DNA, 11086 bp, Oryza sativa
  unsure (1)..(11086): unsure at all n locations
tgcttactatactattaatacccggtcccacctatcatacactcgttacgtcttggagtccgtgctacagctggctacagatctgtagcctgctgctcttctctctcttcctttatctctttaaaatatgtttatagctggcttatagctcgctattgtacctgctctaagggggccgcttgcaaaataaccatggctggccatttataggtagaccccttgccgtccttctagaaagatgcaggggggcgtttgtaaaatatcgtatgtcgttattttacaggtagctcactagagagctgcaagagtgccgtctataaaatgtttacgtaactgttacaacacaccaatgggtgtgtgccacgccataaaaaatgacctttgggagggcgtttttgtagagcgttagatgtgtagatttgtgaaactttgaaaaaaaatattttaataaataaaattaatttaaattaaaaattttaaaaattccttgtacttggggctcggctcacagctcactctatacaacctgatcaatcacagttcacaaccagtaatatttgcgagactgactggaaaaaaagaagaaaatgtagataaaactctggagaaaaaatagggtcgccataatgcatcatttcacatgcgctgaggtaattacagagaaattaatctgacacaactgctaatcgatgggaataaacagcgaacatcgacataagttcagaacatggtgatgagatgaaaacagtaaggcccagcaacatttcatttcagccttagtaccaaattatggattaaactacataacacaaagtcaccaaacaagaagacgtgcagcaacatatcccaattttagcaatgatcctcgttttggataaggtttttggcgaaattaacattgctaaacagcatcaacatgttttcgccgtttggcagagcagcacaacctccagctctggtgagaattagcgatcttttatagcggtcaggggatcatgcctagcgtgattgatgcacggaccacgtaacatgtgcttgcgaagtcgcggtcaacataacagacggtggagatactcgccgacattgcagtgctgcacgcatggaacagccatcccatattccccatcttcatcccctatcgaacccgtgcggttgctcggtcctcgtcgtttgagcacttttacggtacaatatattggtagtatatactgctagtataattaatctaacggtatagattgatttgatctttcacttaattaaattgcattataaaatttgaaagggtaaatttgtctttatttgttctaacgtttcctctgctctagctcagccaaaaaaaagtctctgttcgttccccttccaagattccttcgtcttcacgacgggcgaccgccgtcgccggcgcatgccacgccgcgccgttgccgccagccaccatgaacactagagatattgcaatagacaaatagtagattagcagtctcctgccttatggcttgcctagcgcccgatgatctatggatcgatctgcctcttgcggctcgtgcacgcaccccggattctccgcatcgccgtcgtagtcgtctcgctcgtcaggctactgctacgcccgcgcaatcacatgccccgctagcgccgtgccgccacaatcgctcgcacttacgcaaaggcaactagccagtcattctccagcactccgcagcctaattaggctacatggccagaccaaagtactatcgttctctgccattttattctgaacaatttaatctgaagatggcaaaggtacatgcagcaatagattagtacataatcagcgcatgcttaagcatggactagtcgtcacttgtcacacagcttgatgacacaagccagtgccagtacatgaccatcaggtagagatcaaacattaacactttaacactgacaaagctaactatctactgtactatgtagtatttgataccgccacacgcgcctagtctctcgtgaacacagtagcaagatgcaagggacgcggtagcagctgaagtgctgaacgggaatcgccgttgcgcgcctattctctgtcgaatcacgctggcgccgttgccatggaatcgcgcaggcgcacgtatgagaaccaacagcgcaggcgaacgagtactaattaataggattggattaactctgaaccataaaattactaaaaaatacttcctaattttttgccaaattcctaacatgctcttacaaatactgctagtatatactgacagtataatgtaccgtaaaaagttctccgtcgttttcgtcttgccacagtcctcgtgtgtcatcagcgatccactccgacgacgacgattgatgttgatgtggtgtagatgctgaacctgtgacagagctgcatcgtgtatgtgtagctcaggttgactgttaaatatgtgatcttaatttaggtctacaacatattcggattaattttctagtaaaacatgtgttttcctactaggtgtttttcttttatatatatatatatatatatacacacacacattagcaaaagtgcccgagcattgcaccgggtgattacggagtgtatatattaaccaaaagtgttgtttggtttagcaaaagtgcccgtgcgttgcaacggaaagaaaaaatgagaaaattaaattaaaacatattaaattctaatttaatgaaaaataaattttctacaatattaattacacactttgaaattttagcaaaagtgcctgtgcgttgcaacagaaaggaaaaaaacaacagttaaattaaaacatattaaattctaattaaatgaaatacacattttctggaatattagggtatttttatgttggtaggtatataattaaattaattttcaagtaaattaagtgtgagaaataaaatatgatggttggatttaatttttgttaaattttctatattaattacactctttgaaattttcttggaatttacatagcttaattggtaattttgataatacaaatatcatttcagcatttatttaaataaaaatcatttttctctatgggcctttttcaacccattttcttctttagcccgcaagcgtaaaagtctacttaataccccatactcctcatctcacttgctggaccaccggcccgcgtgcggcccaaaccctcgatcgatttgagccgttcgttttgatggacggctcagatcagttagaaattgatgaaaaccataaccctaaccctccccctcccccctacccgagcccgncgncaaccccgcacccgacgccgcctctccccctccccgtctccccatcggcgccgcttcccctcccctcccctccatcggcgccgctccctctccccatctcccgcctcttcccctctcccatgccggccgcctcccccgccaccggcaccatctctctctggcacggcgcagcgacgacggggtgcgccggagacagcggcgacggttgtccctcccactccccctctccctctccccgtcggcctcgacggcgatggcgccctctcaacggcggcgtcgatagcgacgacggcgtcggcttcgtccgcgggtgaatccgtcagcggtggcggatcctgcagcggtggctccctccgccgcctctcttctccctccagcggcagtggtggcgttggcggccaccgtttttttttttttgcaattttttccatggctattgctaactgagacggattgcgtacgaacaggacgaaaattagatgtgacgaaaggaaaaatacgaatatttatattagttatatagatatggtttagttaacatgaaattagatgtgacgaaaggaaaaatacgaatatttatattagttatatagatatggtttagttaagatgaaattcatcgttttaatttcgcttggatatatattttgttagaaaatcatgagctgcaatcgcaattaggagttcgatcgtctcaaattaacatgcaactttttaaaaatgatttcttataggattccttatatatttttaaaagcgaacaaacttaaaaactgactcaaatacggatctgtatttctaaaagcgaacaaatttaaaaaccgacctatacatgaatgacgtatcaaagtaccggcaaaaacatcttcaatttttatattatatatttttaaaaagtaaagtagtataagtggaagagaagattacggacgataatttttttttggtagtcgtagcttttctcaaggagtcgacgttttttttcttttttttcacggtagaagttttttctcttttttttttctccacaggggagtcggacgtccatttttttttctcttcgttttttgttttttctctccttttttttctaacagaggtgtcggactttttttttttgccgattgatgtttctttcctcttttttgtttttctcgctttttttttcccaaacggacgatggaaatttcttttattttttattttttataagtagtagtagatatatatatatatatatatatatatatatatatatatatatatatatatatatatatatatatatatatacacacacacacacatacactcttgttgtaagctgtaaaaaagggtgacgttactattgttattcctctacatttgtaatcaactcatcaatactgataattgccggtttgatgctcgtggttttttaccacaatggttttccacgtaaaattcgtctccgttgtgcatctattttcgtaataataatccgcacgcctcctttttgggttcacaccccccccccaataaccgctttctttttactcttttcgttgtaacctcctagccttcatggctattgtacagcgtttccctctactttaatataaatatatcccgtggggtttaaacaaaagtgtcggcggcaacggaggaggacgtctcggcatagacggagtaaattcttttacaacttgcccaaacctgcacctttttacattttagtcttttttaaaaaaatatttttggacccttcaaaaagtcttattccaagaacggacatttttctggtgctagtgacccagacgtcaaggccgaccacaccctcgcctcctacggaagcgaagctaagtcactgcggtcgtcaccaatggcattcaaccgatttttcttgcaaaaaggtatttggtgttaattcattgatattgaggatctatttataaaaaatcatttatatttcaatttttctgaatttttttacaaatagatcctcggcacaatgttattggcatcgacccctcacattagtgacttagcttcccaagggataagaggtaagagtgttggcaccaatgtcattagcgtcaagacatttgtcagcgccaatgaccctaacgctgagaaaagggtgtatttctaaaataagtttttccatatacctatttataaataagttttttttaaaagaactaaaataaaaaaaaatccagttctgcaaactccactgtacggctagccaccggcatcgttcaaaacagccgttcaaaacaccacaacgatgcagcttgtccgccctcttatcatgtgctgggcaactgcccatggtggttgggcattggctttgccactgatcatcgcactgtaagaataacgataagccatgtagccttgtattgctaagtcaacccaagccatctttgaaaaatatataggaacaagccattaatttttgttaatggcatacatagaatatcttgctcgttacatcgatagaacttaaagatcaaactgaagaagaaacaaactaaagaagatacggtccaactttttttttaattaaatatagagttttaatttatagctgcagactaacgttgatgtcggcgaaaatacttaataaattaagagccaacagacaccgcagaaatacaccaaaaagccctcagtttttggaaggggaaaaacgacatgtctatgaaaactctgatttgcactagaatggagagtagccattgtactaaaataaaattttgcccattccatagttcaatcttttcataactatcacgcaggagaatgatatagcacataccctaggagctctttttcatacccgtgcttttgcaacggggttaggagaactatgggtgaatggttttattggtttcagttttatctctcagtttctaaaaaaaaaaaaatctctccgttttattaatttttgattattttttcgtggaaacattgttttcttatgtggtggctaatatggttggagaagagaatgacgactctactctttacagcagtagagaaaagtataacttttgtctagtaaactaactagagaacagagatacacataaagccctattttgtgggtgttaagatttaaggtagaatcatgaactcgcaactccaccttcttcccacgctctattgggtttaaaacgtttttttaggtaaagttacttaaagcactttttctccgtcttaattgtgatcttgtattattgttagtttggcgccctttgccaggtccaaattaagaattacccccctgttgcctaacccaaaacacccgacaagccagcaaattaaatagttaaattttgagcataaacctattcttttagacaattaacatacctattcctttcacagagtttaaattttcgccaagcttgtacctttacgcggcatttgatatatagcgggttaattacttagtcgatcgagagctgaaattccgtggaggagaaaacgtacgaaaacgctttaaatcgggcgtccgatgccagcactctcccctatcttctctccccacccactttccccctttctctgtcttcttctctccaccattccccttttctctctcacctagcaacgagaggaagcgagtgtatgcagagcgacgaggcggcgacggtgccggagcggaggagggcgacgttgcggcggccgggggaggcggcggcggcagcggcagtgctggagcggaggagggcggcgttgcggcggtcggggaggaggtggcggcggcggcggcggagcatgtcgttggagctgaagttgcaggacttcgggttcaccttctccgaggacgacgtggacgccgagctcgtctccatcgtgagtgggcttcggcggcagcgctcggatgaggacgacgccagaaaggccccggccttcgcggtggcttccgccgaggaggaagcagccggtcgccggatcggctttgctccgaccggcgcctcctcgtcctcctcaacgctgaggaggccgcacctgtcggaggtgtgggacgaggaggaggaagaggtgaggaggatgctgcgcatgattgttgcacacacgttttttttttttttttttgcacatagtgtattcgtgatgttgcaatttgtctttttagatgtttctcagtactgtggatgttgcatttgatttctttggatgtttcacatattgtgtttttgttgttgcaggcagtgttctttgagtgttgcattcgattgaaacattttcgataaaacggtgaaacattatttagtgaaagatgaaacatccagaacaatttatgttgaaatattttttttcgagtaatgaaacattgtaacattttttaacgtatagtgcaacatcgtccggacgtccgacccatagtcctctccttaaacgtacggtacctcaccgcgcggcttacgtacgatatagaatgatcgtgcgtatatcgaggaaacgatcgatcaatcgatagccaataacgcgcgattggtatgcgcgcgcgcccggccggcgtggcgccagcgctcgcgaccggccatgtcgtcacggcggcgggagcgggacgagcagcgagaggcagccgacgagccaggccacgagcgccgcgaacagccgtggcagcggcgtcacgggcgccccgacgcccgcggcgccaacgatcacggtcgccccgaacagcatgaggtacagcgcggagaggcgcatcggcggttcagcacgccgccgtccgcgggcaacggcgagctgctgcggcggcggcggcgcatggtcgtcgttgctgctgctgccattgccgctgccgctgccagtgatgttatcctcggcagccatcgcgcggtggatcagaacgcaccggccacggcggctgtggttgtctagctacttaattaattttgtggttaattaatttttggaagcgagcgcgaggcaagctagctagctagcggagccgtatagaatttataccaccctgatcggcggttgctatcgatcgatcgaccgggatgatgatcgataattcgatattactgaccaggtgcggatgaatccgggacatcaagatggaagggaagaagcttcatcggaatttcgatcgatcgaggcgtatgtgggtcatggccgggtgaggtggccagggacgaattttctttgttttggtttacttatatctatctatcttctatctattatatatatatactaaataaaagtccattaaacttcctataaacgctctcaagccgccacgtggcactcctacaaacgctcctagaccgccacgtggcaatgtctaattacatcgtcgattttcacttaatcggtggacccaataatttagaccattagattagattagatgtattatatatttaaaaagaaagaaataccttactgttcaccagaaaaaagaaaacaaagcacatgtactccatatatccatatataggtacgtacgtagtatgtaaagactaaaaaacaatcaataatcttacctactgttcatcgtaaggaaaaaaaatacacacacacttactataaaaaaaacaataaagccaaaaaaaaactacgtacgtactaccattaaaaatctattatttttaagatagatttttttctactatttaaagataaaacctattactctataaatttaagcaaatataactgtcgattttaacttaaatgggtgaatctaatattttaaccattagattagatgtatattattttaaaaactaataccttattactatgtctacgtaaacgggagaaatatataactgttaggctagaaaaagaaagaaatcacataatcttatcgtcgtttttcacttaaataagtggacccaataatttggaccattcggttagattagatgtattttatttaaaaataaactaataccttactgttcaccagaaaaagaaaacaaaaacaaaagtatatactccatataggtacgtacatacataagactaaaaaacaatcaatcttacctactgtttataaaaaaaaaaactatgcacagacttactatagaaaacaataaagctaaaaaaatatacatacatagtaccattgaaaaaatcaattatctttaaaaatggagtattctactatttaaatataaaagctattactctgtaaatttaagcaaatatcaccgtcgatttttaacccaatattttagaccattagattatatttattttattttgaaaacaccatattactctatgtatgtatgtatacgggaaatataagcagtcagtacgtgcaaatgacctgggaaaagaaacgaggtttacctactgtccttcggaaccaagaaaaatctactcacggtggttttctgaaatagtattttcaaaatcacttactataaaaacaataaaaaaatatgtatcattggaaaaagatcgatggtctttttgaattagtattatctactatttgaagataaatatattgctctacaaatttatgcaaatatacgtagttaaactaaatttatattataaatataaaatattccatcaatgatctttattcgttctatcttaacatacaagactaatatatataataattaatgctatgatattttttatttcatatcatattttaaggtgtcaaatatcacttgatgaatatacaacgctaatttaaatgaaaacaatttagttgtttcattttacaccattagattagatttattattgacaaataatacaactctcctatatacggatacatgaaaaatatataactgttgatcggaaaaagtactctgtacgtagttatgattgaaaaaaaacaataatgcttacatatcgtctgacggaaggaaaaaaaatacttatgataaagtaaaacaatcggaggtctttaaaaaatatttttctacaatttaaggataatacctaaaaaacaatttaaggataaaatataataatcttcaaatttacacaaatgtaaatataaaatatccaatcaatgattttaagcgttctatcttttaaattattttaaaattatatatctaatttgtgattcagttgtattcctttaaataaataaactattaatatctataaccctaaatacatcacaaatatggagccggcatgtaataattaatgttatgataataattccacatcacattttagtgtaagaaaccacttgacgaatatataacgctaatttaagtgtacatatgtattatccaaattactaaaggtgtctcatgtgattagaacaataggtgctgaaaacaaaacggacactgaactaacatgcactaccctatagatatttgtcaaagtatgataccgtactttggattatcgtgatagtatttaaaaaaaatcactttctctcagttacatataaattcttctattattttgggataaaagttaactccttcgatttatgtgacggtggtaatataagtctatgtttaattagatgaagtagtatcatcagctatatttttaataataaatatctttcattaatatatagtaaaattaaaatgttactttaagtcatctataacatacacaataaaaaaagttatataaagttgggaaactccaaaaatttaaaagaaagaatcacacataatacaaatagatatgaactaactccattattgtgacatattttttctaataaatttgaggatatacattttcaagtaatacgcccaaaccagttattaacgaacatacatttcaaatagagacaaaatttttttcaaaaatatgatccacacataaacattcgtaataaaagttcaaacaagat

SEQ ID NO: 7008 - DNA, 43805 bp, Oryza sativa
cctttactggtaaagcaacacaactgcagaatcttatggacatattgtccatggaattttatcttatcattgtttttttaaaaaaaaactttgggacaggtgcattttccgtatttgcaagtacaacaaggatattaaggcattggaggagactgagaaacgcctcaaggaagagtagattaatcacacttacaggtctgccaataacttagacaacacgttttcaatggagcatatggctgttgatttaaaatgtcgactcaacaatcttttcaaaaatcgagatttagtttattggaatccttttactagatagacgttgaagattcttgttttagacttgtgttgatgtatttcaaggagtaggcttagctgagaacctagatcttcacctaataatttggtggtgatgaaacttggacatattcaccattcacctcattcctgtcttgcaaattataaagctaggaaagaaacaaaatcatttccatttcaattcaaaagaatctgatgtttgataaaccatgctggcatgccattgattctgatcaattctgctctgttgttcaaagttaagtaatacaaggggttgcatgaatttttaaatgactttgttattggctgccatgcttgcgaatacggaaatagaattacattgagcactggcattcatttatctttccttcataatcacttgctgcaccaacaattagtctattagacaatgcttaaagattggttccagtaaaggctgaaataccaggtgctagtggtgccatacttatcttgtgtcaagtagatgaatgtgatgttaccatccaactgtgcacaaacttgcaataatttgacatgggaaaattgatggatcgttccttctataatttattgatgcaggtggattttgtgctattcctgtccttcagatgtatgcagatagttatgtgggattcccagtgtatattgttcgccttgaggcaaagaaaatgttacgctgtttcggcacatgattttcagtacgatttctcgtttaattgtaagtcgtccggattctctttttttgtgttttaacttgggatgatgtcagtacgatttctcgtttaattgtaagtcgtccggattctctttttttttgtgttttaacttgggatgatgtctaccaagaatacatgagaaccactgaaccctggtcatccttcaattcaaccgtttgaacatttgcctgcatgttgtctgaacatccatttactggcttcctcgtggtcatcgttgttgaattagtctggtatgtgtttagaattgtacatgggactgctcgatgcatctagtatgtacggcgtcaaggtttctgaacagttgaaccaagactcggtcttaaacctacggtagatatgtactttacgttgcagcttgcaaagggcaaaggtttggagtaccccatgtatcagggcaaatgtttccagctgttttacgtttgccaagcccacggatttattattatctcgtagactctgttatccttttcaccattctgactaattcacggagctttgcaatggaacggcggatgagaaggtatgctattcatgtgcagactgcatatgtccgatgagaacaaactcgctctgtatctgtaaacctcaaactgcagagaaaccacagtagatactctcttacattgcatttggaaggtcttcttacatcgaggcaggtacgaactgtttccgttgtttggggttaggaccgggttgatgtgaaccccttccgaactgcacgacacggcggaggaaagaacagcttgcttagctagctctacctgtttgcacaccagaaagagagcgtacggtggccggaagaaatagaggaaaagacgccgtcgtcttctcgcgaacacgcggtagtcgcgtacccgcgcgctggagaaaccgtgttgccgcggcggacacagcggcagagtcatggactcggactctcatgggaatgagtataaacactggcatgaacaagttctctctgctgcaatttcttcaaaaaaatgccagaaacaaattgccagcacctaacatgaacaggcaaataaacaagtaaaaaatgccacacaaatttctgtagtatgagaatacacgcaacgaagtagttaaaaaggagaaaagaaaaggaatatagcatttttgtttctctaaacgaaacgtttcctctcatatgaaacgcattttgctgcctactccagtcacacaatgcgtgcacgatatggaatagtttatgtggcgcaaaggagcgtgtgacggtgtggagcgtgtcggtcttagttaaaactgaatggcgtttggtccgtgcctacctccatcagagaccaggaattgactggaacaaaacaattcagttgctcaaacataaatatatttataaatcataaaacattcaacctattggacgggcaatcgagtgaaattgaatgttaggtgaattcacctaaatttcggtttccacgtagcaggatagaccgagcatgggaacagagaaaaggggcgcatgaactgaatcctgttgacccctcccggttttgtctaatgaagctaactgttgtctgaagctttggcattttcagtcgtttgaatttgtttgtcctttaacataacttctggcaatctagaatcagcatcagctcttgcaactcttcacttgatatgcttctagagaaagaaaatgcaaacacaaagagatgttcacagaatttaaaagtagcaaatgaattcatacatagccagtcataaagtccactggctatgtacatcctctcatgaatgcagagtccgggtttcataatcctttttttaaaaaaaaaaatccattgttagatatttcctccgtcccaattcagattcatggtaatgatttgatttttttaaagacaaatggtgtatcttccaaaagaaatgctccctaaattgacaaacttagctagcttagttgaatgatcacactgatgtggttaaaaaccataatgaccattactcagtaatctgtaaaacacggattaatgaaacatttcaagtggctgtattaacatgtcaccatgtatttaattgctaaaagaagtcagtgatgtatagcttgtattaactgagttgctttcaggcaatccatagtggtaggaaaagtacagctactgtttggtaagtagggtctaatagcagtacctgtgatttgacctagctaattaccagtataagtttctagagtagctcacttggtttgagttagtcttaaaaattgaagaagttggtgtgagttattcctaggtttgaaaatgcgagatgtccacacatattttaccgccgcctacaaatctacaaccaccagtgattattctgaatgatcggtggtggcattatgaaagctgcagcgatcagctgaattactcagatgaaagaattgcaactgtactccctccggttctataataattgacgttttagataagattgaggtcaaacttttataactttgaccatcaataactttaaaaatatttagtttaaagaaactcgaacaacatatataaatttgtctttcaaaacactataaaaagtaaacatatatttatttattgtgtatattataatagaaaaataaggtcaaagttatattttgtaaaccgtgtcattgtccaaaatatcaattaaaatgaaaccggagggagtatttctcaaaagaaatttcacagccactgcataagatttacttcgacttagccggtattccgagcgaaagttaccgtactgttcgcgcaagtgacgaactgaatacaatggtgacaaaagcaagcagttgcataaacaacgactggactttgaataattctagttttataggatgaaccggtccttttcttgcatgattatagatcccggttagtatcaccttatcctagtcaagaatgtggaaaaaaacaattacaaaattgaaatcaaagtgacacacaaaatcaattaattattccacatgccatttggtatgaactcatgaaccataaaaaactggacctatgtatgaactacattcacacaggatcataaactcctaaatccttcaaatttaaaagaagaaaaaaaaagaatacggcgtacggttaagttcattatggtggaaccaacccacccaaattttaatcatagacttaacactgatgatcatacttacagctaattatttttttagtgacaaacatatctgtcgacagcaaaacacccgtggtgacttcatccacatgtcagtcagtcttctggagataatatatgagtaaagtatacatgtgcgttcatatgggtgaatatatgcgtgatatgagcacctatgtctatattattttctcattcaatgctttcttcgtaaaaaaaacatattgacggagggagtactacctcctttctaaattagtggtcgttttgactttcttcttgcaatgtttgattatttgttttatttgaaaaattagtgcaaatataaaaaagataagttatacttaaagtacttttgataataaagcaagtcacaaataaaataaataataattctataattttttgaataagataaatgatcaaacattacgaacaaaaactcacaacaacaaatattttgggacggaggtagtaatacataagaagaagaagaaatgaatgtgagttggcatttactttctccgtcccaaaaataagtgtacttttacactgttcacgtctaacgtttaaccgctgatcttatttaaaaaaaatttatgattagtatttttgttgttattagatgataaaacatgaatagtattttatgtgagacttacttttttttattttttttcaaataagacggatggtcaaataaataatatttctataatttttgaataacataaatgatcaaacattataaacaaaaactcacaacgataaatattttgagacggatacagtagtacataagaagaagaagaaatgaatgccgagctggcatttacttagctaaagcacagcgtttattaactcggtagccgttccgaccgtttcctcccctccctctcccgcggtttgcaaggacgccctctcgttcaaacgttcgtctgttcaaacgtcaacctttccaattcaaacaatcaaacccctttacccttctcccaacctcctcctatttgaacccttcccaccacctccagtctcccgtattgaactcttctcagctcaaagccttacaccacaacacgcagctgttctcgctgggcttctcttcttgcgctgcggtgatcgatcgagagcttgggatggcgctgctggcgcggagggcgcggaaggcggtgatggcgaaggcgccggcgccgctgctgcagaagaggggtggcggcgcggcggcggagctggcgatcccggcgcacttccggtgcccgatctcgctggacctgatgcgcgacccggtgacggcgccgacggggatcacgtacgacagggaggggatcgaggcgtggctggacaccgggcgcgcggtgtgccccgtcacccacgcgccgctccggcacgaggacctcgtccccaaccacgccatccgccgcgtcatccaggactggtgcgtcgccaaccggtcccgcggcgtggagcgcatccccacgcccaagatccccgtcacgcccgtgcaggcctccgagctgctgttcgacgtcgcggagtcggcggcgcggcgcggcgcggcggggcgcgccgccggggcggtcgccagggtccgggcgctcgcgagggacagcgagcggaaccggcggtgcttcgtgtccgtcggcacggggcgcgtgctggccgcggcgttcgagtctctcgccgccgccggggaggcgggcgttctcgaggacgtcctggcggcattggtctgcatgatgccgttggacgaggaggcggccagggtcttggcctcgtctagctcgatgggttcactcgtcgccattgccaagcacgggagcttggccggaaggctgaacgctgtgctggcgatcaaggaggccgtgtcgcgggacggagcgttcgtggacctggcggatgacaaggtcgacaaggtcgtcgacgcgctggtcgtgatcatcaaggctccgatctgcccgcaggccaccaaggctgccatggtcgccacctaccacctggcgagctccgacgagcgcgtcgcggcgagggtagcatccacggggctcgtcccaacgctcatcgaggccctcgtagacgccgacaagagcgtgtccgagaaggccctggcggtgctcgacgcaatgctcgcctcgaaggaaggccgcgcgagcgcgcggggccacgccctcgcaatgccggccctcgtgaagaagatgttccgcgtgtccgacgtggccaccgagctcgccgtgtcggcgatgtggcggctcggctgcaaggcctcctccggcgacgaggaggccgccgcgacggggtgcctggtcgaggcgctgcgtgtgggcgcgttccagaagcttctcctcctcctgcaggtgggctgcagggacgcgaccaaggagaaggccactgagctgctcaagatgctcaacaagcacaaagggttgggggagtgtgtcgacgctgtggatttcagagggctcaataggctgtcatgaattgagatcagtgttcagaatcattgtaaaaatagttgcgagcagctaggaaatgcagattgtaaaaatagttgatggggatttttgcggatgtgctttccatgctagattgtaaatctaattgcaaaaacaagtttcctactttcctcactgtaaatattttgcatgtaaattccttcttttactgcccatttgacttttgcacgatttttttaaaatatatctgtcgttgtttttgtggatgagatttttcacatttcgagccaacaacaatcaaatttgatgcataacgttcatttgtcctagtgtaaccaacaccaaccggatcgccgttttcaattaaaaaatgaatttgagtttttattatccactaaaatcaacattccagtcgtaagaagaatcttaaacgttgaacacctgttcctccaacccaacctgcatgaggcaggtacaagttctcagttctcacctttgaaaacttcggttcaagcttggacgaaagcggctgtggtcggtcgatccgagcgtgacgacccggttgacctccacggctcatccaccgcgcgcagcgctcagcctctcggtcaggaccgcgcgacaccatccagaattttgacctctcctcccaacctcgagcacgcgctatgcatctgcacgtgaaaccgtgatatttcacgccgcggcgcgccgcactatgctcctcgacctcgacggctggctaagccgcgttcaccgatctgctctcctcggccggcgcggcgctagtgtgtgcagcgtactcctcgacagttgtggtggtggattgggtggataagctcatacgcacgtacgcaacgtgaaacacgaccccgggggggggggggggggggggagtgttgccggcctggacgtccctctcggcacacgcggcggctctccccgggaaattattctaatccctcgaggggatgttccctcgtttgctcaaaaaccatctaaacagttatgaaaaacttgataacattcatacaacacacacatatatatatgtaggtaaattaactggtgctacatggagtatgggctccaagattcaaattgagtatatacccaatttgaatgagtatgaatttttttttgtaaatgtttagatatgaacattaacttctttactaacaagttcaaacaagtttgaactaagtttaaactttttttttgttagattttggttctagatatataacatccaaacatataattcattaggtatgtaataatgaattgtgaaataaagttgagtttgagttgttttgttgttaggtatttgtatgaatcaatttcatatacctaggtatatactcacaatttgaaaatttttaaaaatttgagagaatttgtgtgttttataccttggcccgggcaccatggagtcccatatgggtatcatatatatatatatatatatatatatatatatatatatatatatatatatatatatatatatatatatatatataactccataaaatcttaagtccaaactcaactcacacgtcgacatataaaaaagacaaattcagcatatgaataatatcgtactgtttatatttaaatttgcctttttttttctcgatgtgtagatcaaatttgaatataaattttggtggactagtaggtatcattatactttacattgccaattttttatagaaattttcatagctatttatattaaatttgaaaaaaaaaattatgtacgagggatgtcccttcaagagattagaatccactcccggctctccccaccgcgccgcccgcgctccagccagccgaaccgcggagcggagtctggtcgaccgcgagtagaccgcccgtcgccattctcccacgacgcggtcgccggtggccgtttgggccgcgtctcggatctgagtcagaatgggcctaatggagagatgggctgtacggagatggacgttcgactcggtctagttagactgggccgcaggtcaataaaaccttttgcctagttgtagtccggtattcgtccgaagaaaaagaggtaaattgcagtattgcaccaagactactagagtaataataacgtaattacagatcaaggttgggattttgtaattacgtccaaggttgaaaatcccaaccatattcccgtgaggcgttgctaccggaattcttccaattttacttgctgcattcaatgttttaatacaaaaaaaaaacttatgtgcactcaaggttttaataaaaaaaacttatgtgcactcaaggtgtatgataaagtagatttacatgagtagaacagaaggccacagctctttttatcaacaactcaacaacaattccaaaataaacagctctaacttgtcgtctcagagagctgaacccaaccaaaagaacaagcgcccgcaggcccagcccgtttagcccacaagaaaaagcaaaagacaaaactagaaaaaaaaaagagaaaaaaaagaggaagagtgaagaaaagaaaagttcatctcctcctctccttatcccttcccttcaccaaaacccccccgacaccgagcccctcctcctcgacctcgccgcaaatcctccgccgctcctccgccgctagggcataaccgcccgcctctcgccggcatccgcatctcccggtaagcattccgtccgagtctccacgtggtcctcgcggccgccgccctgcgccctgtccaaattgggtcggggtttctgatttgattggttggtccatgtgttaggggaagggaagggaagggaagggaaggaaggaaggtgagggcggatatgtcggcggcgccgataccccgcgagtgggtggggctgcagcagtttccggcggctacccagaccaagctgcacgagctcctcggcaagctcaaggaggaggtattacacgcctatgcaaacgcttcttttatggactggttaatggattggcgatgattatatatatcccgctcttgttttacgttgttagtaactggtggtaattgtgtgttttgttactccgtctgtgatgtgattgtatgttttactgctttgtttgtgatgaagaatgtgagcacattgacaattctggtgatggggaagggcggggtggggaagtcatccaccgtcaactccatcgttggcgagagggtcgctactgtcagcgccttccaggtaatgcttcttccaggtctgatttctattgagcccataaccgaagttgcgtacttatgggtgtgttgatgaatgttttcctgtacagtccgagggtctcaggccgatgatgtgttctcgcaccagggcaggcttcaccttgaacattattgacactcctgggctcattgaaggtggatacatcaatgagcaggctgttgagatcataaaaaggtaccaatcttgagttatagcgatacttgtctttaatcaatacagttgcttgcatgtaccacaacatcttgtttaggatttgagatggtactataaccatactaaggttgccattttgacctagggtcaagggcggatcgatctgtagtatattttcttggaattaggagcttttatgtactgaaatcggcatcatatttatgggcgacacatctcagaaacattgttttagtttgtgtttccactttgccatcctgtggtgtaagaacgagacaggaggtgattttatattattcttgattttacaaacagaatctagggtgctgtctgaagagtcttgatccaatattcatgttaaactgtttttttgtgcactatactcacattactctgaagataacctgttggctttgtaattttgttatttttttaatatttgtatgattttctggatattccagtttctgtaaggctcccatcagatggcctaataagccaaagaaaaagccaaaatttgaattttcaagcttaattttgagattgattttgagatattttcaacgtagtttctttttcaacattggcttttaagtcacaaagaacacatttataaaagttttacccacaaattcatttttatttcctaataagccgttttggcttattaggaaataagccaaacgatggggacctaagggtataatagtctctaggagcaaaccctgatggttgattggttaactactgttgactgcacatcaatgcaaaagggaaatggatgactagtaatggaggcgaaaaatagaagtgcaactcacaatgttagagagagtgaatcaggttgcaaggagtgacaaaaggaaaattctcttaattattaacaataactattatgaatcaacacaacttttctttaggttgctgctcataaatttgaccttcgcgaagttttcattatgctgtcttcaaaagttctattcctatacaagtcatatgtgttatctactgtatcgcaggtttcttctgggcaagactattgatgtcctcctttatgtggatcgattggatgcatacagaatggacacgttggatgatcaagttattagagctgtcaccaattcatttggaaaggccatttggcgaagaacattggttgtattaacacatgctcagctctcaccacctgatggacttgactataacgatttctttacaaaaagatctgagtcacttttgcgatacattcgtgctggtgcaggagtcagcaaacgagaacttggggtaatgtatacctcacttgtcttttatatgggtattatcggcatatcaagattttttttttttttttgcaatttatctgcagcttcctctgtctaaactaatattttttcttcatgtgtattatttgacatgctctttcagaacaattattcattttctgtcctgtgttgttgctgtttctttgctgatctggaataatagaacacatagtaatctgtcatttcccttctccttgggtctatttattttgctgtgtaactaacacactctcttcagttcatctgtaggttatgtatttatgtgttaatattattctatgaatcaaattatcttttgaagtcactgattttgcatgctaaccgacgtccaatgtttttttaccttgaaatttagtattcatgttatgaacctgaacctccgcttgttttggttacttatagtgtctcagtcaatgatactccctcatgggtctactgttgcttcaaccttctgggttcttgagtggctagctttaaattgtacactttcttatgtttccaacttgtctgtttgcaaaatgctacaacaatatggctgtttgggtgctaagtttctggggaaacgtggtactttccagtttgcactctccaacacgagatatgcatatgtcacattgcatatggcaagtatacaaaattacagatggagttgaactctgcagaaaaaagaaaattctcatcactagctaaatgtgcatcagtcttaggttacacaaacatctttttctccaacctgcctttttgctttctggcatgctctcagctaaatgtatatggtgcatcactcttaggttacacaaacatctttttctccaacctgcctttttgctttctggcatgctctttcattgcaaatggttgcagaattaacctgaactttttatttctctgtgtactacagaatctgtttggaaatatattatttcctcaggtgtcacaaacagttgtgcttttaaaatctatagtcctttttctatactaatgttaattgtaataacattctgctccttttaggattttcccttgccaattgcattggtggagaacagtggaaggtgcaaaactaatgagaatggagagaaggtttgactatctcatcatcatgtttggcttgtatttgaacatgtctagcttctaggtaattgaggatgccatacaactgtatcacaggttctccctgatggaactccatggattccgaacttgatgaaagagattactactgttgtctcaaacgggagcaaatccattcatgttgatcaaaagctaatagatggtccaaatcccaacaatcgctggaagatgttcataccgctcatccttatggtggaggttagctcctttaaaacaaaacagttctaaatctaagcacagcattttcatcttttgcctcaacataatgcctcacttatgtttaccatgctcttctccagtactttttggttgtaaaaggcatccgaagggccattcatgctgacatatcaaacgggaagctagatgactgggaacagcgttacagagacttggttggaagcaaggacccggtagaccagaaaggttcatcatccggcaaccgcaaggcttgagctgaagaatgataccgcatgcatcgtgacccattcaattctctgtgcttttctttttgcgctctattccagtgatctatttgggaagctttatagagttatctgggacaatttgagcaaatttgctcttgtttttagttgctaaaaaaactgtactgaatttttttgtgctgtcgcaattttgcaaatgttgttgatcgaaacttcagttatttgagttccttgtgatgttccatagtggccgcctgaccatctggcacctatgtattgttgtgggcttatagcaacatggcagatccaacttcgaagcagaggtgggcttccattgcatgctctacaacgaggtgtttccaaacttccaatggaggttggctcaggcaagttagcccgtgcaggtactggactactggttaatgctgagtggtatcacaatataagcaagcaaaattgactgtaatcacaatatacgcaagcaaaaattaggagttcacttcaagaaacacagtgatcgccaacaaatctagtcaggtactcggggtcgtatgggcaactatgtgctttatattgctatcaatatcgattttaaaactgtatttcggcataaagaatggccaaagaactagcttcaaattgaaaccataaagcattgcaagatgttagctaaagcttacaaaatgattcaaaagtcaagtgggttcatcctacctgatccaaatacccaaaatgataatatgcaaatataggggcatactccagatcaggaaagaaatactttcccgaaacccaagtctttctaatgcaatattacaagtatcagcataagcaaaggcctactgcggtggcttttgtatttgatatgagttacaaaagtcttggtatggcttgaaatcgttttgccatgctaaaaattgcttcttcaagcatttatatactttttcctcagcaggctgtatgtctatagctggagactcaaatttcatcctcactgggctgaaatcaaacaaattggatgcagcttgctcaggtccagaatgaggaattccagctcttccacaaacaaatgtcataaagttttcatccataggtggtgctgtaggagcatgcaaacatgaagggtcatctagcttctgtgtttgtttatccttctttctagcagcctcatcaagagtgggcctatcagtctgaggctcataaacaaaatatggtttatcatctttcacctcttgtgaagcagaccatccattacagttatctgtattagcaattgatatttcaggaacaaaggcttcaataacttctctgcaccgatggcttactgagctggaatcttcccgagaagggctgtctatacccttgttgctatcttccatcgcgagcagaacaggtatggggagtactggaccaacaagagaatttccagattttgctttgctcgtcagattccaactaatgcttgaagattttgccaacaggtaaggccgaagtttattactatttgggaaacatgcaggaacttccagatattcatatatgcgctttttattggtgcttgcaagcatgtccttgtatttggagaaggcaacaagaaggatatctgaagatagtctgctcaatatgctttgacatgcaatttcgaaaatgttcatgggcgcactagcattgcataggaaatctgaaactgactgagaacaagacgcagagttatcctttgcaaatactgatacatcttcactaataataatatggcgggaacgtttgttgacatcagaatcatgattctccaatgagctgcgcagattgcccttcagaaatttagataggtaatgcaacttcagaaactcatatctttcagaaaaattttctccgtgagtgtcaagagaaatggatgagctagaacccacagacttatgttgtgattcatcacaaatggcatcatcatgtaaatctccagaggcacggaacctttgcatctctaacttccccgatgatgttaaacggatcaaagcaaagccagtgaatgatgactccaacattgtgttcggaagcacgtggtaaccaatgatgtagttcctaattagttgagatgcagagccatgtcctggaacgacccccttgaacacctcttccataagtccaatgctgcagctgcagtgctgacctatcaaagaaatccgtgatggaagatcccaagcatataggggagcattttctgtagcgtcttgctccttagggccacaaaagaatagattaaattcagtgctccatagcgaaccaaccagaatggcaaagcctgaatttgatgcccactcatgctccttagaaggcctcagttcagataatcgaaacatagcaatatgatttgggttatcaagcccatgctgccaagccaacacgggtatcaaaggccgtctgatatcaaagaccatcaggtgacgctctgtcaccaccgatataagaaaatcatcaaacggagccttgcagaatgcaaggtaacattgagtcttgacaaaaggatcagtttcaaacaacccttccatcccaactcttgctaaaaccttgtattcaccatgatccccaaatctcatatcaaccaaaaggatggccgccgtgctcgcaacgatcactgtccacggttgcgccccgtactcgcagcttagccagtcccccaggtcatccttgctgccaaaaccaaccttcatcttgcctccacgccgtgtatccagatcgaaccagcacagctgcccattttccagcagcactacacactccgactgcaaatgcttgctccagcacgcgtgcacaacagcagcgtcgaacgcctgcttggccgcgggcacgagcgcgggggagccagaaccccgcgactcaaccttgaaccaattcaccgagtacaacgtcgcagcaagaagaaacccctcgatagagctgtcgcgtgaccgcgacggccacgaggaccaggacgccgtggtggcaagctgctggatgcggtgcctggggtgcatgaacccatcgctctgcacggagtgggagagcggcgtggtggggtcggcgacggggtcgagggtaacgtaggagacctgctccgcgttctcgccggaagggaagaagacgacgagggaccgcgaggaggagggggcgcggaggacggcgagcaggttggagggcgccgggaagggcggggacggcgcggtgagcagcgcccccgagagggggtcgaggtcggcgaaggggaggaaggaggtggagcggacgaagtggcggaggaggtggcgaagcccgcgccgggaggggtgcggcggctggaagggggaagggagggcgaggagcgtggcgttcggcgggagcggggagaagaggaggggcccgtatgatgcggcggcggcgaagaacgtggcgagggacggcggcgcgaagacggaggagacggggaagaggaagcgccagtcgtccgagaggttcattgccggcggcgccggcggacacggccgcgcgcgcgcagcgcttcgaagggatgcaggcgagtgagtccgggaggtcttctgtggggagttggggagaaaacgacggcgacggcggcgcgggagaaagatggggaaggttttgggcggtgcctcggtcgatcgccgccaactctacaatatcgttaataaataaaaaaaaaaaagtaaagtccatcaccggtccctaagcttgtaccgttgtgtcatcctggtccctaaactcgcaaatcaaccgttcagttcctcaaacttattcgattatgttattctggtccctaaacttgcaaatcactcgtttaggtcctacaatttgttcagttgtctcatcccggtccctaaacaggacggtctaaaaactttatatcgaaaaataattcaaaactttttcatgtgaactctagtgaagataaactttatatcaaaattgtagccctcgacgtgacctacaactttgtagttgaaaagtttttgaattaaaactgtttagggtcccaaaatattgttgcatgtttatagattttgaaattttaattttaatattacattttgggacaaaaaatgacttaaaataaaaaaaattcaactacaaagttgtagatcgcgtcgagggctacaagtttgatataaagtttgtcttcattagagttcacatgaaaaagttatgaattatttttaaatataaagtctttagaccgtcctatttgatctagatgatattcaaatccaagttaaggaccggggtaacacaactgaataagttggtggacctaaacgaccgatctgcaagtttagggacccggatgacacaatcgaacaagtttgaggacctgaacggtcgatttgcgagtttagagaccgggataacacagcggtacaagtttagggaccagtgatcactggactttactcaaaaaaaaaaaactctacaatagcgatgaaaagttgaaaatggttagaaaaatcacgagatttcgtgaaccggttcgaaaattgatcctgaggggattttcgaatggttttccataaatttgaattcgaaaaggaaaattcgaatgaaatttgattgaaatatgtaaaaaaaaattagttcagttttcttgtgaaatatgtaaaaaattagttcagtttttttgttgcggttgaatttcgatgtagtgatacttgtgaaccctcacgctaatgaaaagtttgtggttttaagacgccagaaacaattttggtttgtacacgacactttatatgtaatgtttttatctttgtactataaaaagtgcccgtgcgttgcaacgaaaaaaactaatgttatgataataattatggatattttatagtttcatgggaattatatgggatactcctagacataaacaatgaattaaatctatacctaattctgattctatatcatgaaaaatgaataattacattatttgttgactccatttagctagaaataatttttttgacccccttcgcaagcgacaacggcagggcccttccccaccgtgagcggcggcggtggcggcgccctccccaatgcaagcgacggcggcggcggcggcgccctctcttaacatgagcggcagcagtgccctccctcaacatgagcggcggcggtggcggcgccatctcccactgtgtgcgacggcggtggcacgtcctctcgcggctttcataggtggcacaggcagcgtcggcagcttcccataggcggatctggtggccacggcggtgtcggcaccctctcccactgtgtgcgatggcggcggcacgtcctcccgtggctttcatgggtggatcaggcggcgtcggcggcttccacgggtagatcaggcgatgacgaagattaagataagatttgtgtgttttttattattttttctgttcctttctctttctttggattgtctgattggattttgtatctatatttgaatttgtgttttatccatcttacgtgatgtattactcgcgcgtgtgggaacggaggccatcgttcgactggactcattgacgaaaaattgatgtgaagaatggaaagttacagattttttaagtagttataagatatattggttcaattccagtgttgataggttaattagtcacggttcattagtagagtcattagcgtctagattaccaaaagtaattagtgttttcttgattagccttttccttagtatgtttcgagtccgaaccaagttagagggaaaaattgctaaacatctcccgcgtgattttttttcttggcatttgacgtttttttagccacatgatctttgcgccaagatttgtgcagcaattgccgtggatgaggtcgacagggagttaaggtgtgttattcttgtcgtgtgaataaaatacgtgaagtatgtaattttcatatgtctaattaagaaatatctctatgttaatttacatgtcaaattaagtactaatcgatacaacaaatttaacatatcttaaacatctaaataaaaattgatttctttaaccattgaaaaattaagacatttgaaactaaaataaaaaataaaaaaaataaaattacagccctatataactaaaattgcatttgtaaatttaattgatttgacatataagtgcactgtaatttttgataaaaataatgtgtaagtaaatatgtacttattattttctttaaaatataaaattatattttaaaattacagtcctatataactaaaattacatttgtaaatttagttgatttgacatgtaagtgtactgtaattttgataaaaataatgtgtaagttaatatgtatttgttatttttcttttgtagtccgttggatataaataaagggtaaaaaaaattgggtgattttttttattagaaatcacccgacaaatagatacatgctggtaaaagaaatactttgaattccacgtataattgcagaccatctgttatatggtctctgtataacctgcatacgtagcaaatggtgggccgtgcaactggcttcgtgggctgtgtcttgggccatgatcgttgctgccacaaaccgatccaattaattttacaaaatggctttgttagttttactcggaaatcctgatccgactacgaagcgtttgaaaatggggaatcggatgaacctgatgaatgatgaaggggggcgacggacgaaatcagtggcaaaaacatcttaaatttttataatactaaaaaaaataccggtgcgttgcaacgggtaaatacattttttatgatacaacaacaactattaagagctaagtcattggaatcactatacactataattaaaaaattaatgaatttttttcttggttttaaaccgaaagcacaatattttttctttgttagtcctaacccagtccactaaaacctttgttagtcctaatccagtccgctacctccctccattcgccccgcctttcttcggtcgtcaagctccaaaaggtaatcccgggcttgtacaatgccaaattcagttgaattattctcgatctcccaaaattaaattggttgaggattttttgatccaccaaatctccttttttccttgtttttccccaaaatcgaagcgaatcaaagcttgttgacctgccatgatcaacgacttttaaatagggattaaattcagtaaattaaagtccaggatatggaaaatgatgatggaggaatgtgaaatcgatttttgcaatcagttagagtagaaaacatacgggaggtagatcgaacgtggcagtggcgctagggttcggcccagaccagacgagatcgaaaaaagacaaaaaaaaaccggacttactgcgtgcgaagaaaaaaaaccatttcgcgtgcaaaaaaagcaaaaaaaataaaccgctcagaccaaggaaagcggaagcttggcggctcaggcggggcacgctaagcgcgtgcggatcggatcagagatcaggaaaaagacaaaaaaaaaaaagaaaaagaaaaaaaagggacttcccgcatacgcggagaaaaaaccttttcgcgtgaaaataaagggtgacaaaaaaataaactgcactgaccaagaaaaccgcacgattggcggctgaggcggggcgtgctatgcgcatgcaaataagagcagagaacggaaaaaaaagacaaaaaaaaaaggacttaccctgcgcgggaaaaatcccgttccgcgtgaagaaaaaacggcgacaaaaataataaccggacgaaccaaactaaaaccggatactctttttttttattcgatcatcataggcaaaaaccgaggtaggtaaagtagacttattccttccccttaagttgacagcccatattatcagtttggccagctttctacagcccaattagatttgcacacataaaggaatttttttttatttttaattttttttattaaaagttttacaaaaataattttccattttgaaaattgacggaagtagtcgcctaccgccctctgggagggcgatttttaaaaatcgccatcccagagggcggcgaaaatgacgtggcagacggccgttcgctctcgggcgacggccgtcaacgaaatttgcaagcggcccccttgccgccctctgctagggcgattttgtactgtgcggggggccgcctgcaaatgggcggcgagggggcatggaattttgcaggcggcccccttgccgccctgggggagggcgattttttcctccccctataaagcccagtcccccctctctgaaatttcattatattcactaaaaatccaaaaaaaaacgaaagagagagaggggagggcagcagaaggggagcggcgaagccctgctggttcgctcacttcatcacatgtttgctcccatacatcttttgcatttgtactaatatgttatgtttgagtatatatgttgcgtttttgttttagttccatatattttagcatatctgtagcacacagcacatatgtgtagatccagagcatagaatataatagtatgaattgagacatagacaatagtgttaattgtaagatatagtttagtttgatctagagaatgtaacctacttttagaattttggagaacaatattgtagagaatgtaacttagggcgtagtacagaaatgcgaggttaacgcagttattgttttcatcaggcacaatgtcaaataaggtcacatttcagatagttcacggtgaaggaaatattagatttggtccagatggtgttgatctgtcagattttgtaatgacatctaagggcatcgataggcctgcggagagaacattacagtcaatttatagttggttgttgagaggatttagaatagaccaagaagtctacacaatgtcagtatcagttgtagtgagtcgtgcaacagaaggttatttttgggaactaatgccgatggacatcactgctgcttggagacggtatgtggaaatggcttttgaacggtcatggcccctcgttatatttgtgtcggtacaagagaaagatataaatgtttcaatgcaaaccgaagatgtagagggtcctatcaatgcaggggatgttgttggaccatcaatgcaaaatgagaaaaatcaaccaagggaggagcaggccatgggcatggcggatgagggggagagagtcggtataattgttgatgaaatggagagggaagattcggataatgaggaagcagacgacgacgcatcatccgatgaggaaggtgatgtaatggccactgattgggcaaatgaggacttctctggacttgttatatcagagggtgatcatgtaccctgggagtataaggagaacgaggtaattgacggtgcaaggtatgctcataaggatgagatgaaggaggcagtgaagcattgggcagtttccttgcagagagagtttagggtggtcaagtcaacaaattatgtgtatgaagtgaggtgcatgaaggaagattgtccgtggcgtgtccatgcatataagggtaaatgtaatgattattggaaagttagcattgtgaccgagcacaagtgctacttacaaggggtggagaagtatcatcgaaacatcacttcagcttttgtggcaagtgagatgtacagcagcgttgttggtaacattggctttgaaccaaaatcaattattaggcacatcgagaacaaattcaagtacaccataagctatgcaaaggcctggagagccaaacaaaagattattgagatgaggtatggcacatttgaagcttcttatgataatttgcctcgtttgttagccaccattgcccagaggaataataatacttactatgacctacatacatttacatcggttgatgatcgaacaaagagtgtgctgcaaagagcctttttctcattggatgcttgcatcaatgcttttgtgcattgtcgacctgttctatgcatagatggaacttttatgacaggtaaataccgaggtcagatattgacagcaattgggtgtgatgggaacaaccaggttctacctatggcttttgcatttgtagagagtgagaacactgaaagctggtactggttcctagagagagtgcacattacagtggtgcgtatgaggcccaacgtttgccttatacatgatcgtcatgcgggtatgttgcgggctattgactacctgcagaacggttgggatgagaagggacttccagctaagtggcctgatgttcggagtcggtggtgcatgcgtcacatgggtgcaaatttctacaagcaattcaagaacaagcatcttatggagctctttaagaggctctgtgcagagaaccaagagaagaaatttaatgagttgtgggacaagttggatgagttgacaacgaagcaaacagatgagcaatctcgcagaccacaagttgaaggtgacgagcctcccatacctcttggtgcattacatgatgacccaccaacaatgagaaggaggtcagggtcgtccatcaaaaatttcactcagtggattgagaatgagcctaaggagaagtggtctctattgttcgacaccgatggatctcggtatggcataatgacaaccaatttggcagaggtgtacaactgggtaatgcgaggagttcgggtacttccattggttgctattgttgaattcatccttcacggcacgcaagcgtactttagggatcgatacaagaaaattggtccgtccatggccgataacaacatagtgtttggcaacatagtgacaaagtacatggaagataaaatcaaaaaggcacggagacatagagttgttgctcaaggcacacaagtgcatcggtatgaaataatgtgtgttgataggagcaggcgtggtatctatcgcaagcaagccgtgcaggaatgtgtcttgaaggcggatggtggatgtacatgcagttgtatgaagccgaagcttcatcacctttcttgctcacacgttcttgctgctgccggtgattgtggcatatctcccaatgtgtacgtctcaaattatttcaggaaagaagcaatctttcatacatggagtgaggagatatatgggttcgggatctcaggatcttacacaacgctgagtgcccaagttttttacattccagatccatctaagttaagggtgaaaaagggtcgacgccaaactagacgcatcagaaatgatatggatgagtcagaagcaggtgggaggactttacgctgcagcaagtgtgatctgcgtggccatacttacaagaaatgcccgaagaatgcagaagttccaagcggcgcagatgctagtccatctggacaggcaagtgatggtaggcgaccacctggtgaaggaacaacaagcaggcgcgcaaggccaaggcgtcgtcgcgcagcaggcgattccatggtgtaacaatgctatcgatttaggaaataaaatgctgttgtgatgtgatgagtgttcggactaaatacttctatcgtgtaatttcaattgaatgttgttgtaatgagtacctccgactattgttgtactagtagtattgcgaactattcggtgttgtatcataatgttaccgtgatgagtgttcggactaagtactcatatcgtgtaactgcagttattgttgtaatcagaaatattccgtatggtgacacttttgtttgtttgtactcttgtttaatatgtgttagtaattcgcttatgaacatttattagttatgttgaactaattatttatatgtttctgatcaatctatttgatgcaggcatgacgtacgacacaccggcgctgttgaaccgtgggattgacaggaaccaccgctcgttcctgtcagcagtcgagggtgcacagctcggcaccttccgtccacgcacgtcgcgcgagtggttgcgtgtcgacccccgtcacgttccttggtacgcgtatgttcacatttcaactcaactttgctttgtgttgtacttatgtttgaagtttgctctatacaggttgcgtgcggcaggccttctaccactttgtaggcttgttgaggcggcggcggacgaccgtgacccagcgaagcggtgggatgcagaccggtcactccttgccgctctggtagaccgctggagacctgagacgcacatgttccaccttccctgtggggagatggctccgacactgcaggacgtgtcgtacctgctcgggctaccgctggcgggagcaccagttggtcccgtggacggtgtttttgggtggaaggaggatatcactgcgcgcttcgagcaggtgatgcgccttccacacctaggaccggccaacacccttcctccgtactctacagtcgggcctagcaaggcttggttgctccagttcactgtaagtaaataagttgttattatcatacatgcttatttgcgatcaacagagtgttttgtactaacatttcattcttaattgtaggcggaccttctgcaccctgacgctgatgataactcggtccgacgctcccttgaggcgtacctgttgtggttgttcgggtgggtgatgttcactagcacccacgggcacgctgtggacttccggctggtccactacgcacggtccatcgcggatgctcagccacaggacgtgccgcagtggagctggggttctgccgtgctagcagccacgtaccgtgccctctgtgaggcgtgcacgaagactgacgcgggagcgatcatcgctggctgccctatgttgcttcagctttgggcagccgagaggtttgccataggtcgaccagtggtggacagcgcaccctacggggttggtcgcagcgcgcagtggccagaggacggtcccacgatggggacttactggtgtcgacgtggggttagtgcaacttcgctgcgttataagtttatcagtcgtcttcttttttttcttcacataacatgtctaattccgatcatgtttattgcagcgtcgttacgctcacgtccaggtgagacgaggttacccggacttcgtgttcgagtttgaccgtctccagccgagcgacgtcatctgggagccgtacacagaagaggccgtcgctgcgagagcaccgctaggactttcgtcgttgtgcacacgcgaccaggcttactggctcaccatcctgccgatggtgttcgacattttcgttgagcctcactgcccgcagcgtgtgatgagacagttcggacttaggcaggtgtttccgggcaacgtgcagccgaccgtcctccctgccgaccactcgtgagttcggattgttcatttctaaatttttatgataattacttcatcgagccatataatttacctctcttcacaggttgactcgacggggacagctagcaggcgcactttgggctccacgtgtacagcagtacgttgacgactgggtgttagctacagaggaggtgatcaacgagctcttcccacacacggaggagaactactgtgactaccttcgctggtaccttcctcgcactcgtgcgcgtgtgaccttcactccagacgccccagagccgcacgttgccgctgtgacggacgcgtatcccacgcaccgtgactgagactacttcgtgggggtacgtcgaatttgtattagttcttacaattatttcatttatcttgcataatataggacaactactgaattttttatttccatcttgcataggctgatgccgcacgggatatcagtgccgatatcaccgcagtccaagtgaggttgaacagaggtttgcacttgactgacgttgagcagagggtgaccttcgaccggatgcaggagaagatgcgtgcggtcatgcgcgtcttctcctgtcgcagcgccgtggacgtcgtacctccagctggtccggtacaaccacggcctcgcgcgcctaccgtcggagcaggacctcgacctacggtacctgtttcgcacggtactgctcagcccagaggtttcttaagttttgtttctgtttttgtacgaaaacatcaccccgtcgtaacttgatgttccatcctcgcaggacctcgtttgccttcgagcgcccctagcttcggagcagtgcgacctacagcaccggtttcgcacggtacagttcagcccagagattagttcatttttgtttcagcttttgcacgaatatgtcaccatgttttaacggcacgtttcctcatcgcaggacctcgtctgccttcgagcgcgttcgcaggcacgaccggcgcttccgcgagctccgcaggggcgttcgccacctcttcgggcgcgttcgccagctcttcctctcacggagcgtcgatccctcgcccacacggtacttaatttttattaatactattaaatacctgtatgaaactgatggtccttgtccagcaggatttgcagccgggatcttcggtactggggcctcttcgtctcacgccggtaggactggtcctactagccagttctacgacgacgacttgcacggtgcacaccaccacgacgtactaggctcctctcagcttggaggagctccagaggcgcacactcaggagcagccagaggtcacacctgtacaggcaggacgggttggccgtgccgtacccccagaccgactcacgtactcccaggggcacattagggcgcagggtaggagggacaggggtaagaggcctcgtcagtagtgttctacctcttcagttcttatgtgaccgtttcttttggcttacaaacttgtaaagcagtactacttttgctattactactgcagtactacttgtgtttgtctcgtctacatagttcttttcattcatatggtgctagaacaacttatgctcacgacaacacactttcggcgcttcacggtagtgtcagatccagtagcgcgcacagtccacaacagcacacatgaaaagcagcagctcgagttgtcactatcaactttcggcgctgcctgttgacataaagtgaatcacgcccacgcgtgatcgtcttgtcacatctaatgaataatgtatctcattgagttcacatatattgcagtgaaaatgacgctatataattgacaatctgaaggcaacctcttcatatcttctttcccactagcacacaacacacgaaaatggaagcgccattccttgagcgtctcaactggcgaagcgatccttttgctggttggtttccaccatggtgtgaccgtcctttgtgcgattgtggggatggatgcatactcaagtcttccctcatgatacaaactcggggcaggagattcttccaatgcgcgaactttgatcaggtatgcttcatctattcgaagttcaaatggataaaaaaactaacttcttcgtacacaattgtaacatcttacgcagacatatcgtccaatgtgcaacttcatcgagtgggtagacatggagaacccacaaaacgacggaacccgtgcttacccacgtagtgaaacaagatcggactacctaaggcggaaggatgagcatgaacgtcgaattgctgctgaggctttagaatggcacgtaaatcccctaggactccccacgtggcgtgagcgtccggagtgtcgttgtggtgaccgctgtcaggtcataaggtccgtaaggcaccgaactcgaggacaaaggtgtttcgtgtgtccaaacattgtcgacgatgatttcgtggtaattacaactattcttttcatcactcctcagtactatcattaactcaactatcccaaaatggatgtacataggaggatgtaaggaaatgtcaattcgtacaatggattgacacagtcagagttacttcaagtggcgggccgataacgcaacctgaaccgaccatacagttcattcatgcttggatggagtacgaacgtcgggtggaaattgcaagcttagactggaggaacaatccattagggttacctaaatggtccgagcgtccaaagtgtgggtgcagagatcgctggcaggtggctacatcctttgctgaacaaacatttcgaaggagatattttgtctgccctaatgtagacaacgatttcgttgtatgtctaaccatttacaaaatccgctatgatttgcacaaaattactacccaaactgaataacattactatttttacagggcaatccaaggatgggtggatttactcgatggatcgacaatgtcactccatcatatcatggccagaagataacagagtcagaaacacaagtagagtatcaacgattgaaggaccacgagaatgcaatgcattctgaccgacctagaaggggccgataggttaccgcatgcttgattcgtcgggatcgacaaatttgttccgtgtatcgatggcacttcttatctatcttatcattacaatgtttaattatggtggtgattttttgtatgcgtaagactaagggcctatttggattgctaccaaaaacatgccctaccaatattttggtaatttgaatagtacttgtgtttgatttcgattgaagcctattcattggtaatacgtaatctagatttgagattatgtagaacattcttcactacaattttacattttggcagcaaaccaaatatgatcaaatgcaattttaccttaccaaatatttggcagtgccaaaacttgcttatattttggcactaacaaaatatttgtacggtaacattccaaataggccctaaaaaataataaaattgtattttaccagtcttggagattttaatcttgtatagttttcaatataaaaagatttgataactattgatatttatacaaaaatataaagcacagtataaaatcgccctcccccagggcggcaagggggccgcctgcaaaattccaggccccccgccgcccatttgcaggcggccccccgcacagtacaaaatcgccctagcggagggcggcaagggggccgcctgcaaatttcgttgacggccgtcgcccgagagcgaacggccgtctgccacgtcactttcgccgccctctgggatggcgatttttaaaaatcgccctcccagagggcggtaggcgaccacttctgtcaattttcaaaatggaaaattatttttgtaaaacttttaataaaaaaaattaaaaataaaaaaaaatccacataaagcaagaaaagaatcctcgtcttcacatagctcgattcaattttcatattcagtccgagcgagcgaacggcggctgagtcgaaaccgttacgacaatggaaatcggacgaggattctttatatatatatatatatatatatgaaaatgcttctatacacccaggtgtacatactcctagtttcatccaccatccgttcgcaactagcagagatcgagtctgctagcggatccacataccgcgacccattttgatttttgcgaggaaaaaaatcatcgtaatatttttatcccgcacatatcgggagcatactgaatgctcacataaatatctcgttctcacgtagtgctaaaccgaacagaaaatcaacagaccgatccgatataagggcaatttggaggtgacggcgaggcgatacatcggcaagggtggctggcttgggccacggcggcgagtagcagacaacgacggcgatgcgcgcgatccaccggcaaggccgcaaggatggctcaggccacggcggcgagtagcggacaacgacacagcagaaatccatcatcgtcaagcccatgcagctcgtccgcctgccggagtgccggcggcgtgattccatcgacatgatcggcttttgcaccaccattatttggatattcccaggtgattgattctggtatgtccatcccgttttctctcgttttgtatttcttgcagattgatcaaggattctctctttctttttcttgcagatcgatcgaggtataagccagcatgaaggtcgccagctgcctcgtgatccatcggcgactcgatcgtcatcaatggcggcgatttgatcgtgatcgatggccacggccatgttgcgtcgacaatgcaggcgcgcagcccatcggcaaagccggaggcgacgaccaatctattggctcactgaaatcatacgggaacggaaaaaagcggcgctggagacatcagacagcacagcaccaagccaccaaccgaagatcatggcatccaacgaatgtatacatcagattatagtaatcacagtatatatgtgcacatcagctcatgtatcgatctggttgcctgcatatacatctctcttcttaattatactccattgaatctcttcctgattatatactactacaagatcaactaatttcatattatttgtcagtattacatactactgtgaaaagcgcatatatatgcaacagttaggaattaataaacccaacgagtatagtcgagtatggctagttttggaaatacatgccgcttttctgaatctttgaaaaaagcatgtattttatactactgatacttttgcatcatcaaatcatgaatgcagccagtagcccagtagtctgtactgctacagtgtaaaatcaaaatgttagactttgcactaggatcacctaggttagatctagtcgggtggttctatttgggtttgatgaacgacattgtcgatgaaagggagagggtttagataccgaccggttgaggagttcgaggaggaagaggcgccggacatcgtcgttgtcgtcgcggcttgacgtagatgcggcgccggtgaggtcgacggcgatgacggctgcggcagtggtggtcgtagacgtcccggcgatgaggcgtggcgcggcggtggcgtttcccgtcactggctgccccccctctcgatcggattagggttttgtggggtggagttggcggcggcggtgaacttcgtacccagtgccgtgccggcctccacccctcttttatatggcgcagtgtgacaggggcccaccagccattgggctgggcgcccccgatcagggcgcggtcaaggcccccttgagccgttgggctcaaggggagggagatctatctaacattctcccccttgatctcactttttcttttagctttttctattccatcacagatttgtaaatagagcatgtttcatcgtcacggtcaatcaccgatggattcgacagccactatacacaactctattcagaaacagatactttacttttgggccctgtagtccaggattcataaggcttcccttaaacccatgccggctacatgttccttgaacacgttgggtggtaggcctttcgtgagcgcatccgcgagcatcctttctgttttaatgtgctcgagactgattgtttgatcccggactttgtccttcacaacatagtactttatgtcaatgtgtttggcagcaccacttgactgattgttgtgagcgtacattactgcgggttcgttgtcgcagtataactttagtggtttctcaatactgtcaaccacctttaaaccgggtatgaacttctttagccagttcacctgccccgttgcctcatagcatgctataaactcggcatacatagtagaccctgcagtgatagtctgttttgagcttttccatgaaatagctcctcctgccagggtaaacacgtatcccgatgttgactttgtattatcttttgcaaagtcagaatctgagtaccccactatctggagtgattctgatcttctgtaagatagcatgaggccttttgttccctgcaaataacgcaagactttctttaccaatttccagtgctctaggcctggattactctgaaatctgccaagtaacccggtaacgaatgccaagtcaggtcgtgtgcagacttgcgcgtactgtaggcttcctacagctgacgcatatggctttgttttcatttcattgagctcatactgatttctgggacattgcgatgccccatacttttcgcctttcattataggagcaggtgtagcactgcatctgtacatgttgaatttcttcaacaccttttctatatatgtcttttgagaaagtcccaatgcatactttgttctatctcggtgaatctctatgcccaaaacatatgaagcctcaccgaggtctttcatgtcaaagtttgaggacaagaatttctttgtttcctgcagtagactgacatcactactagccagtagaatgtcatccacatacagaattaggaaaataaatctcccattcttaaactttgaataaatacagttgtcctcgacattctctttaaacccaaatttctttattgtcccatcaaacttcaagtaccactgtctcgaagcttgctttaatccataaatggatctctttagacgacatcccatattttcgtttcctttcatgacaaaacctttcggttgcgccatgtatactttttcctccaaatctccatttagaaatgccgtttttacatccatctgatgtaattccaaatcataatgtgccactagtgccattataatcctgaaggaatctttacaagagactggagaaaatgtctcattgtaatcaatcccttctcgttgcgtgaagccttttgccacaagtcgcgctttaaacttttctatattccctctggagtcatatttggttttgtagacccatttacagcctactgttttggctcctttaggaatttcttctaaatcccaaacatcgtttagtttcattgatttcatttcatctttcatggcttccaaccattcagatgagcgagcgcttctcatggcctcttcatatgaggtgggatcatcctccatatgcgactcttctatattataaactttatagtcatcacggatagccgatcttctgactctttcagaccttctaggggcctgcacatttggcacatcctgtacctgaggctcttgatgagtctcctgtactggcacattatctatttgaggctgttgcagctcctcctctggtgtggcaaccatttctgttgaatcctgtataacaggttcttcactctcattcattggtacctcaatgacaggcattgcaggcacaacatcagcaggtagagagaagaaaggttcctgagtcgacggagcgggtacagacacccgcctctcctcaagatcaatttctcgaactaccgagctccccctaatcatttcgtcttccaagaagacggcgtgtctcgtttctacaaactttgtataactgtttggacagtagaaacgatagccttttgatctttcaggatagccaataaaatggcagctgactgttttggggtccaacttcccaatatttgggttaaatactttggcctctgcaggactcccccacacacggaggtgagttagcgagggtactctccctgtccatagctcatacggtgttttgggcaccgatttgcttggaactctgttgagaatatgaatggcggtttttaacgcctccatccataaaccgagtggtagtgtggagtagctcatcatgctgcgcaccatatccataagcgtacggttgcgcctttcagctaccccattctgttgaggttcgcccggtgttgaatactgggctactattccattctctagcaagaaccttgcaaaaggtccagggacttgcccataaggcgtatgtcgaccatagtactctcccccacggtcagatcttactactttaatctttatatcaagctgattttcaacttcagctttgaatatcttaaatttatccattgcttctgatcgctctttaattggataaatataaccatagcgggagtaatcatctgtgaatgttatgaacgagtcatagccatccacgctttttacaggaaatggaccacaaatatctgtatgaatgatctctaaaattcctgcgcttcgttttgcaccctttttgatgctctttacaaattttcctttaatgcattctatgcattgttctaagtctgagaactccaatggaggaagaatttcattcttaactagtctctcaattctccccctcgaaatatggcccaaacgatagtgccataatttcgatgagacatcgggagttcgctttcttttcttgttttcttttgtcaatgaggacacaacattcacattctcagaaagagataacaaataaagctcgtctcgcaacacggcaagaccaatacatgcattattatgccatagttcacatttgccacttccaaagcggcaatcatatccatcaaaatccaactttgatacacttattaagtttctttgcaaagaaggaacataaaagacatctcgaagtaaaagtatgaagccattcgcgagctctagaggaagatctccaacagcttcaactttttcaactccattggcaactctaatggtgctttctcttctttgcgtagtcctcgtcgaacggaatgcctttaaacaattacaagcatgaatagttgctccagaatcaatccaccatgtggatctagagtaaccaacataatgagattcatttacaaatgtaataatgttctcacctttctttgccatgatcattttcaaaaagtcaggacaatctttcttgtagtgtcctgtcttcttgcagtggagacattgatctttctcaacagcgaactgttgttgctgaggcagatgctgagactgtttaccttttgaggtgggagacttgtggttctttttcttatctttaacatagtttattgaaccaccatttgattctttgattctctcctcctcttgcacacaattagcaatgagcttctcaaagttccatttctctggacttatgttgtagttgacaataaaattgtcaaactgctttggcaatgaggccataaccagatggaccagaaagtcatctgttatgcccaaatccattggcttcaacttggaagccatgttgctcattctaagtatgtggtctctaacaccacctccatggtacctttctgtcacaagctgcttgatcagctgtgtagcataagtctttgaagagtcagtaaactgactctttattctttcaaggtactctgagacagcgtcacactctgggatcgagcccaatatggtaggctcaatcgtattctttaccacagccaaacatttcttgttggctaagaaccatttcttttgttcaatgtcatacgacatgacgagaggagcattgtccctctgtctcttttgccagtcagcatctgactcattttcacctctgacaagttcagcaggttctataggacatggggtagtcaatacccagtccacctctcccaagataaaagcaaggtcgagttttcttttccattctgcgtagttatctccttttagggtcggaatatctttaatgcaacccatcaaggagtagccacctgaaataatcatgtgcggtgagaacaaaattaacatcaaaatattatgcattaagcctacatcaccgttgggcagaattagacataacacatataaccataactataatattgcaattaacaacgttggtcagaaaattacaacatcatagcacataattaatgttcctaaaattaaattctcccgttggttcgaaatttaattttagaaacactaattttcatcaattacatctatttgcagcggaaaactataaaaatcatatgaacagtagcaaaatctctgtaattctctctctgtgaaaattctcccgttggttcaaatttaaacagaggtaaaacatgcaaaaaactattcaaaattctattgaaatttgcatgaaaattgacaaaataaaatggaaaatttctactgttctcttttattcattttcggcccccgagggacctaatttgaacttttgccggcggcccacggcccttttggcacgggcgggcgccccctttccccaagccgcaacctgggcctgggccaggaaaaccgccccccgcgcgcgccttcttgggccgatttcggcccggccggcgtcgaccgtccgatcagctagggtttcgatcggacggccgggcgccgagatcggaggatcaaaacccccctctcccggccggccgccgaaaaaccctagattctcttctcttctctctctcacgcgaccgcgtggacggcgtcgccatcgccggcgaccttcgcgcccgccgcgccatggccagcgccttttctcttcttctccgctccccccaccgtctctaacccccaccgtgtgagagagagatggcgacgacggagatggcggcgccgccgcgggccccctcgccggtacgcgcgtgcaggtgcgcgcgcggccgtcgagtggctcctaggcggcgcctctttgcccctccccccctccgttgccggcgtcggcgacggccggcgacgaggtaagattagggttagggttttcggctcttttgatccgtgcggatcttgtgcttttctttctttggatttcttttcccgaaccgatctaagccctagggttgctctgataccattgttagactttgcactaggatcacctaggttagatctagtcgggtggttctatttgggtttgatgaacgacattgtcgatgaaagggagagggtttagataccgaccggttgaggagttcgaggaggaagaggcgccggacatcgtcgttgtcgtcgcggcttgacgtagatgcggcgccggtgaggtcgacggcgatgacggctgcggcagtggtggtcgtagacgtcccggcgatgaggcgtggcgcggcggtggcgtttcccgtcactggctgcccccctctcgatcggattagggttttgtggggtggagttggcggcggcggtgaacttcgtacccagtgccgtgccggcctccacccctcttttatatggcgcagtgtgacgggggcccaccagccattgggctgggcgcccccgatcagggcgcggtcaaggcccccttgagccgttgggctcaaggggagggagatctatctaacacaaaatagataacaaagtatataccgctagtaacttaaaaaatatgttaaaaaaggcatataccgatactaactataaaaaacagtatataccgatactaacttaaaaaaaaaagataccgacactagcttaaaaagtagcatatactactactaactgaaaatgtagtatatacatgatcagtatatactactatactactaacaaaaaaaaacagtacatactactactaacaaaaaaaggtatattctccttcaatgagtatacttaaaaaatgagatatatacatctctgatgattattgtagtatatatagtacttattaactaaaaaatagcagataatacttatattaactaaaaaaggtatatacttccaaacaaaaaaaatagtatatatcaaacaaaaaaagtatatactgaccaaattaaaaaatagtatgtgcagtatatatcaaaaacttagtatgtctactgaccaaacaaaaaaacagtatatactcattcagtacggacgtaatatatgctggaaagaaaattaaaaatttgaaagcaaatgcataccaacgttatcgtttgagtgagcaccaaatccggtgtcagctgtgcacatgcatacggtggtttcaaattaataatttcactttaatttggatgctaatggatcatccattaataagggggagtacatacatctaggtgtacagaagagtcgtcatgtatatatatatatatgtgtgtatatatatatatatgtgtatatatatgtgtgtatatatatatgtacatgtatatatgtacatgtgtatatatatatatatatatgtatatgtatatgtacatgtgtatatatatatacatgtgtgtgtatatatatatacatgtgtgtgtgtgtgtgtatatatatatatatatatatatatatatatatatatatatatatatatatatatatatatatatataatgcccgtgtgttgcaccgggtaatatcacggtggataaagttcaactaaacgatttacgtagtctagtacataattttgtttggacaatattaactcgatctacgagtaggatattcaattctcgcattgcaagcatgtgtcttactttcaaaatcatatatggactccgcgtagagatttactcaaagtctcttggtggccacgcgtgctttctcactatgtcaaaactcgcgttgcaatcatgtgctctcgttttcaaaatcatgtgtaatttttaatccttatgtcaaatctttaattttttacaatcggttttttatgtcaaacaaatattaattgtgggaatatattgatttttctatatattgtatttgcgagagttgatggcacatgtgtatcataaaaatcgatgtctttttgaggtattatgttttatttctaaatttcatttatgtcaaatatcaataaatataccggggcataaatggaaaccgaacagacatggaggaaaaatagaaaaattaaattgaaagctgaaccgactggaggtgggaaaaaaaaagaaagcagaagtttctcgtttcttcagggctgtttggcacagctccagctccacccctcctggagctggagctcagccaaacagttttagctccaccaaaactgggagtggagttgggtggagctctctcacaaaatgaactagagttgtggagctgggtttaggtagctctacaactccactccagacccaactcctagagctaaatttagaaattggagctctctctctcctcagcctatctttctcccccagtcccccgtgcttatcctttttacttcacactttctccatccttagcagctcccctcctcccacatactctagggccatgtttggcaaatgggacagagaaatgatttcccactcaccataagacatctttaaatcctaaccattcattctcccccttccatttaatcctaatcattcattcatttcccaatcccaatcccaccccttatttcctattatccaaacacaccctaggccctagctgctgatgctggacatggaagtgaaggggtcagaggaggatctggaccccctctccggcgacctccctccccaagcggcagtgtccggatcgcgagccatcggcggagggccccatcgtctctctgccccccgctcgcacggatctaccgccggcgacgacgggaggggcggagcctccaagctgccgttgctgctcgcgtggatccgccgtcgacggggatgggagtggcggatccgacgaattcttcccctcccgcatggatcctgtcgtctcttcggccccctctcgtgcggatcaactgtcgacggcgatgggaggggcggatccggcgacctcttcccctcccgcacatatccccgtcttctctccacccgtctctcgcgcggatccgtaggcggcggcgacgggaggggtggttccggcgacctcttcccctctcgcacggatcccatcgtctcttcgcgccggcgacgacaggaggggcggaagcggcagcctccccactgctgtcagttccggccactgccgcacaggtactttattttctctaagacaatatatcatgttttttatgtgaaatcttgggttcattttgcataggagcaatcctgcagggggttgataatgtgccgatgcttcagctacatatagtttggtgctattttgtgcttcgtgatgtatcacgctgtattttttgtacgcgctgcttaggtggtgtttgatccagggacttaactttagtccctgtctttagacactaatttagagtattaaatatagactacttacaaaactaattacataaataaaagctaattcacgagacaatttttttaagcctaattaatctataattagagaatgtttactgtagcatcacatagtctaatcatggattagttaggctcaatagattcgtctcgcgaattagtccaagattatggatgagttttattaatagtctacgtttaatatttataattaatattcaaacatccgatgtgatagggacttaaaagttttagtcccatctgaacagggccttactctcactaccctataggaaaattggatatggaactgcaagtgaggctttggcctgcaagctgcagtttatttttgtccgcagagattattttaatgaagagccattcttgcggattttacttgaggttgaatcatttctaatcaaattatgctaggaataacctatgtgcagctgtgcgtaaagtgtcgccatgtcccattctatttcagcactaccagagcagtattgaaatgaccagaagggagttccttaatgggtactggaaactttatctactccgtgctctcacacttgaaccatgctatgatggtccaacaaatggtggtgaggtaatttttcaactgatttcccaggttattgcataagttcatccgaacgggccaaagttcacaatatttatgtggttaatgcaataacattttattaaatgaaaaggatagatgaagtcactgacgcatggcttattagtcttattataattagcgtatgtttgtgcttatctggctggagtggtaaaagataggtcattcaaagataggaattgcaaaatggaccgaagtgctctctctgtgtttttttttcttataccatctcaaataccctatttagagattcagtggtggtagcatgaaaaacatagattttccaagtatagatgatcgtagtacgctttggagttcttgaaccttctgtgcatgttttatctgacaatatcagtacttttatgtgattctattggccatattacttcaaaacttgatgttggctgtgatttgagaatgttgctaaacgtgcatttcctcagttgtatgttagttttaatttcttttctaattttgtcatgaagatatgagctcggtaggcacttcaatgtcttttcatgattaatgttctgcattcatgtgaatgtctgaatcgaaggacctgtctagaacatccatgttgctatgtgccactgaacaactgaaaaatatgcctggttctaactggctatctgttctgcatcgacaggaaaaagaattagatacatattggtagatgcgtcgacacaactgcattgcccttcacaggtgaaacgaatctagacaatcttaccactatatgttaattaattagatggtactgttagttcattcataagctgccttagaagtatttacaattgaaattctattaggatatttttattattaatggaagtgcttctgttagtaattgttcaaggaccttggggtagttatattcaatattaatcccataaatctgatgaaattgaaattgcatccagggaagagcctgggatccacattgattggaggtggctaaatgccctagaggaagagccttacgatctatattttcttttgtgcttctattatttctattgcctgtgattgtatttgtgtattttggcctgcgacagaaatatgtaaaaacacgttagtgggcgtgctagctaaaaatagcggaaagaaaagtgggatagaatctaactcggatagagtcgagatagaatctgacttctgccgtgggctggctaaactggagtaggaaacggtgtgagcggcgaaccaacctgactcctgcgattttttttttgtatgtgatcttttttttttggcgtgaacctggactcatgccttttttttctttgtgtatatgtgatatttatttttgggtgaaggcttgtagattgaaactacctagaattctggaagcagtctgggcttgtgggcttgtggatgtctggaaggtttgtgggcttgtagattgacctgtaatcctttttgttggatgaaactggagcatgggcttgtcaatggacctagaattctggaagcggtttgggcttgtggacatgtggatgtatctgatcggataaaaaaaaattaccgcgatgacggacgaaaacgcggaccgaaaagaagctgacgactggaaaaatccgaatatatatatatatatatatatatatataacgactcttctgtactcccaggtgtacatactccctcttccatattggatcatctaataggatccaattaggacctgcttagccggtgggaaattttttttgaaattcctatttttcagccgaacagggaataagccaagtaaaaaaaattaacttgaaaaatttccatgcatgtcggcttgggattggttgcacgcctgcatctacgaatttgaaatgtagtatttgtgcaccttgctgtagcatggaaattcgtgacttatatactgttttattttacattagctatatacttattttttaggaacccatatatactatatctctgtttgaaagagtatatactttttatttgaggatccagtatatactaaaagctggtttgagaagtatatactacttaatttaagactattcgtatataccgttatctctagagtctattagtatatgtaaaggtagtaccagtaaatactttttttaagttagtaacagtacatactttttctatttattagtagtagcagtacatactgtcttttatcgtagtgtggtagtatactgttatttggtcagtacatactatttttgttggtttagtagcattatatactgttttcagtttagtagcggtatatactattatttggttagcgttaagtacatactatttttgttagtttagtagcagtatatactgtttttcagtttagtatagcagtatatactgtttcttttagttagtagtaaagtagtaatacatactaagtaacagtacatactttttgtgtatcgagaagtggtattatcaaataaatgggcatatatatgctcaccgattcattctttgtataagcgtacaagattaattcttaagaaaagtgagtagtatattgcccaattctgagtgtcgtgcaacaggtagatctgccggagccccggtgtagaagatgaataatcgcactgaccgcagcggccgcgcacccctttgcgatcgaggcca

SEQ ID NO: 7009 - DNA, 20211 bp, Oryza sativa
aatgtgcataacggacaccacagctatagttgcaaatgcaatgtgggtcatgcagggcgagaggaggagggcgcgtgctccgtggggaccaccagacacgggcggtgcactcctcgagcgttggatcagccgcgagagacgatccgacagccgagatgcgtccggttcaggtatttaagcgcgatgctttcttctccgtgcgcttcgctgcacaaccacttttccgcatctctctcctctctctctctctctctctgtctctctcgcaacgtactcatctcaagagcagtagcggcgaaaggtgcgaggtgagttgtgagattctcctcctcctccatccctaaaccctacgtcctcccaaagcgccgtgagattcttctccctttccttcgatctcgctcttctggtggtgttctccctctcctcctggtggtgtggtttctgcgtgcttgggtgtttgggggcgtcgcggttttttctggttcgatcatgtctttcgctgttgtggcatttgatcgagcagcaaccgcgtcttgacctctctttgaatcttgaggcgtttcgtcatccgaaacttggggcaaggatcacagctgtttgatctttttttccctctcttgtaggcttcccgtaccgtgcttttgttgcttcgatggttttgaagtttgaggtggagtgtggttttctgagttggaggaggaggctgatgagcaccgaagcttcatggtgtattgatcttgctgtgtgtgtctcaaagtctctaccagtgcgtgcgcaaaaaattagaccacgtcaattcgtttctcttgtctgcttgtattttccagtttgttcagttaattttggtgtgttgcgggagttcagtttctgaaaatttattaaccagatgccgccttcggccttcttgttcttttcgctgttcctgatgcaggatgcttcttctctatgtgtctctctgacgtgttctcttggtttagtttctgtttggaaagaactccatgttctctctgacgtgttatcttggtttagtttctgtttggaaagaactccatgttctgttcatacaatgatttctgcatgtgtagcttggttaaactgcttgtttttttttccctttttgatgagaaatcttctgattctttgcatatcaaagaagctttcatctcttgaatcttagatttgggatccttctaagcccaacggttttggttctgcaagattgtacaatttcttcatgtttgttacctatattttacttctcagtgacgctgtcatgttgtattctccttgctgaattctactataagtgcacgctgctgtctctgtttttcttcttctgttcacttcatactctgtttcgaattattgaagttttaatacaccaaagaggtggccatatcgggaggaaatttattgtccttgtacaatacgccttttctgtttgtttcctcttcatttcactttggaatttggtgttatgatttgtgtcagaaaagcttatatggcgttcttacaaaaccttgtatgcattttgttcacagtaatattttattttaattcttccttgcttgattcttgtataagatataagattaatgtgtataattactgcagcattgcaactgaagattgatgatctcatgttatatgtctcaaaaatgcatttaggggccctgataaatagtgtcatatcatgttatgtctagttgactccttttcgtgtttttacgaaagctcttatgtatttaattgatctgtagtgttttgtaattgtattcactttactctttctccatatttgtcaataaagttattgtatatttgtattcatgttataaattttcagcaaaacaaaggtctgctatgggtaacagccttcctgtagaatcaaagttcactgatgaaaaagagaatgacagaattaagtatgttgtgtcgtctatgcaaggatggggtgagaaaatggaagatgctgtgagtaaacttgcagccttttgtatgacaaaaaaaaggatagttctgcaaaaatttcttactgatctgtaagtaattgtgtaaaatactgtgactgacatatgccctctatattctctagcatgcagctattctaaatcttgatgataccatgacgtcattctttggtgtttatgatggccatggaggtttgatcttcattcttttttttttttggtttcaaatcctccatattgtcggcataactgtttacatcatgctttgtttgtctttgtgtgtcatgtgtttatctatgtgcatgtttcgagaactttactgtttatgctgaaacttttacctgtcaattttcaaataaatattaagctacagttctggataatgagccaagtttgctaattagtactaatcacctatgtgcggtgtgctttctaggataacatgaactgcgtaaacagaatattaatttacgagggataaaacactgcatgggtgtgagttaatattaacagtcatgataattaaaaggatagccactgatgaacatgttggttaatttatgtgtggtgctatttttcttatgatacctatgaagtgctgatctgctgtgttcatcacattgttttgctttataagcttctatatgcacataggagtaatcttgagccaccattctgagttgtttattttctatctcaggagctgaagtagcatcatattgtgcaaaacgatttcatattgagctttgcaatcatgaagactacgacagcaatctaagtaatgcgatgaggagtgcgttttacaggttattttcgcctagtctatatcattttgttgcactgaatgatgctgcacttgcaaatttggaatttcattgttcctgtgtaatttctgcagcatggatgaggacctgcaactgtccgatgcttggagggagttagttattcctcgtaataatggatggatgtattttctcaaggctgcagcttgtacaagcatttgcaaggtatcttttaaaccctgaacgtcttttaatatccatatattgaaggtactcaaaactgtatttgttggacagtgcatattgtatctatgaaaaaggaaatggaagaatgtgtgtgatatcgagactattgttctttcttgagatgtactttggagttggaagagatatgtttaaccctaaccttgactaattgctcctattaaaaaaggttcagttagttacatatcaattgtctggtttactgcgttggaggccaacaggttcttaagttcacattgcaccttggttcttatcatactgtggtactaccctaaattgaggtattgtttgcggcatctcttctatggtaatctctttcatacactggtttggctttcagaaatgtttttctttgtctggtggctttggtgagctatttcttgcttgacttgtatttctaactatgttgggattccctattatgtcctccaattcatttcttctttttccaggcaacttatactgagccagcatatgaagggagcacagcatgtgtggttgtcatcagaggtaaccaattgattgttggacatgctggtgattctcgttgtgtactctcaagaaatggtcaggtatagtgactatttccttttcgaatttcttgttggtacctaatttgcatgttctcttattttggtgcctaacatttgtgcttgtttctgttgtgtcaaaaggccagtgcattatccgtcgatcataaaccagacagtgagtctgaaagagagagagttcagaatgcaggaggagtagctgttgggcatagttatcgtaaaataatggggaggtgggtaaccaagaaacaatggggctttactgattttaagggaagagtatcaatctcaagatcaattggtatagtcttgcctggatctgtttttcgtttattgcagataatagcaccgaaaaaaaacatattatgttgtgatttgctgatgtgttttacccacttacatttcaggggactttgcttgcaagaagaacgaacgtttacctcctgaagatcaaatgctgacatgtaatccggacatcctgactgtaagtgccactatgtttgtttagtatttggttgaatatgaagtttgtgctgctttgtggggtctgatggaaaatccccctttctgcgtcagatggacataactgatgacatggagtttcttgtgatagcaactgaaggcctctggtaaattttgaacaaaaaataactgacaataattattatttgatcattttgatgtcactagtactctttgtgatgctgttttctttctcctgctgatgcatatatagtttcatttatagttgcatacctactgtactatgttttttccatgcaggtgcaacatgacaaatcaaaatgtggttgatcacacacatgaccgtcttttggtgagtccttttcttttgctcagtttgtcttcttggcaggacaagagatctcctactgtaatagcaaaaatattttgtgtcaaattctaggaaatgacttcactcaggcaatataaagcatccgattttttaaaaaagaaaaaaacaagtgctaataagtacactgtcatctgctttgtgattgttcgattcttttgttgttaaaactgctgttccttttgccttgatcaatattgctgtgactaatatcttgcatgtttacgtcaaaaaaatatcttgcatgctcgattgtttcgttgttaaaactgttgttccttttgctgtggccaaatattgctgacttgctgtgaccaattaatatcgctatgcaggagggtgcagaagcgcgtgtcatctgtgaggagcttgttcagtttggcttgccatcgggcgacaacacgaccgtcatcctggttctgttcaagcccggcgccttccctgctgttccgccggtcgacaccgacactgacactgacagccacattgacgatgatgtcgaccccaccggcagcaacaatgccaccgcgtccgacaacaacgaccccgccaacgaggttgatcccactgccaatgccgggtctgacgacagcaacaccggcgacgaggtcaaggtcgacgccactgccactgccgtcggcagcagcagtaccactgccgtggctgctgacgagggcactggcaatcctcctcatggcgcactagttgacaccgacgacgaggacgggctgacctactcccaggacatggacttacccccggcgtcgacgtcccccccaaccttcccggacgaggacgacctcccccggtctaacccggacaagtcccccccgcacgtatcaatcttattcagagtttgagtccagatcaggaaaggccagaagctatagctatgattcggaaggagtagttcgtttccacttgatttttgtctagcaagtcgaagatgatgtgtgatgatgcatgcaggatgatacttatcgtaggtggtagtagcactgtgcattgataggagtagtttgtttctgctaccttgatgatgtgtgatgatgcatgcaggatgatacttatcataggtggtagtagcactgtgcattgataggagtagtttgtttctgctacctttggtttgtggtttttgcctgctgctttgcataggagattaagattttgcttgtcagactcagataacttcaattaactgtctacgaaatctcgctcactggtttttgagttgtgaaggtgattgatctagtgatgctttttgttgttgttcattttgaatatctgtacatactgctgggttatgacttgccccgtttctgaatacttagcttttaaccaaattttctcttcattcttctagttatcttgaatatgtaatcagtaatgtgcttggtttagcggggaagtctatttgtccctgaaggacaattccttctgctgcatgccacccaaaaactcatcaaaaagtttgaaaaaaagaaaaggacgagatagatcgaataaataatatcactccacaaatatgcaagcttaaatttgacacatataagtagaattagaactaagtaatttgattgtgaataatacgaaaaacttttttttatgtcaaagacaaaaagctagggcgaattctcattgaatctcggttgttcatgatagtgatgaccatccattcaaatcttcaggtagcacccccaaatcttcaacaaggcggaaagttcgtgtgttaaaattgttgttttttgttttgtatatgttgaatttgaacttacatgtctgttgagtaatatattactcctacatgttaatttatctttaaaatctttaatgaattttcggatgacatacatacataaataaaaccggagacaaatccacctctttggttaagttagctctgttgcctgctgagaccggctctgaatccggcccatggggaccgtatctgaatccggcccatgggctgttaggccgtagcgggccgcactcctctttcatcagttcggcaacagcaacagactcggcatcactcacccacccaacccagtacccaagccccaacctcgcctcgcctcgtctcgagccgacctaaccgcgaacccccaactccgacgagaacgacatggacgccggcggcgaggaggcgaagcaggagcgccacctggtgctggcccacaagctcttcctcctctcccaccccgacctcgacgacctcgccaaggtcgccctccgctccgacgccctcgacgccgtcaagtccgatggcatggcgccgctgttcgagtcgctggccgccgcgggcgtcctggagccggacgacgcgctgctcgccgagatgcgcgcgcggatcgacgaggaggtccgcaagctcgacgagaagtgagtggattcttcctctcttctgattttattttactagcaaatatgcccgtgcgttgcaacgggtgaaaaaacataatgataatatacatttttcatgcataaccatgtcgataacaatcagaaaattagaactacgaaactttattttctagcgcgttttcttttgtgcttttttctgacatttttccctcacgtgtttttttaaaccgtttttattttctcgcgcattttttccttttttaatatactgtagaaacttctctttttatagttagattagattagattagagataaagaagatatataaatggactaaaaaacgacgaatataaatttgacttttttcctccgcgcttttttccgtccttttaattttttttctcgtgcatttcttttacgaagggtttttttcaccactttcacatagtgtcaaacctttctagatataataggattcgattttttttaccgcatcacgtataattcctttttctttagaaacagacaattttttcgcccttttttatcgcgtcaacggagtcggaatcgttttgattttttcccctttttttggatcggacagatttttttttgcccggtttatttcgcccgatcgattttttttaccgcgtcacatataattccttttactttggatttttttcgccctttttttaccgcgtcgacggagtcggattcgttttgattttttttctccctttactttggaattttttcgccctgttttcaccacgtcgacggagtcggattcgttttgatttttcccctttttggctttttttggataggacagatttgtttttttttcgccccgtttttttatcggacttttatcttttttttcgcatggtttttttattttttttaccgcgtcacatataattcctttttctttatcggaaagttttttttcgcctttttttaccgcgtcgatggagtcagattcttttcagctttttccttttcttttatcggacaaattttttttcgcccatttttttttctcctgtttttttcggatcggactatttttttcttttttcgcccggtcgatttttttaccacgatatatataattcctttttctttggaataggacagttttctttttatttttttaaactctttttaccgcgtcgatgtagtcggattcgtttcgatttttttcctttttttgctttcttttttgtcggacagatttgttttttttccacccggtttttttccgcccaggtttttttatcggacttttcttttttttttttgctccacgatacatataattcatttttctttggaataggacagttttctttttatttttttaaactctttttaccgcgtcgatgtagtcggattcgtttcggtattttttccttttttttcctttttttttgtcggacatatttgtttttttttcgcccggttttttttcgccaggtttttttatcggacttttctttttttttttcgctcggtttttttctcccgttttttgacggacgacagaagcacctagagaagtgttttttttcttttctccaatccaatacagatcggatctcttccagggaaatcagattttttttctccagggaatcggactctttttttttcgctttttttattcattaaacggtttgtctctcggactttttttttccctttttaagggatcgggtgtttttttgccagggaatcggacatctttttttttcctgtttttttcgctgtttttatttatttgtgacggacgatggaagcacctcttattttttaagtagtagtagatttttagccccccaaaaattaggccgccccttgctgtgttgcgtatgcgataagttttgcgataactcaggtgttgatatggtccgtttgccttagctaacctagcttactctgtgttgcgagatgtagatgctaaaactggtagatagcttgcatttgattcggtagttgtaatttatgaattatgtttagggccaattaattcacctctatgcaaatctatactacataataataaactttttccacatttttgttttagattcatgtacatattcatgattttgtacattttctctgcaatgtgtaatttagcatgtagagaagtaattgagattgctaaggatcacaatacgcaacttctcgagacaaaataccagtgtaaactaatgtgaaggaagaacggcatgttgaaatttgttagaaatagtttccttgagaagttgaggttccagtcaagatatgtccttttggtgatttgcatgtttcattgtttctactttctgatcttgctcttcgcatctgtatctaatatttcagttactagaagtttgataagaatcatttggttcctctggaagtaactaagtaattatgtttcatgtatgaagaattgctgatgctgaagagaatttgggtgagagcgaagtgcgtgaggcccatctggcgaaatccttgtacttcatgagggttggagagaaggtataaacttgtgtgcttctatactttacattaagtgtgtgcttgagatttagctatttgcattctttgaaatcaatattgcaggaaaaagcactggagcagcttaaagttactgaagggaaaactgtagctgttggccagaaaatggatcttgtgttctacactttgcaaataggccttttccacatggactttgatctcatctcaaaatccattgacaaggcaaagaagtaagttatagctttgattgtgcctttgtgaagttccattctgccatctatactggagcaatgacatctgactatttattgtgttgattgaagcctgtttgaggaaggaggcgactgggagagaaagaaccgattgaaagtatatgaaggcctatacttcatggcaacgagaaacttcaagaaagctgccagcttatttttagattccatctcaactttcacaacttacgagttgtttccatatgatacttttgtcttctatacagtcatcacaagcataatcacattggatcgtgtatctctaaaacaaaaggtaatttcacttcttacactctcttttctttttcttaattgactcactaacaagaaatatggcaggtggtagatgcaccagaaattttggcagtgattggcaaagtacctcatctatctgagtttctgaactccctttacaattgccagtacaagtcattttttgttgcattctgtaagtgtaaagtatcttgataagctgtctatagttttactgttacagtctgtacggctgggctatatgaatatatggtctaaacttcttttcagctggcatgacggagcagattaagttggatcgctatcttcagcctcatttccgctactatatgagggaagtgcggaccgttgtctattcacagtttttggagtcatacaagagtgtgacaatggaagcgatggccgcagcatttggtgtgactgttgatttcatagaccagtaagtgctgtcacccatccgcattagttttatgtttgtgattcctgtgtaggacaaaacattcttttctgttcctgtgctgtggagataatatctccctttcatttgttccagggaattgtcgcggttcattgcagctgggaagcttcactgcaagatcgataaggttgctggtgttctggagacaaaccgacctgacgctaggaatgccttctaccaagcgaccatcaagcaaggggacttcttgctgaaccgcatccagaaactgtcacgagtcattgacttgtaaattcaatggtctacgttggacgttggaggtgtgatccttctagatccctgcaaagctccccatggacataaaccgtactgaaattgctgttctacttgtactcctaggctcatgagaacatgatctttatctcggtttgattttattgcggacagcaaaaaggttttaaagagaacctccgtgtgcaatttcagtaagtgtgctttagatttgtagaacgagaagagtgcatgtctttctgagatgaatctgttcgttcatttcaagtcttgtggcgatgtctttttggggttccgcactgtttgatcttatgggtctctatatgcttgaaatagcctgacatgctagtctcaaaagagaactgcaaaatagaaccaagcgtaattccttttgttctgagcctgttttcagatgcaacatttcagaaaacagataaacagcattcggtcatacgcaatcgcgcgcacacactgtacagccactgtaactcatcagaaacgaggtcaatatacaacagtaattttcgccgttccataagtccataaaataccgatttctaatatcccaggagactctagctgcagatttagtaaggaagaacaaagcaagttactcagagtcacaggcaagctacacattgtttgttgcaaaaaaactcgaagtattgaggaactacacagagctaatctgggacagggaaatgagcacactggaaaattacagccggctgttcacttgacgatctctggtatgctgcgctttacaatcagctctccgtttctgcagatcagaaatggtaaccatgcaggcaggtcagaacgtctgtgtttgatggctatacaaaggcctagagattcacacaagcaaaatcacaggaagcagtaatgtagtttagtgtaggagcattgtctctctttacttactgatcccctgcttctggttctgcttctccttctgtttccgcttcctctcgtttcgcctcttcacccagggcttctcttcctccactggcgcttctgcctctgcgctgacagatcctgtaatctgcgcaaacgactctttggcgccagaggttacgtcgccgaagaagtccttcaccttgtcaaccacagttttgagctcttctttctttgggagctgggataatcaaaacattttactgttagtgacttgctacctttgctcaagacatgcttactgaaaacatggtcatttgtacatttactataagaaatgcctaccatcctcacttaactgcatagaagttcttttccaggacaacattttctgagctactatctagtactaggccaaaataatttgaaggttgtgctctagaaaatgtcagcctaggataaagcaagatacaagtctgaaatgtacattttcagagatttcagctctaatgttcatgagaaattgctactcctacataacttgcagagaattcgacagggagaggagataaaaggcgctagcgaaacgtacttcgatcacattacttgtcgtcagcgcagacctcaggttcccattctcctgctcacccaaatgagacaggtaaattgcaattctcaattttttcgagtgcaacaacatacaatcacgcacagaagatgaggactgagaaaattaccacaactttgtagccatatcgaaactcattgtcggtcttcagcaccctgtactgctcttttgctgtgtctattatgtcatcctcatccttcagaaatcaaatcatgaaacacgcacatttaaatcttctcttttctacaactcttcaaacacgattgtgtgacaatttgtgtaagcaaacagattgtgctgttaattactttgtagatgacagcggcaaggttcctggcgagcgtgtccttgtagatgtactttccgaggaagttgtccttcgccgcgagcatgatcttcgccgtcgtgccgccggtgacgatgttgagcgggtaccagaagtacacctgcagaaaccagaaaaaaaaacccacacaaatcttgatcacacgcacgcgaagcattgggatcaggaatggagaagaagaagaagaagaagaacaagaatcagggcagcacggacattggcggtgcggatgaagatgacgaagcgcgggttgccgtcgtcctcgatcttgggcagctgcggcatgcgctgctgctgggaccgccggtccgaccaccccctccccctcgcctccaccaccagcgccgcccgcctcgccggcctcgccgccgcctgcagcctgctcctcggcgccgtcctcatcagcaggaagctccccccgccgctcgcctcgccgggcgacagctgccgcagccgcgcccgcgccggcgccggcgaagacgcgctcagcgacgacacgccgcccaccacctccattgaaacctcctattccggtctcgcgccgctgtgtggtgtacgtgttgtggccgccgacgaggacttgggagaagaagcagtggaggggaagaggagggaagataaagccgtggaggggagcttatctggtggtggtgagatggctgtggggtcgctgatgtgtgggcccgggtgggggttctggacccacttgtcagtgtgccagtgagtggaccgggattatgcggatagtttttgagatggtttcgtgctctcggcatacgtggcgtggttacggacagctgaaataaaggcacagtagcagtcgcgtggcttctcccggggacgccacgttgcacatggaacggcctcccagtttatatgttggaacacatcaaatttacaaaattcttgcaaaaagataagtttaacagattactcgttggattattgttactgccgattatatatttgatttatgaatgaattaatgttttaaaagtaaactttataaatggcttcgaacaagtgatctatagaaaacatatttaagagacctagagtaaataatctgtgacaataatccaataaagtagctaaaaagcccgtttaatccctaaaatttacttatatgaaaactatctgttctaaaaggaggcctaaaaggctaaaacggagtgtaaacaaagctagaaagatgtaattattatgtttaaatttaaatggtattatttgtagacaatgaaaagcatttttttccgaaataaaattttagaagtaagcaaatacacgtcatcgagaaattgaacttacgacgtttccaaacatctcatttcacatttcaattaaaaaaaacttacgtacagatgctaagctacaattacatgcaccaccttttttacgggcgaacaaggcgttcgtcggccaagagaaatttactaagatcaaattaatggttacaaagaggtttaccacaatcaacaacatcgttgatgaaacctcacacgtttgcaacggacttctgcttgtagcatcgaaatgccggcaattttttccccttccagatcaaccccttcttttttctgctacctgattctcttgactctcctagctaatcgtcgatcccctatatactatgaattaattaaaccccttacgatgatcacattaagactaagggcaccacaagtctgcaaggaagcaacaggtagtcaatggcgaatctgctcttcatctcgtcgtaacccggccacaatgacgccatctcatgcacgtcgtacatctcctccatgcagcgtgccaggtacacgacgctgtatcccgtcaccgcctccagcccgtcgtcctcccacggcagcggcggcggcagcccggcatctgccagggtggtggccgcgtaccgcgcgaggtacaccgccgacgccgccacgacggacggcgggatcctcaggctccggcggtcgagcagcgtgaggtcggcgaggtggtgcgccacggcgtgcacggcgtcgccgccggagtagccgtacctggcgaggaagtggtcggcgaaggtgtgcgcggtggggcggcccagcctgtacccgagcgcgtcgagcaggtcgagctccctgtcgagcacctcgctcctggcgatggcgagcccgccggcgccggcgccggcggcggcgtcgccggcgctcagcctctcctcggggaggtcgccctcgtacttggccgcgacgaagacggccgtggcgccgagcagcgcgagcaggcggtggctcaccgcctccaggggcctcaccgactggtagcggtcgacgtaggcgacggcgcggtggagcgtgccggcggcgaggccggcgtgcccccgggtgatcccctccatccacgccacgagcgacgcgcgcgtccacgggtcgacccggccgcgctgcaccgcggtcatgtagtccggcgacgaccgctcgccggcggccatctccatggcccggaggctggcgtacaggtcggcgtcgtacgtccacgccgcgcaggcgcatctctcgccggcgcagtagctcccgtccgtctcgtcgccagcagccgctccgccgggaccattggcggcgacggcggccgcgatctcccggagcatagcctcgacgtcggcgtcggcatcatccagatagagataatccatggcgcgctctgggcgcggagctaggccgcgagctcggtgatggattcttggaagatgggaagagagggagacgacgtgctcgctgcaaatttatagcgccacggatatgatgatgaacccgttgactccgacatgatcactgcgatgcgacgagctcaagagtccgaattggagttgacctggcccgcaagtccgacttgatcccgtactgggccgagggatacggcctgtgggccggcctgctccggccttgggctgcagctagctgggccggcgactccgtggagaccatctccgggcaaggaatttttttcatttttaatttttttcttttaatatttacagaaataatctatcggcgcaaaaaattacaaaaatagaccctgccgccctagtggtgggcggcaagctgacgtggcagacggcggctcgacggcgccgtctgcggccgtctgcgaaaattgcatttagccggcaaggggctaaatgcaattttcgcagcatttggctcgtacattttgcatctgggtcccttgccgccctactagacgtaccagccaaaaagtactaggcccgggctgtcttttttgcatgggggcccttgccgccctaacagagggcggcaatggttttcgtgcaaaaaaaaaccctccctcttccgtctgccgtcaccgcccgtccctccccgtttgccacgtcagcttgccgccctagtagagggcggcagggtctatttttgtaattttttgcgcccatggattatttctgtaaatattaaaagaaaaaaatttaaaaatgaaaaaaattctccgggcaagtggcagtaaaaagaaagaacctaacacgtgcatcaggaacatgcttagatctgcgagcacagtggtcagcttagccatgtggttcatgcactaatcggagtacataatacattagtacatgaatggtgattattctgtataatttactgttatatacagcgtagtactccgtactagcgagctggatattgagttcttgtttatgggttcgttgagacgtcagcgagattaggacgaagacgtttagtttatcataagaccatttaggtcatagaggtgtcgaaacatgaattcggcaataataaaagggggtagcgcacgagacctaaaagtggatggatgcggagacaaaggatttagacaggttcaggccctctcaatgagaggtaataccctactcctgtttggggatttgaatccgccgggtgtattatagatctgacgatctagtttgtgtcatcatgccccctagagggcctcctgcccaccttatatagggtggggggcaggattacaagatagaaaccttaaccaatacggtatcggtttcctaaatctactttacaatattatcaaaccaggactttaggccgttccgtaatatataaggaaacgtaatacccgagtcatgatctattacatattccatagatataagttatcccctatgactagtcggataaccatgccgtatgggtatggggtacccataatatccacagtagcccctgagaccttcgcagtcgaaaagataatcttctctcgaaccagattactccaaagccgagtgcttcaatcatctttgtcatggtctcccgagtacttttaccaaatctgaagactgtggagggctggaaaataaagtcaggtgcaccgactagatgcacctaataggtgtagcccccgacaatgtggttaattgaacaaaccaagcatatagtcaaggaataaataatccaaccaaccgagtggttttgataatcgtaatcaaccaagtgacttgatatcaatatatagcatatgcggtgtgaatcctccaaataacatgatccgggtgatataccaactgctttgtaaaatatgatgagtgatatagcaaaatagctataaagaagcttgaatgctgtgaataaagaaatttccaaagtattgggcatacgccatgcgcacactgctttaacagatgtgcttaagtccctaaaagacacatggtttcaccacacctggaaatatatggcatatgtggtataacatccgagtaagtaaactcataaaggatttaccaaccgcctgacaaatgaccataatatataatcagcctaagccataatattggtcaataaaaatgcacacttacgtggcaaaaagcaatgatattgtatccaatcaattgcttgataaacccaaacagcaccttgactatataaaaaagtcagcgggacagctatataaagctttactgtttgacaccttttaagatgcattgtaccaactcctaaaaagttaagtaactgcggtataaaaggattttaaggtattgggcacttgatcacgcgcactttggcctaagcaaaaagtgcctaagtccctaaaagaacgtgacaggccacacctgaaaatatgggctgcagacatattaggcctaggccaaaaaatatgccttcgataccctttaaaggatgacgcatgtaacatgctcccgggtaacaaatcttctgggtaatatagaccaagtgtagctcatatgaatagcttctgatctgaatgattatcccttatgggatactccaaaataaatataataattgaatcccgactggcgcaagtattcggttgatagcctttacggggaataataattggtccagtctttgagcatagaagatagactcatgactatgaatccatgtggaatgtatccggaacaagtcccaattggagatataatcctcacgcttgagttgatgagcccctgagcatatagcttgtcattttgtcatagtcaaaattgtctattggcaatagctgacgcagtcggcatggagatgaaatgaccaacatgaagacgaaattgctcatcagaagtaacggaagatgtcagtggtagtaaaaaacagtgacaccaatcaaaggtaatgaagttgcataaccatggaggcgaagaaacagtcggtgttgacaaaagcaaaccgacgatgaagacgtagacgcgcatcaacagtgatggcgaaatccactaatcatgaagatgaagaaaatagttgacgacgacaaacgcaaccgacatgatgaagatgacgatgtcggtgatccagccaatagcagtgtagcaaccaatgataatgacaaagacgctcatcagcatttgcatagtaggtcaaccgtcaaggtgaaataataagtcggcgaaaacataatcatccattagcaacagcagagatgtcagggtcgatgaagcagaggtgctggtgatgatgttagtgacaataatccatcaaattaatgttatagctgttgtagatgcttcacttggaggagagttgatgttgttgcccaactcgtctaaaccgaaatatttgaagttgttgaagtagaatgtctgctccgaagcaaagatgaagataatgactcctggagttgactcgtgggttgatgaattgatttcttcagcttgacataaaatttgtcaaattttgagccttgtatttgtgtagcccccgactctttgattagttgggaaacaactgaacatagagtcgaaaactgtagcctcttgtcgtcgaatagttattgcttgattgaagatatgtgttgaagatttccaagtagaaatcatgaatgttggagagcctcttattgtagtaaaataacatggcatcgcatgccgagatgtcgaggcatgatgacaaagacgtcgtggttggtgaagtagtaaaacttgcgaagtagcagcaatagagtttgccagtgccgaagataataaagatgaagtcgctccaccatgatgacaaagttgcatcgccgtgatgaagtgaacacgagtcggcggcaacagaagcaaactggtagcgaagacgcgcagttgtgaagataaaagcactagtcggcggcggcataaccagtcggcaacggaagacgatgatgtccatcagtagtggtagctgtataaaccagacgtagaggcgagggcactagtcagcagcagacgagacgaaaggcgatgaagatggtaaggccaatcaacactggcagaatcatgcagccatggaagtgaagaaaccagtcggcagccatggcaaacgtaggcagcttgtgttgaagatactgatgcctataagtagtgacagcgatgtagccagccgtgaagaagatagcatcagttggcgttataacaggccagccgtgcaagcgatgacaccagtcagcggcggatgcggcggccggtcggtgaagacgtagacgcccaacaacggcagcataaaggccagccgtgcaagcggaagtaccagtcggcggcggcgaaggcaagccggtcggtgaagacgtagacgcccaacaacggcagcatataggccagccgtgcaggcggggacaccagtcggcggcggacgaggcaagccggtcggtgaagacgtagacgcccaacaacggcggcataataggccagccgtgcaggcggaaacaccagtcggcggcggcgaaggcaagccggtcggtgaagacgtagacgcccaacaacggcggcataaaggccagccgtgcaggcggggacaccagtcggcggcggcgaaggcaagccggtcggtgaagacgtagacgcccaacaacggcggcataataggccagccgtgcaggcggaaacaccagtcggcggcggcgaaggcaagccggtcggtgaagacgtagacgcccaacaacggcggcataaaggccagccgtgcaggcgaggacaccggtcggcggcaacggaggcaggccggcggtgaagacgtaggcgcccaacagcggcggcataataggccagccgtgtaggcggaggcaccactcggcggccacggaggcaggccggcggtgaagtcgtagacccccatgaacgggggtgtgaccaacccacccgtataggcggggacaccagtcggcggcgacggaggcaggccggcggtgtagatgacgatgcccatcaacggtggtgtggccaaccgaccgtataggcgaggacaccagtcggcggcgacggaggcaggccggcggt

SEQ ID NO: 7010 - DNA, 21557 bp, Oryza sativa
acagcagctcatcaacatcggctctagataatttagagctagtagttggctacactattagagcaagtttaatagtatagcccactactagctctaattcatctatagccgatgtaatagccaattcatacaatagttgcttactatactattaatacctggtcccacctgtcatacacacattgcgtcttggagtccgtgctgcagctagctacagatctgtagcccgctactgctcttctctctcattgtttatctcattaaaatatgtttattgctggctaatagcctgctattgtacctgctcttaaacttgctcttatagccctttaggagggcggtaaggggttgcctgcaaaatgaccggtcaccctacatgtggccattagaatgtaccaacagacgtgtgctacatcataaaaaacgttctctggaagggcgatttaaaaaaaatcctccaagagggcgttaggggtgtagatttgtaaaactttgagcaaaaaattatttttgtaaatattttaataataaaatttaaaatttaaaaaattcaagtacaataccattgctggtgacctggattgccaagcaattttctgcagctggacctatcttgggccaagattagtccgatctggaaactgaacatggctctgcaggccgctgtgccagactaggccgaggcaagatggcctttacaaatcgagcgcataatgctggtagccagaaggggggcaaagcccagctttgcaatggcagtagcaacagtggtacaatgcaacacttctatattttagatcctcctgtcaatattagaacaagttcttaaaactttgatcaccttcatattaaaatcagtttatgaaatatgataacttcatgatattatgatattatgatagtagtatctttcaagaaaaatctatgcatatcttttttaagatcaattttgctacatggcattgtgacttcacggtttttacgtttgccacaggataacttcatgaagggcagctcgagatggagatagatagatgggaaatttgacagtgggctcatgggactttctgagctttcatatgatttctttcttctattcaattaaataaactagctgggaggcccgcgcaattgcgcggctagcatctgtacaaaattatatattttttacatatgattttacttacattttgtcaaatagttatctcgttgtcttaagactttggactgaaccttatcatcccgatgtttctacttttatagtttatataaaagtcacgtcagtcgctatcacttactcctttggcacatctccattatttgcttgctcgatctaccattgtttctatttattctccttgaaaacttaaaaattataccttatactcccttcgttttttaatagatgacgccgttgactttttctcacatgtttgactattcgtcttattcaaaaaatttatgcaaatatataagatataaatcacacttaaagtactatgagtgataaaacaactcataacaaaataaattataattacgtaaatttttttaataagacgaatggtcaaacatgtgagaaaaggtcaacggcgtcatctattaaaaaacggaggtagtggtttttagagtttgttggcttgttaggtttcatttttacaatatttagatgtctcgtcaaacactgctactgtagtcctctatgctctacggttcgtccactgcctctctttattaatattaatattgagattttaaaagtcgaacataattatctagaagtcccgtcaaacgatgccactgtactcctctacagccggtctattgcctcctctctttattaacattgagattttaaaaattgaacataattatctagaagtcccgccaaaccttcagcggctttgccaatgtactcttctatggttcgcccgttgcttcccctctttgttattattgatattttaaagattatacatgattattattggggtttgtttttttactttctagaagtcctgccaaatcatcagtggcaaagccactgtactcttctacggctcgcccgctgcctcccctcaaccattgtgaacattctacttaatgacatgtctatgttcctcctcttaatcttaattgggattctatttggagttttgtttataatttttagatgtcccatcaaccatcatctctactactctacaggcatgttgcttctcatttttattatcgtttgtcattgttgtattctagattgtccttttttttaaaaaaattccatatttttcattctagcattttttatttataaattgtattcctgcatgaactcttccataatttttagaagtcctgttaaacaccgccactgtacttctctatggggcagccactgcctcctctctttattatcattggggttttaaaaaacaaacataattatcgtgttggttcagcttttactttctagaagttctgccaaaccgtcaatggcttagccaatgtactcatctacggctcgcctggtgcctcccctccttattgtttttgatattttaaaaattgtacacgattatcattgggtttattttttttactttctataagtccaaccaactgctataaccatactatccgccgtccctccttttaatcttcattgggattctatttggtttgtttttaatttttagaattctcattaaccgtcaccactctacttctttataggcatgaccatgatcaaactatttagattttttttaatccgagaatttgtaagtctcgagagcaaacttagagacttttttttacattactttattaagataatagatagaatattttatttgtatataattatatcaatcaatatacaccattaaaatctagatcctttaaatacttcacttttttttaattaatatggtgatttccgtccgcttctcagctctgccccattctcggagtatgagctataacatatggaccctaaatatagagaaagctattgggaatcttgttacttagaatttatttttttctaaaaaacataccgtctctaaagattatgcgatagagcaaaacttaaatatggttgaaggagttcggatgcccagttgttttatctcccctacatatgattttgtacaggacgtgtcagttgtgcatatttattatttctaatttagctatgcagacatgacgtgtttgtctcctgtcagtaaattaagtttcctaatttgattttgatttcaaaggctgctgcgtagcacgcatcaaaatctaactccacgctctttcacgtgtccgattcataaaaacagaatcaaagagtcaagcttttacatatattgtgattaaatctcaacccttgtagtctagatatgttaggatctaacggtgtagattttttctttttccccgattaatgtgggaatttctagcatccacctgtcttctttcaaagctgttttaataatataatagatagatagatagatagatagatagatagatattctatggcaaaatttgctacaggatatcaaaaaacatgtaatgtaattagctgtagaacatcgaaaaacctgactcagctataggacacttcaaaaatgatataatttgctaaaagactctaaagccattattttattatttcttggatcaaatggagagaggaattttttagaagacggcaatgccctcagacctctctccttcctcgatcttgtctgcaggtaaaaaagagaaagaaaaagaaacaagccgtcgttgcacatggcccacacaacaacatactccctccgtcccaaaataagtgcagttttgcactattcacgttcaacgtttggccgttcgtcttatttaaaatttttttatgattagtatttttattgctattagatgataaaacatgaataatactttacgtgtaactaaatatttttaaatttttcataaacttttcaaataagacggacggtcaaacgttaggcacggatatccacggctgcacttattttgggacggaggtaatacaacggtgtttcggtgtcctccatggaggaccaccgtggcgagggcaatgatggcggcattcacatgatctctgatgatcgcctaaaacaccctattgataaattgagaacaacacagattttgccaccaatccagctgagaattcaggatggagggagggcacatcaggatggtgttgatcatgatgaggctgaagaggaggaagaggggcctaagctggagcacgacaagcatgagagacactgcatggctggttccgccgcaacttccaatctcgggtcagaaggccgagggggcaaaaggccgaagattttggtcgtctgctcaccccaagcgccctctccacctcatccagtggggggcggtggctcagcgggtggtggatggcaacgaatctgccggcgacgagaggagacgaggagatggacacgatgaagaggtggggtgaggcttgctcgctcctctggaggtttttcatggggtagctcgcgaggactatgccgtacctcatggcagtgcgtgggcgcatccctcctcgtcgttcaacatcgacgcatgatgccgtctccagtgctctgccacggacctgtcctctgcatagcgccatctacgttgtcgccgcaagtgctagatggggggagcgattcggctctaaagggcaaactcgtattttctatgttgtttctccatttgacctaaaaataataaaataatagcttcaatgtcctctagcaaattacaccttttttagagtgtcctagagctaaatcatggttttacgatatctcacagctaattacatatttttttggtgtcccgtagcaaattttgctttttctcggagagatttatacgtggttggctgttttacccacaaaaatcctcatttttttttcacaaaatatacgttctccagcgcaaaaaaaaatatcgtgtgaagagatttacacgtggttgactgttttactgagctcctctttgaaaaaaagtctatttgtccaccctcatctctttgggttatctttgacatggcttgactaagtctattcctcatcttttggaccgtaccttaggaaaaagtatactttaactcccccaactatcgcccgagtatgattcatgtcatttaaccacaaaaccaggtatatcgacttctccaagtattaaaaccggtgcaaacaatgccacttgatggttttggaggtggttttgtctggcgtgacgcctacgtgacggtcttgaccaagtctttgtcctatatggcattagaataaaaaataaaaaaaatgtggaacccatatgtcattcacacaaataaagtattgtgggacccacatgtcatcctccctttccttcccttcttcctgctccctccctctctctcccttatctctctctctctctctccccaagcctttctcttcaccttgggcggagcggcggtgtggacggtggtagggagcggcggcggcggctgccaaccgaagcacgagctcttccccgaagcacgaagcacgagatcctccccgaagcattgtttgcaccggttttgatagctggaggagtcgatatgcccggttttgtggttggaggacatgaatcatactcgtgcgatagttgaggaagtcaaagtataattttccctgtgccttatatgtccgtaataagtctattttggctcccttatcgttggaccgggccaggtcgggcagcccatcgtgacgaggcagaggcctaggcacagcccaaaggtcaggctgtgccatgcttgggctagaccagaaccccgtgctatgggtcaggccgtcgggcctcgagtcttttggctaactatagatgaggaacaaggtgagcaagcacttaaccatttcattaaaattgagatctttattatttgcatggaaatgagctgaagaattgtgatctttgtgtttgcatggatatgaattgaagaaggataatattatattcttggagttcccaaaaggacggtccaatggccgatgaaggcattctttgatgctcggtttactaagttaataaggtatagtctcctgcttaatctgagttaacaaggtgaaccgcaagtgctacaaagtttcatattatgaaaaatttccagtttccatgttcttcgctttgctaaatgaaatactccatccatccctaaatatttgacgccgttgactttttaaaacatgtttgaccgttcgtcttattcataaactttttgtgaaatatgtaaaactatatgtatacataaaagtatactccctccgtcccaaaaaaacaaatctaggattggatgtgacatattatagtacaacgaatctggacagagatatgtctagattcgtagtactaggatatgttacatccagtactatgttggtttttatgggacagagagtatttaacaatgtatcaaatgataggaaaagaattaatcattactttttttttaaaataagacgaacggtcaaacatgtttaaaaaaatcaacggcgtcaaatatttaggaacggagtattatatagagtaaaatgcactagtggtccttaaacttgtcatgaggtttcacttagatccacaaacttgcaaagtgcacatcgaggtccctaaacttggtttatcgtatcattctggtccaaagcgtcgtttgaccgtggtcttgcctatgtggcacaccacgtggatgatgacatggtgtttttttttccttttccccattttctttttcctcctcctcttttatcttcttcctccactggagccacgtcgagctcccccgtgccgaccgccgccgtcgtcacgtagcgttgctgctgtcgaaggaagaggctgaagaagagagaaatgaaagaggaagaagggagaaaaaagaaaaaataataataatgtgccatgtcgttgtctacatggcatgccacgtaggcaagatcacggtcaaatgagactttggaccgggatgatataataaaccaagtttagagacctcgatacatactttgtaagttcgtcgacctaaatgaaagctgcttacaagttcaagaaccaccggtgtgttttactctattatatattacaactttaatggagcagtttgttgccaacaaatgctaggtatgcacaaatattcattcgatctgttttcagtattgtgtcgcccctctgcaactacgtgacttctaatttcagcatgattttctttcaaaatgtaaatcatatgaatatttacttgtttcttagtttcttttttcaaaatatatcagggagatataagataattattaatatgttagattatgcactctctgttgctatgaaactacaccaccattggtcagacgtatcaaggatttctaatatctgtttcctaagcaaaggagaaaacaaaaatcattaatgttttcattcctatcaccgtatgattatttctacacttgattattttgatatctttcattcttgtatgctctttgcacctgatccatgtagagaaaaatctggtaggactaattgatatgcacctattcaaagaggttaatatggattgtggccaagccacatactcgcactgaccctgctgtaaaacggcaaaaaaaaaaaaatcttatccttgacgattggcttgaacaataattaagaatgttatacctgctttcaggtaagtggtctgttatttttgaaatgaacaagcggttaacgggacaagtgatgatcaagttctcgctccaaaaaaaaaaaaaagaagaagaagaagaagtgatgatcaagtgtggtgtgcaagattttgtcacgctgtggaaagaaaatgagaaagttgacattgttgattcactgagaggtgtgttattgtagtattcgtgcgtgtatttttgtccactcttaagaatgattcttgatccatgcatatacttttttttcttttttttttaaccttgatggaaggaacgttgaatgatttgttggtttttgcgtcatggaatgaattttgtgcattaactgattagctaagttacttgttgatcatacaaggaattaagggtgtgttcgctattcctggatcccaaccggatccctccgcacgaaaaatggagcgatctattagcgcgtgattaattaagtattagctaatttttttttcaaaaatagattaatttgatttttctaaaacaactttcctatagaaacttttttttaaaaaaatacactatttagcagtttgaaaagtgtacgtgcggaaaacgagaaagatgagttgggaaaaatggtatccgaacacaccctatgtgtgggtatcgacgtattgatgtttttaaaaaatcccatatcacgatatcaatgtatccatatcgtcgtagcagtatcgcgtatccgtgcatcaccaatggcggatacaaagggtggtccgggtggtcccgggaccaccaaaaaaagggcgatggaaccccctattaattataaaaaaaagaaaatagcgacaattgaaaagaaagaaaagaaagcgacataatccatattccctaatgccgacgcgctattccctaatgatggctccagagaccccacacacgcgtatggaatcgatctgatcgacgcgatcacgactctctctgacgcgatctctctgacgcgatcacgactctctgtctctctcctcatcgccgccctagcccgtaggccgtagcaactgccctaggccctagcctggctagcgacgccgacgagccgacgagaggagagacgacgcgtcgacgccgcgacggcgcgaccacgcgagcagcccccacgcggccacggccacgccgccgcgcgcgacgccgtgaccggcgacctgctgctgtcctgctgtctgctgtctgtttaatagtgttcgtcagttcgtgtgccgctggacgccgccgcgaggagccgtcgtcgagccgatcagccgcccgcgccaacacaaggtaacaattttagttttaggttttctaattgtccacctttttcaatttttagttttaaaatcttaaactcttgtgcattgtgagattaaattgtagtattatattgtagattgttgattgttgaatcatgaagaaagatggagttatcgtatcgctttttctttaaagtggatgaagaggatataatgaacactttcatggccattagaagacgtagacccgataagaagaaaaagtaatatggtaattttctttaagctttcatagccgtacaagcttctttaaatcaaaattttacttaattactaattttatatattttaagatgttttgttaatatatcatggtaagtttttgataatttgatctattttattacttatagttacattgtatatattagtatcgttaggtttactgtgtttagaaaaaaaattttaggtcggaccacccatatcctaaattctagatccgccactctgcatcacaggtgaacatccattgactgatcgacgtttgccaataccggtcggaaatttgaagatcatattaacatgccgtgttgttgttgacattgcccaagtgcatgcccacgaaacttcgaggaagcttcgtagatttgccattcacggcgtaacggaacaccggaaattgtcttaaaaattgtcaccatccacatgcgtatccatcgtcggctggaacaccatggtcggctggaacaccatggtgctggaacaccatggtcggctggaacaaattcaacttcccgtatcctagttgactggaattgaaggtacaatttccaacattcgcttccaaacaaggcctataaagtcccatcccctcgacctctcgccattgtccacctgccacgtacggcccaacccgccaccgaattcgattgctccagtgaccatggacgacgctggcaacagcagcaaggaggcggaggcgcaggcgccggcgccggcgaaccaggcccctgccaccgccgccgccgccgcccgcggcgcgattcatcgcgggccgatgctgcgcctcgccgcgatgcagctgatgctgttcgcggcgtacgagatcgtcagctcgtacgccgcgccgccagtggcgcttccccgcctcttcgcggcgttcgtcgcctggctcgtcggctgcctctcgctgtttgtcgcgccgccctgaagggctgcacgtttcatcggaggttgaaagcatagccatcaggtattcaggattaatctatcagcatcaatcatcagcggtagtgtggtgtaacggggctcgttttttgttttttttttcttctttatgtggagtgggagtatgacgttctgcaggtttatttatgttgaccactcgttgtttattcggacttgtttgtccgtttcagcagtaggctactgttaggctgcctgtatcagatttctctgcacatgagagcaggtaaaatagcatgctattagccagctataaatatattttaatgagataaaagataagagagaagagcagcgggctacagatctgtagccagttacagcacggactccaagacgcagtgtgtatatgacaggtgggaccgtatattaatagtatagtaaacaactattgtatgaattgactattagatcggctatagatgaattggagcaggtagtgggctatactattaaacttgctctgacgcggcttaatttttttacctcaaagcgtttgatctaaatgcttttttattggtcagtgtgagtgtgacagtttatccggctacgacgcagcgtcgcaggctcgcagcgctgagcagcagcagcagagcccagtgttttggccgagaccgagcgtccccggccaaaacagtacgagcaaagctgatgctaactagtactacgagcaaagtgtgacagtttatccggctataattctgtcacgagcaaaaataaaattgctactccctacgtttcacaatataaatcattctagcattttacacattcatactgatattatatgtctagattcattaacatcaatataaatataggaaatactagaatgatttacattgtaaaacggaggaagtatacgagagcataagaaacaagaccaagcaggagggcgatctagatcaccatgccattttctgcaactggacatgctttggaccaagcttgtccgatctggaaatagacaaaggctatagatgttgttgggtcagagactcaggccgaagccagataaaccgagccccgaaagcccacataaacaggggggcaaaggcagtagtagcagcggtattaaactgtagtacgctaccgttatgtgcaatcggttttgttaaatcatattcaacccgcaaagacagaaacatgcaaatcaagcaactaatgtatatcaagaacaactggttggatgagcttgcagcatcatgcaatttattatggcacattcctcacatcagactgaaaaactgattcagtgattccacaagcagaatagttctacacaaccaaaactgaacttcaaaacatatgggacagtatcaggtatatctacactgagcttcgatatctccgcatcccgtttcccagaaaccatcatcactagttcactcagtcttcaattatcctttttttaaaaaaagttcactcaatcttgattctcgatcagcttcttgactatgcttttaagagctggtgcactagcactgcacttctgatcgacgaagcatgacctcccttcctcagccgccttgcatagctgtggatccatgggcaccttgccaaggaaaggtactcccatttcgttgcacattttctccgcaccacccttgctgctatcaaacacctcgctgcatgcaaccattgtcaaaagctcaggagctttctccttgatatagttcagcgcccattctgtagcatccatctcgcctccctcaccttgcttcacgaatctgaaatctgagagaacctgccgcaagccactcatgttctccacaacacctaagatcggcacaccaaccttcttgcagaaatttatttccttccgcacatcgattagagagacctgctggggagtggtcacgattattgcaccatcaattcctgtggcttgaaggtactgaacgattgaaatatgttcatctgatgtccctggaggagcatcaaccacaagatagtcaatctccccccaatcgacatccttcaagaactgtttgatgagtccgttcttgcgaggtcctctccatataacagcatcatctgggttgggcagcatgaaaccaattgacatgacaccaaggttggactccacatagactggtgaccaaccaaggttgctttgatgaatatcctgaccttcaaggcctaacatttttgggatgctagggccacatatatctatatcaagaaggccaacctggcagtccatttcagcaagggcaaatgagagctgggctgaaaatgtactcttccctacacctcctttcccagacagaaccagtatcttgtgttttactgtagccatccgttcaacaataccaaccaagtctacaaacacaatcaggcaatacaatcaataattatttcactgtgtggacgaaagcagcagtaattaatattgtctatgaataacaatcggtcatggctaaaattaggaatgcgagaagtacgtaggaaagaaacaccaattatattcatgaaagaatttacttgttcaactacaatttttgtaacatgaacttgtcttcctaggtgctcaatcacatgagttcctttttttaagtggcaatactgctgtgaaatattttcatggataagtggatatcactagatgtgttctccgtattgggtttccaacaaagttttttctttaacattcttgatgcactccattttttgtatgttaaacatttaagtatttccgagtgccattctatttagaaaaggaggcagctgtgtttcaactttcaggtgggacaccagatcatgcacttccatttctttccctctttaatgttacactcacaagtaaaatgtacttcctgacagtacattagatttggaaaatcagtaaggaccacatatttcttcatgggtttgggattgggtttggctccagtgtagtaataaactaatgatcatcatgctttcaatgtcagccccaagccttgctacctccatcactcacgttgcttctgtttttttaaccatctgaactatctacctaagaacctacaaggtgtttggttgtactgttatatatgcaataaggtagaacaatagatttatgaaatcacataaaaaacactgaagacatatcattgtggtatatggcatcttcatgcccaatataaaacatcagaactgacagaacaaagctggttggtaaatatcaaaggtaaaaactatccataaggcatagaacacaatcaacatgatccagctttggagctggtagattagagcattgggcctcaaacccacatcgcacacacccaacaaaaccatacaatgagatgaggagcataataaatactttcatcccgctcctatgaaaaattttggatgttgactactaacaaccccaattttcttccttcagcttcaactgctcaacttattcatacgagtgctcttgtaagatgtatcaacagcgaggaataggtatctgtgtgcctattaattttaattcatccatctcttttccccaaaattcacaaaacaagacacaacaacccgaaatctgataattttaagagaggcccaaactgaaaacactgcagctatgtggcacgaactaaattaactctaaactatgatatatgcagggaaatagcaaacaggtatcgcacaccccagaaagaacgatcacatggaaaaattttgccagaacacggtacaacaacaattggtcaagttaccaggatcagggcccttgggggcggtggcgcaaatctgctggttggggcatccggcgcaggcatccgccttccccgcctcctccgactgcgtcccagggcaatctgcagaatcaaacacttatcgttagggttgcgcatagcagacacccatccctttttccattgcaaggcgatcgaaacccacaccaaaccgaacggaaacaggggggaaaggtagcaatcgagtcttacgctcgttggcgtccgccgggacgtcgctcttgccgccatcgccgccgccgccgccgccgttctccatctccctcgccgcctccaactccgcctctcgagttctcgttactttctcgcgaggtttgctgcctggtttggggacttgaagcctagagagcgacggaaatgaggagaaaaggagtatttgtgagagagaagggagaggctggtcaaagaggatatggagcgtccgattgtgatcgaacggtccagataccggttgtcaaggacaagtttgcatctcgtattctcgttgcatatccgtcgcgcgcgctctctctctctgtggattatttttttccgtgattttttttcccgtggttgactttattcctaattaaaatataatggatgatttcatattttagaaaaaaaaaacgaggtgatccaaagatattttaactactctagaagagcaaataatggacccatcgtagtagttggcaaagtatgattcgaccataaatactctcttgtttttcaaaatccaaaataaaatacagtcacaccgtgaaactataattgggtctagaaaataccaagacttttaggatctgcttggaagattagcccagagctaattttgaaaggtaatatttagtcaggaattggtaggctaaacattagcctagggtggtatgtttggatccatgggctaatttaaggctaaaaggtggagagagagtagaaagagaggagagagaaggagagagagaggtgctttttgatggtccccacataaaattagccccattagcacctcttggaggggctaatgttttgagggaggctaattcacattagctcaaaattagctcacctgtttggatccttgagggctaatttgaggctaaaaggtgaaggataaacattagcccatgaaaccaaacagagccttatgctttaggattggttgtgttcgggctaattggggcaaagaagataaacaactttcttgatctggtcaaatccatcatttccccaagcatatttttagaattaaacttttcacggacatggacccatcaacatgacttggccacaaagtactttctttattctccacaatcaaactcacaatatatatataggccctgtttagttccttaaatttttttcccaaaaacatcacatcgaatctttggacatatacatggagcattaaatatagattaaaacaaaaactatttgtacaattaggggaaaaatcgcgagatgaatttttttagcctaattagtctatgattaactatacgtgctacagtaacctacatgtgctaatgacggattaattagtctcaaacgattcgtctcgctgtttctagccgagttatgaaattagtttttttttattcgtgcccgaaaacccctttcgacatccagtcaaacattcgatgtgatatccaaaaattttattttcgcgaactaaacaggcccataaacaggttgtgaaaccgatagacatgataattgggtcccacgaaatattaccaaaccatcaattagtatactcaaatatagaacatttttaaatattatcacatctgttctaaaatatagtaacataatactaaataggacatattaatactacgaatttgaaccgataatgtgtcacatttaattatatgtctttctctggtcatataatcatcctccccagactttaattttcactataagagctagttgatgtcgttcctggtatctaaaggggataaggcggcaccatcagctgcttaactttgacttccagtctcccaccacttcagcttgaagaagtaaacatgactgataatctggcatgtgcataagcgagtctgtatagattaatgatagataccctaacggcaactgtatggttgaaaaagacataaatattagagaattatctaatatcaaataattagaaggagcgaggttttgaatttagattgtttagcccaccatctagccggcgagcatttctccgttatggttgaaaaagaaacagaagagggaaactacgattcgatatgatgagacgcagacactaatcaaaccagactacaagataaaagtacggaatactatactggtacagcactagtgtagtaacaacgacacaaatgacacgattcgttgtacatgtactaatcgtactgagctctgcaaaagcgtgagaggctcagagccacggcgcgaacagagtgatgcacccaacgagccaaatcagcagctcggcgagcagccgaggccatggcacccggtcccccgcgcccgcggacgcgccgacggcggcgatgatcatcgtggcgccggacaccatcagcaggaacgcggcgcgagtggtggctgcgcctccgccgcggccgtcggcgtgcggtggctctggctcttcgccgaaggcgatctcctcgggatccatttgccttggctcgagatcggccgtcgatgatatgttttctactgtatttgcctttgtgccagagcgtgtgcaatatatgttccagatcgagctccgttggcagtggcaacgaccatttttatatacgcatcgagggcaatataggtgggaacacagaatgggcccccggttgaaacgataagtcaatttgtagtataaagtccatgcgagctgtgtgcatttggccgcttcttgtgttgcgttaaccttttctagtcaatttcttcactgtttctagcttactggctggtttgacgctggtacgttactttgaaataagtattctgttatacctgcaccaatgcgcggtgaaatcactgacaggtcggtccgatacagcacatcgacccacttatcagtgataactccaggtcgtgtagagctcgcagttcgtacgtgtaggaacgtaattgcgtacggaggggaggaacgtgggctggattttttacattttgatccttttgaaaaacttatttcgtaaatagacccctaaaaaaacttatcccagaaatggtcctttttggggcgccagagtggctggcgccgtcatccagcctctctggcgccgtcctcctgccaccgtggtgcacgcgaaccgacgtggcaggaggagggcgccagcataccatgctggcgccgccccagggaggagggcgccagcatggctggcgccgccgcctccattcctgtttctctgtatggagttgcaacggtgtcatttttattttatttttttggatgttttttcacactcaggatcatgatacaaccaaaaaaaaaattaaactcgaactaccacttagctaagtctgaaaatatctagcataccacttagtctactttgcaccttcactaaaattagaccataaccatagctcctttagtaaaatcctttgatcagcatgttaaacataatgcactctaccaccatatgaaattacttaatctaattcaaaatataaccacatgaaatgagatatataagttaaacagtacatatagatgcaatttttttatttttattttattttttttttgatatttttttcacacttaggagaacataggaaccaaccgtataaaaaataaactcaaacggacaaaatatgtgacatgtagaattttccaaaactctaccgaaacggacaaaatatgacatctattaaaataggcgtaactttctcatacggactcggaatcaggcaaataatatatgcacggacatctacagaaaaagttacatccgattctcccccgctttgccgggttcggcgatattaaaacctccaaattccgcttgcaagattgtgttttcgaggagagaagtttttcggtggagctttggaaaattccacatgccacatatttcgtccgtttgagtttattttttacgtggttggttcctgtgagtttctaagtgtgaaaaaaatatcaaaaaaataaataaaaataaaaaagttgcacatctctctcctctgcactagttcggagagaggagaggagaggaaaaattctacatgtcacatattacgtctatttgagttcaatttttctatggttggttcttgtgtgtccctaagcgtgcaaaaaatatcaaacaaataaaacaaaaataaaaaatttcgggggggggcgccagccactctggcgcactccccctagccacctcagcatcgccccgccacgtcggcggtgggacggcgccaaagaggctggcgccgtcccgttgaacgacggcgccagccactctggcgccccaaaaagaaccatttttgggataagtttttctagggatctacttgcgaaataagttttttaaaaggaccaaaatgtgaaaaatccagggaacgtgggcgcggcaaaaggaacaggttggtggcttggcgtgacgggggtggattatgtggctgtggccctgtgggatgtcagtgccgcgttccgcaatcgctcgctcgctcgcccgcccgtccggcgccagcccgaacctgctaggaaacttcctcgggttcaaaatcctcaactttgccaacagaatcgccttacttgttgtttcacacctctcagaattactttcttcctcctggaaatgctgtcgttttaaggttgagtgaacaaattagcgacaagtaaaaatgaccatattaccctaaaccctaaaccctaaaccctaattaccctcatttaattattgcatttgtcacttcagattgtactgtagataattaactaatcacttctagcagaccatctatcgcattgcacagacatgggtagtactagtagtggcaccgtagtatactaaatagcaggttcaaatgaatcgatgggatagactaggcttagctcgctggtcaagatgctacaacgacaaattttgtgggacatttttctgaacagcgggatgactagctttctgggacggaggaagtattattagagcaagtttatttagtagtaaagccaacttttataaacttggagcatcatcgagagattgtgtatcatatcctactaaaaaattgttttgggtttcctaaactgaaaataataagtaaaaaaataatctctccaacagaaaacctaaattttatttaaaaaaactaaaaatgggcccctctattaaattacggctgaatttgcaaaactaaaaacgggcccctctattaaattactggctgaatttgcgtttttcttcacgtggaaaacattttggccgaggagtgaaggagaggacaagcttgagagacaggacattgggagtcggagaggagcacttgctttccctcaaatcaacatagcgataaatatggggaactccaaaacatgtgcaaggctagggatcattggatccgatttttcacctaaaagccctcaaaatcagatttgggaagaatataagagaaaggttggtgatgctcttattccctccataaaaaaataaccttataatacgatgtgacatatcaaatttggacagatagtatgttcagatttgttatactagaatatatcacattctattatgaggttgattttttaggtggcttatactccctccatccttgcagttgtgggtttctgtgtatagcgtttaaccgtccttcttatttgaaatttttgtaattaatatttttattgttattagacgataaaaatactttatgtgtttttcaaataagacgtattgtcaaatattggacacggaaacccacaactacacttaaaatgggacagatggagtagtcgataagttataaggttatttctatttttctcctctctatctctcgcctatgcatttaatgcatttattatggagtatgtgatagatagctcttgcatgagaaccaactatattcttttttttttcaaattttctcttatccacgtaagcttatactccctccgtccaaaaaaaaaggcaaaccctgggtttccgtgtccaactttaactgtctgtcttatatgaaatttttttataattcgtattttcattgttgttaaatgataaaacatgattaatattttatgtgtgacttgtctttttaatttttttcataatttttttaaataagacggacggttaaatgttgggaatcacggtttgccttttttttttttggacagagggagtagttggctcttacaggtatgtggtgtcatgggtttagtcagaggctcatagcagcagggccagaccaccaaaagttcttgctgaatttcggaactgaatattcagattgaggcacgaagactttttctgaatcaatgaggcttttagcgggattacttaaattatgtcgtcacatttttcacttccatttttttccatatatgattgtcctctctccgatatttaagctcttccatgtagataataaattgtttaaattataattttcttatatattgtgtattagaaaattttcgatgtaaatattaaaatatacattgtaattatagtataagttttataattttcaacgtaattacatgtaatgtaagtataggtaatttacattttttaaatgttcttactgttttttaaaaagaaaaatatgatctattgcagctactcgttcagatagaattaagcagatgcaaactgcaacgagcactgaaaaatgttggctttgcctatttggaggaatgagtctattttgcctccctcaacttttgcttcttattgaatcacctctcttaaccacaaaaccatataggaataacgtctccaccatcttcgaaaaccggtgtaaattgaccactttggtggtttgaaaggcgttttttttttgctgacgtggcgagttgatcatggttgactcactgaatcatcgagtaaacctcacccaacagggactctatcttctttcaacgcgacgagctagttggggggggtccacctgtcgccctttgcatctgttccttttcttctactctcttctttctctcctcctcgctcctctcgaacatggctaagtggcacggcggcaatgaggcaaaaagggcaacgacgattggcgatgggtgatgcgggtcttggagaagaggcttccggattggcaacgagcagtggccggaggagtagcgctcgggcgtggacaaatcgatcccacatgggggcaacgctcgagctcgtggaggcaacaatagcggaggtgcaacggcaagggggaggtcagcatgcctggggttatggctattggagagcaaagatccctagtggtgagccggcctcctgagaggtggctaggttgaggagatcgagtggtggatggcattgcgtggggaaaagggccggtggaggcccagggtatgaatgcctcctacccattgccatccccctttttttggcttattattacctgcgtacttaccaatggtccccatgcgcgaggaaacaagatcatccccctcgcacagaagc

SEQ ID NO: 7011 - DNA, 53622 bp, Oryza sativa
  unsure (1)..(53622): unsure at all n locations
atgataactgttgtgagaatgttgagtgggactttggggttttatctccgaaggaaatcacagccccttcaaaggatgtagaacttataagcaaactgaaaccatctttgcctgagaacaagaaacatgcttgtgagagaagggcaaaggctattaaacatgatacttcagagaacagggcaaaaatcattgagatcaaatcactagattcttgtgaaacgtctggttctgctgtgaatgggcatttcgaagaggaagaatgtgatgaggaaataatgaacattgatgcctccagtgattcatccctggagccatatgatctgtcagacgatgactcagatttgcagaagaaattcacccaattaaaagatcttgctgctgcactacgaaaacctgatgatccagacggtgtaagtttctatctagtgctacctgtactttccagagcaaattattgtaaaatcctgatcatcctcccttcttttttacccaaggttgaaaacgctctgagttctgccgaaaagcttgtgagagcatcacctgatgaactacgccacaactcaggtgatcttgttagagcacttgtgcatgttcgatgttctgacgtggcaatggaaggagaggaagattctgctgaagaaaagagacagaaggcattagttgccttgctggtaacctgcacatttgaatcattagatgttctcaccaagttgctgtactcatcaagcgtggatgtaagtcagcgcattttgattattgatgttatgactgaggctgcacaggagcttgcggaaactaaaattgtaaggagagagctgcggcatggaaacttgatatccgacacctctccctcttggctagttcctagtgatcagggacctgctggtgcaggtccttggagggaagtctcagaatcaggaacacttctgaattggtcacaccggtatgaaagagaagttccatctagatctggtcaagttaaatcaggaaaatctcgtaaatggggtcttggaaaagctaaagatttgcagacagagtggtcaaaaaacagatttcctttatatgctgctgcttttatgctccctgttatgcaaggatatgataaaagatcacatggtgttgacttgctcaatcgggactttgttgtcctaggtaaattgatatacatgcttggtgtctgtatgaagtgcatggcaatgcatccagaagcatcagctgttgccccagctcttcttgatatgatcagatctaggtctgccaagcctaaaacaagcatttccgtgttaaagactttcttagttataaccaagtggtacgattttgacattggattttgtttctgcagggctgtttcgcaacatcccgaagcatacgtcaggaggtctgtgttgtttgcagcttcttgcatactgatagcgctgcatccgtcgtatgttgcatcatctcttatagaaggaaatcaggatgtttctactggtttggaatggatacgcacatgggctcttcatgttgcagaaacagatcctgatacagaatgctcatcagtaagtactctggtctatatctgttatcgatcacttgttcgtgttttgttcgtcgacgtagagagcaattatggtataataggatgacatttgtttcttaaaaccacacacaataataataggtcattttttgacgaacaaaggagtacagttatgctggttttgtatcaaagtttgtctgcatcgcctaatcatttcagtaacctacccttatatgctttagttttctgtaacctactcatttctctcattccttcagtatacaaattcagtgacccagctcttttcagcaatttgtaacgaaaaacaggacatatttttacttataagctggaaaccagtttttacttaaaagagaaaccaattcagtataagctggaaactcagtaacttttcacactgtcatctaactcctcccattggcatgtttgtcttcaagatggctatgacctgcctgcggcttcattctgagatggcccttcagacatcacgagcactggaatcggcggatcacagcaaggccagcagcagcagcagcaggtcgctaccttctaagcttgataacatcatcataccatttgccaacatgatgtgatcgatgtactagattaagttgtaaataagcatatattatcttgccatgtaatattagaaattccaggtcagctaattctgattaggcttgatattgtcatattacagggttttttaatctgggatttgaaaatgctagaatttttgtcgattcgtgtggagattgtatggaagttgtcctgatccagattaaagagaattgatgaaaattgtacccagattgatgaactgactaatagttgatgatgatgagtaaaagagaattggacgagtcatgcaggggcgagggatccgtggggaccaccagccacaggatggggccactcctcgagcgttggatcagccgcgagggacgatccgacggaggagatgcgtctggtccaggtatttaagcgcaacttttttttgcccttcgcagcacaactgcacaaccacttttccgcatctctctctctctcgcgtctcaagagcagcggcgaaaggtgggaggtgagatctctctctcacttcatcctcctctcctcttctgtggtttcgtccgccgcctccatccctaaaccctacttcttctccgaaagcgccgtgagattcttctccctactcttcttcgatcttgctccattggtggtggtgtttgtttgcttggagtgtttggtgtcgcggtttctctcgttcttgtcttcgctgaatcgagcagcaccctgcgtcttggttggttcctgtttaccgcggtctggtcctcttttttcgtgttcttcgcttcccgtacccgtgatgttgttgcttgatgcatttgaggcgtggttttctcggagttggatgaggaggtcgacgagcaccgaagcttcatggttggtctccgttcgcctctctcccatcggagcacgttgatcttgacggttcctggcgcgaccaatgcgtgcgcgagaagttagacgccatgaattcgtttctcttctctgctttgttttttttttggctcctgttttgcagttggtgtgttgcggaggtgtcagtttctgaatttgtataaaccaaatgccctcttcttattctttttgctgttcctgatgcaatctgcccgtcttccttacgtcttgatcaagtagaacggcgcctctttctcttctcgaattttaaggcgtttcggaatccgaaatttgctaagattttacctggccgtgatcatttttttcctcctgttcttggcttcccttacccgtgttgttgttgcttgatgcttttgaagttgggtgtgtgagtttcttggaggaggttgaagagcacggaagcttcatggtgatctcgttcgcctctcctcggaacatgttagtcttgatcttgccttccgtttctctatttggtcttgatcttgccttccgtttctctatttctaccagtgcaagctcgagaaattaaaccacatcaattcgtttctcttttcagtttgttctgttttggtatgctgcggaagtgccagtttctgaatttgtattagctagatgccttcttctgttcttttcgctgctcctgatgcaatatgcaggatgcttcttctctacacgtctctctgttttctgcctcgaaagaactctctgtcctattgtggctttgtttactcgatgctattttttcgttcaatgatttctgcatgtgtcgctccattgaattacttgtaaatcttctgattctttacctatcaaagaaacttccatctcttgaatcttgatttggcttccttctcccttaccgagatattgtgcattttttgtctgtaacctgtttttcacttctctgtgatggtgttcggtgccgtactgtactgttaggttgttcttgctttttttcttctgttcttcattctttgtttgcaattgtttaagttttgattcgccgaagcagtgccatatctaaaggaaatcgatcattcttgtacagtacactttatgcgctcgtttcctcttcttatctcactttgaaatttggtgttatgatatgtgtcagtaaagcttatatcgcgtttgtagaaaaccttgtgtgtattttgttcgcagtaataaaataagatttaggtgtaaaataatgcagcactgcaactgaagattgatacttccatgttatatatctcaaaaatgcatttaagcatttaagggccctgaatgaaagcaccaattacaccctgtgctttgagctagataagtagtgccatatcaagtttgatgattctacttcactttatttcatatgtaacctagctttctggcatttaattgatctgtattattgtttaagtgtctttccccgtttttgttaataatgttattttatatttgtattcatgttaaattttcagcaaagcaagttccgctatgggtaacagccttcctgtagaatcgaagttcacttttgaagaagagaatgacagaattaagtatgttgtgtcgtctatgcaaggatggggtgagaaaatggaagatgctgtgagtaaacttgcagccttttgtatgacaaaaaaagggacagttctgcaaaattttcttactgatctttaagtaattgtgtaaaatactgtgattgacatatgccctctatattctctagcatgcagctattctaaatcttgatgataccacgtccacgtctttctttggtgtttatgatggccatggaggtttgcttcattctcatttttttttttaatttcaaaccctccaaattgttggcgtaactgtttgtcatgctatgtttgtctgtgtgtatcactttgtttatctctgcgcatgttttgaaaactttgttgtatatgttgaaacatttacctgtcaattttcaaataaatatgatgctacagttatggataatgaacaagttagctaatcagtaatcacattcgtgtggcatgcttgcaaggataacatgaactacataaaaagaaattttaattcatgagagataaaacactgcatgaatgagttactagtaatataaatggtgatgataatttagaggataattacagattaacaggttagttttttttttaatgatgcctattcaagtgttgttctgctactaatgttcacaacagtgttttgatttataagcttctatgcaatagaagtaatcttgatccatcgtattgagcgagacgccatactgaattgtttttttctatctcaggagctgaagtagcattgtattgcgcaaaacaatttcacattgagctatgcaatcatgaagactatcacaacgatctgattaatgcactggacaatgtgtttttaaggttattttggcctactttacataattttgtttatagctgcacttggaaatgtgggatatcattgttcgtgtgattgctgcagcatggatgagaacctgcaacagtccgatgcttggagagagttagttattcctcatgataatggatgtatgtattttctcaaggctggtgtctgtgctaagcctttcccacaggtagtaatcttttaacccctagcatcctcaaatattcatgtcgtgaagaagttactcaaaattgtatttgttggacagtgtgcatattgtatctatgaaaaaggaaatggaagaatgtgtttgatatcgagactgttgttctttcttgtgttgtactttggagttggaggagatatgtttaaccctaatctcgactaattgctcctattaaaaatggttcaattagttacatatcaattggctggtttactgagttggaggccaacaggttcttaagttctcattgcaccttggttcttatcatactatgctatccaaattgaggtattgtttgcgatatcccttcgatggttatttctttcatacattggtttggttttcagaaatgtttttctatacctgttggctttcttgagctattttttggtagtcttttccttctaacaatgttgtgattctgtgttatatacttcagtttggttgttgttttcccaggcgacatatactgggccagcgtatgaagggagcacagcatgtgtggttgtcatcagaggtaaccaaatgattgttggacatgttggtgattctcgttgcgtactctcaagacagggtggcctggtatagtgattgtttccctattgaatttctggttaatacctaatttgcaagctcgttcattgtggcgcctaacatttgtgcttgtttccattttgtcaataggctattgatttatccttcgatcacaaaccatgcacaagaactgagtctgaaagagagagagttcaaaatgcaggagggagatctcttggacttaggtgtgaacaagtaatggggaattatgtagtcaaggaacaatgggtcctcggtgattttgggggaggtgtaacaatctcaagatcaattggtatagtcttgtctggatctgtttttcattgattgcatgtaatagcacaaaaagaagcacattacactgtgattggcgttttacctacttacatttcaggtgactttgctttcaagaagaacaaagatttagatcgtgaaaaacaaatgctggtatgtgatccggacatcctcgctgtaagtgtaactaagtgtaaataggtccgtttggtagaatatgaagttcagttttgccgggttgggatctgatggaaaattgccctttcaatgtcaggatgacataactgatgacatggagtttcttgttattgcaagtcaaggtctctggtaagtggtaactcttcagcaaaaaatacctgtcaataactattggatcatttttatgtcaccagtactcattggcattctcttttttttttttcctcctatttggttcatatatagtttcactcatagttccatactaattgcattgactactgtatattttccccctgcaggtcttgcgtggacagtgcggacgtggtttcttacatacatgaccgtttatcggtggtgagtcttttctttccctcagtttgtcttcttggcaggacaagatatcttagtggtgttaatcatgctatctgttctaggaaatgacttcaatcaagcaatgtaaatatcctgattttctcttttcttttaaaaaaaaactgtgtaagccctaaacctcacaaaaccatttgttagtttagcactgaatatgcatgcctggctgacaaactgccatctgctttgacttcgattctttcgctgttaaaactgctgttaccaataatgctgtgaccaattaatattgctatgcaggagggtgcagagctgcgtgtcatctgtgaggaggttgttgagttcggcttggcatcgggcgagaacactaccgtcatcctggttcagttcaagcccggcgccttccagtaccagctggtggatcccgctggatttggcactgccgtctctaacattgccagcaccagtgctgcgccggctggtgccagcgacacaagcgacgagggcgtcgatgacgctgccactgccaggcccaccgttatgggctacgacgcggactccagcaccggcagcgccgatgccacggtcgacagcgacgaggtcgatcccaacgccacggctgacagctacaatcccagggggcacgctgagatcgttgccagccacaccgacgacgaggtctacaccagcggcagtgccagggttgagagcggcgagctcgccgtccccactcccagcgccaacaacaccgtcgcggatgaggtcaaggtcgacgccgctgtcgtcgccggcggcagtaccaccgccatggctgctgacgaagccaccgtggtgtcgttgttgtcgaccatcgtggataactactactccattaacaccagcgaggagccagcgaggaggttgatcccactgccactgtcgcagccgacgacaaggtcaccaacggcagcaccagcgccacggccggcagcaagctgcacaccagcgattcttcactcaattttgtcctggtcgaagatgatgtgtgatgatgcgtgcaccgctgcatgcgcaggatgatactgatcctaggtagcactagtatcgtagtagtagaactttgctttggtaggatcggaatagttggtttctgctacccttgtttttggtttatgcctcctggttggtggantgggtaggnnngcccccccccccccccccccccccgattttgcttgccagactcggttaattaatgaggcacttgaatggtttttgagttttcaaagtacttaatctagtgatgcttttgttgacctccattttgaatctctatacatgctgggtatgaactacttctctgttcccgattcgggatcaacaaacaaaactgtcctgatagtcctagatagcagcaatagcttcaaaggttcagagcgaacgaaaataattttcaatagtgctggcacatgttttttcagaaacatcgagtggtctcaagtctcaactcttcaaatcgaacaactgctttcttggatccacatcaacaaaataggatgtctacggtctacctaccaagatcagcgctagtatctacttcctccgtttcacaatgtaagttattttaacatttctcacatttatactgatatgaatgaatctagatatatatatctatctagattcattaacatcaatataaatgcggaaaatgctagaatgacttatattgtgaaacggagggagtacttccttgtcaaatcttcgtgccggtgtggaggccgacaccagcagagggaggtgacaagtggtggcgcgggcgtagagcacgggagtataggggatgtgccaccgtcgatccgtcgtgccggaaggtggatggaaaaaggaaggaggcgcggccgtcgcgccggctcgaagtacgcgaaaaaggaggaggaggagggagcgtcgtgccatgcgggctgtaggcattttgtgcctgaaatcggcccatggtctgaagtaggccgtagcgggctgcttcttgggtcacggttactctttcagctcggcaacagcaatagactcactcactcacactcacggtcacaccgatttctccctaggcgaccataccggaaaacccgcgactccccaactccgacgagaacgacatggacgccggcggcgaggaggcgaagcaggagcgccacctggtgctggctcacgagctcttcctcctctcccgccccgacctcgacgacctcgccaatgtcgccctccgctccgatgccctcgacgccgtcaagtccgatggcatggcgccgctgttcgagtcgctggccaccgcgggcgtgctgctcaagccggacgacgcagctgctcgccgagatgcgcgcgcggatcgacgaggaggtccgcaagctcgacgagaagtgagtggattcttcctctcttcgattttatttctagccccacaaaaaagaggtcgcccgttgctgtgttgcgtatgcctgcagtagtactatgtggggataggttttgtgataaataactctggtgttgatatgatccgtttgcctaaactaacctagcttgctctcggtgcggaacatggatgctaaagctggtagacagtggcgaagctagagcaaaatggaggggggttcgagattttgccacaagtatatcaatatatataacttcaagctacattttcgatagaaccgttgattaataattttttacatcaacagtagagacacacatgcatcaataaaataaaaaaagtgacaaacattgtttttcaaaattaagaaatccactaataacattgataattgagaattggttactaacccatgagcaaaagatgatctgcatatgcaaacataagcaaacaccattctatttcattatctcaacatcctcgacgatgatttgataacctaaaacaagttaacatcaaaatcagttctcatttttcaaataaaaagtagaatccagcgcacttagatacaatcattaccttcaatcatcatcaaatatgcgtccttgcattttcatgaagcgacgaacaacggcctcattggtgactttcttcatttcttctttctccacataacaaataaggctatcacttaagtactcatcaccaattttattgcacaaatatgttttcacattcttcatagctgaaaagcacctctcaactgtggcagtagcgacgggcaatacaagtacaagttttaaaagttgataaaccaatggataacaaagatgttttcttgtctccaccattatttgagaaagctcggcaatagtttgtatgttggagaatctaccatcatccctcacatcagcgatgtagagaccaagttggtggctaaggtccctcaaatttccagaattaaaatcactaggatacaattttgctaaactcatcaaattctctagattgaaatcatgaaatgagtctcttggactaaaagccgatgagcaaataagcaattgagagcttgtctcactgaagcgattgtcaagctcttgaagtatccaatcaataacatcattaaaacaatccacttgatagtaatgcttgtttgtaattctagatttgtgcctacgcttcttgggatcaatatatgtatcttccatttccaatttgacaatatcatacttgtcacaaaagtcagagacttcatctagaactttctcccacttttctcttctaagctcatccaaattgagcctagttgactttacacatttcatagcattcactatgtcttgatccttccgttgcaatgctagtgacaagctgtttgtgattgttaatatagtcaacatgaggtgcaaatagaagacaaaatcaaaagattggaagtactccaaaagattcgatgcttgatctctaattttccaatcatttttgtctttttccacaatttctagcactttgactattgtagcaaacatgccaaccaaacttttgagagttttatagtgggaactccatcgagtatccccaggtctctgaagacattgctcttgattcaacccggttctagtttgaagttgcccacaacccaatgccttactcatttctttaacattaatatctctaatcaaatcccttctcttagatgatccacccaccacattcagtaagatggaaatcttagtaaaaaaatcactaacgcctttatgttttctcacaatagccacaagaacctattggagttggtgagcaaaacagtgaacataataagctgaactattttccctcatgatcaatgattgcaaaccattgaactcacctcacatattgctagcaccgtcatatccttgccctctaacttgctttagacttagcttcagttctgcaaatagagcatcaatagaagacttgagataggcagaagttgtttcagtcacatggacaagaccaacaaatctctctctcacaattccatatttatcaacatatctcaagaccactgccatttgttctttgcaagaaacatctcttgattcatcaactagcaagcaaaaaacatcatgcccaatttcttctagaatagcatgtagcacttcctttgcaaaacatttcacaatatccctctgtatttcaggagcaaccaaaagactgttatctgatttttttgtacctattgcctttcttaaggatgggttttgctccgctgtgtaatcacgaaattccctgaagttgcctctgttgtagggctcctttgactcatcgtgacctcggaaaggcaatcctagctttactagcatcctagcaacatcaatggacccattcaatcgagtaagatagtccctcttaccagtttctctcacactatgaaaagcaacatcaatgtgctggctttttttgtaataaatcatcacacttcttcattgcttgatagtgtgaaccaccgacatcacctacatgcaatttcaacctttcttttctatgaaaaccattccaaccatttttaacaaatgcttcatatccaccatccttcttttctctaaacaagaaatagaaaaaacaatatgctcgatttttggactcactgtattcaagccaacttccaaactcatcaaaccattccgggacaaaccttcttgaacctgtcataggaaaagcaaatgtgcgaggttgacaagggccattctccaagtatttccttctcaccctctctctgagattaggatggtactcatcaatttgttttcttaatcctggatcatatttaatctcatcttcccagtttatatcatccaaacatgaattacatgcattgttagcactattcggctctggcactttccttttgtaaaatcgttccatcaattaacctatcattagatgatttaggaggatgtaaatatatactgattttatcattcattcaagtacagaagtagaatgaaaattgatatgacttacatccaaatagcaccttcaactcaaattctcaaatttccccccaatctgcaattttattccaattctgaaggattccaaattgaaccctactggcctcctaattctacaatgtaaaaaaaaacaaccaataaaaattttaggcctttgtatctaataaatcaaattgattaaaaaagaaatagatgaagcatgctttcttaccttgtctctactaacgcacaatgtggctgtgtgctgatcagttgatggagatggatgatgtcattgttggcttcatggcttgtgaaagtgtggtctgacgcttgctcctggttagctggttgcctggcgaccggcttcctgccttcctggctcctgcggctggagcgagcaacgtaggcactaagcaagcaggggcgacggcgacagcgacagtgagctgccgagggcgacggccgacggcggcgcgtcacgatgccgagatgggcaagtgttgtctgggagactgggattggctgattgcagagcagtggcgtggaagccaaacagatgcgaggcggagtcgtcaagattggcagcgacgggacgcggcatacgagaagtcgagaagagaaaagattgatctggattcgactctcctcatgggcttacaacgttaactggactgttgtttggactgtgggtgcactatattgggccaaggggggtgcatatagggccgagatatgggggtaataactaaaaattttgtttgaggggggttcatctgcacccacgggcctctattgggcttcgcccccgctggtagatccgtagatagcttgcatttgatttggtagttgtaaatttacgaattatgcttagggtcaattcacctctatataaatctgtactacataatactaataaactttctccacagttttgttttagattcatgtacatattgatgattttgtacattatctctgcaatgtgtaatttagcatgtagaaaagtaattgagattgctaaggatcacaatgcacaacatcccaactgatacgaataatttgtgtgtcccttttatccagaaaaaataccagtgtaaactaatgtgaaggaagaatggcatgttgaacttcgttagtaatatggtatcgatttccttggtcgctactttgttgtcctaggtaaattgttatacatgctcggtgtctgtatgaagtgcatggcaatgcatccggaagcatcagctgtcgccccatgtcttcttgatatgatcagatctaggtatgccaagcctaaacaaacatttccctgttaaggaattttattggtaagttaccattttgacatcaaattttgttctatacagctgtttcacaacatcctgaagcatcagaaggtctgtgttgtttgcagctttttgcatattgatagtgctgcacccattgtatgtctcatcagctcttatagaaggaaatcgggacatttcaactggtttggaattgatacacatatgggctcttcatgttgcagaagctgatcctgatacagaatgaatatcagtatgtactttggtcactatggggggatatatctgttatgaatcaccgatttgcattttgttcgtcaaagtagagcaattatagtacaataggctcagcacataatactaatagggtcatttttgaaccaacaaagaagtacagttgttcagggtaaacgttatatcaaattcatttgcatcgtctttgattttaacctgaaagaagagtattttcactgtgagataattcactatctgaaaataaagagctaataactcccaccttatgctttagtttcctgtaacgtacttctttctatcattccatttggtcttctattatactcaaccagtgatccagctcttttcagtaatgtgtagagtaaaaccagactagttttttgttcaactcataattagaaaaccatttcagtacactggaaactcagtaacttctcacattgtcatctaactcttccattgtcatgtttgtctccttgcaggcatcatgacctgtttgcaactctgttccgagatcttcagacatcatgagcactgaatcagtggatcgcagcatggccaggaactgcaggtctctgccttttaagcttgataccatcaaaatgatcaatgtactggactagatatataaatcgattgatgtatttggtttcggagtgctagatttttcgtcattcatacatagaacatgaattgatttacgtgaaacaatttatgtaagtcttctgttccagattactactatgtttgaaaactttgaactgattagttgagcaaaagaaaatttacctgtggatgggtcatgcagggcgagaggaggaggaggagggcgtgtgctccatggggaccaccagccacagaacggggcactcctggagcgttggatcagctgcgagggacaatccgacggccgagatgcgtccagtgcaggtatttaagcgcaatgctgcttctccttgcgcggtttgctgcacaaccactttctgcttctccctccctcacaggctcacgcattctcatctcaagagcactagtggcgaaagataaagggcaaatgttatatccaattccgtctgcatcgcctttgattttagcctgaaagaactaataatttcactgtgatatgattcacaatctgaaaatgaaagagctaatatcactcatcatatgctttaattttcagtaacctactccctcctctcattcctttaatctaatgttatactcattcagtgatccagctctttcagcaatctgtaaagaaaagagatcttcaaacgagtagattaacaaaagcgtaaagtgtctagagtttttggaggcgtcaccctaaggtggccgtttttcttttcttttggggggcgttagctgcggctagcaccctgctcgactgtctaaggtcgattctgtaaccttcgtgacaccctctttcttcttaatacaatttgggcgacctctttcggctgtcccggcaaatctgtaaagaaaaacaggacctctttttaccttataaagagaaaccaatccactaagctggaaacgcaataacttttaacactgccatctaactccattggcatgtttgtcttgtagatggctatgagctgcatgcggctccattctgagatggcccttcagacatcacgagcactggaatcggcggatcacagcaagaccagcagcagcagcagcagcagcaggtctctctaccttctaagcttgataacatcatcataccatttgccaacatgatgtgatcgatgtactggattaatttgtaaaaaaaacttatattatcttgccatgtaatattacaaattccagttcagctaatcctgctacagtctacatgatttttttttgtctgggatttgaaatgttagaattttggtcatccatgcaatgatgcaaaagaacatgacttgattagtgtggaaattgtatggaagctgtcatgttccagattaggagtatgtgtggaaactgtactcagattgatgaactgactagttgatgatgagtataaaagagaactacacggggatgagtcatgcaggctgagggatccgtggggaccaccagccacaggatggggccactcctcgagcgttggatcagccgcgagggacgatccgacggaggagatgcgtctggtccaggtatttaagcgcaactttttttttgcccttcgcagcacaactgcacaaccacttttccgcatctctctctctctctctctctctcgtctctctctcgcgcgcgcgtctcaagagcagcggcgaaaggtgagaggtgagatctctctcccacttcgtcgtcctctcctctgtggtttcgtccgccgcctccatccctaaaccctacttcttctccgaaagcgccgtgagattcttctccctactcttcttcgatcttgctccattggtgcggtggtggtgtttgtttgcttggtgtttcgtgtcgcggtcctctcgttcttgtcttcgctgagtggcattgatcgagcggcgccgcgcgtcgaactcttgcttgaatctggaggcgtctcggtttccgaaacttgaacctctttaccgcgctatgatcctctttgtttttttttttcgtgttcttggcttcctgtacccgtgatgttgctgcttgatggttgatgcatttgaggcgtggttttcttagagttggatgagaaggttgacgagcaacggaacttcatggtggtctccgactccgttcgcctctctcccatcggagcatgttgatgttgacagttcctggcgcgaccagtgcgtgcgcgagaagttagacgccatgaattcgtctcttctctgatttttttttaattttttcagttctgttttggtgtgttcttattatttttgctgttcctgatgcaatccgctcgtcttccttacgtcttggtcaagtagcaccgcgcctcgttctcttctcgaattttaaggcgtttcggagtccgaaatttgctaagattttacctggcagtgatcttttttcccctcgtgttcttggcttccgtacccgtgttgtactgttgcttgatgtttttgaagttggggtgtgcgtgggtttcttggatgagtttgatgagcaccgaagcttcatggtgatctcgttcgcctctcctcagaacacgttggtcttgatcttgccttccgtttctctatttgtaccagtgcaagcgcgagaaattagaccacatcaattcgtttatcttctctgcttgtcttttcagtttgctctgttttggtatgttgccgaagtgccagtttctgaatttgtattagctagatgccttcttctgttcatttcgctgttcctgatgcaatatgcaggatgcttcttctctacacgtctcttctgttttctgcctcgaaagaactctctgtcctattgtggctttgtttactcgatgctattttttcgttcaatgatttctgcatgtgtcgctccattgaattgcttgtaaatcttctgattctttacctatcaaagaaacttccatctcttgaatcttgatttggcttccttcccccttaccgagcaattgtacttttttttcttgtcttttacctattttttacttctctgtgatagtgttcggtgctgtactgtaggttacatgtctctggttttcttcttcttccgtccatcatactctgtttggaatttctttaagttttgactcgctgaagagatgaccatatctagaggaaattgatcatccttgtacagtacactttatctgttgtttcctcttcttttctcactttggaatttggttttatgatttgtgtctgtaaagcttatatggcgttcatagaaaaccttgtgtgtattttgttcacagtaatatttcaattccttgcttaattcttgtacaagataagatgtaggtgtaaaatactgcaacgctgcaactgaaatcactattaacaccctgtgctttgcgctagataactagtgtcgtatcaagtctgatgattctacctgactttatttcatatgtaaccaagctttctggcatttaatcgatctgtattgttgtttaagtgtattcactttattctttccccgtttttgtcaataatgttattgtatatttgtattcatgttaaattttcagcaaagcaagctccactatgggtaacagccttcctgtagaatcgaaggtcactgttgaagaagaaaatgatagaattaagtatatcgtgtcatctatgcagggattgggtcataaaatggaagatgctgtgagtaaacttgcagccttttgtattacaaaaattaggatagttctgccaaaaaattcttattgatctgtaagtaatttgtgtaaaatgccgagactgatatacgctctccttattctctagcatgcagctattctaagtcttgatgataccacgtccacgtcattttttggtgtttatgatggccatggaggtttgcttcattgtcatcttttttgtttcaaaccctccaaattgttggcgtaactgcttacgtcatgctatgtttgtctgtgtgtatcacatttttatctttgtgcatgttttgaaaacttagctgtatatgttgaaacttttacctgtcaattttcaaataaatatgatgctatagttaaggataacgaaccaagttcagtaatcacattcgtgcggcatgcttgcaagggtaacctgaactacataaaaggaaattttaattcatgagggataaaacaccgcatgaatgtgagttaatacaaatagtcatgataattaagaggataatcacagattaacaggttggctaactctattttcttatgaaacctgttaaagtgatgttctgctactagtgttcataacattgttttaatttataagcttctatgcacatagaagtaatcatgatccatcctatcgagccaccatactgagttgtttattttctatcacaggagctgaagtagcatcgtactgcgcaaaacgatttcacattgagctttgcaatcatgaagactatcacaatgatctcaccaacgcactggacaatgtgttttttaggttattttagcctactttatcattttgtttatagctgcacttggaaatgtgggatatcattgttcttgtgtaaatgctgcagcatggatgagaacctgcaacaatccgatgcttggagagagttagttattcctcgtgataatggatggatgtattttctcaaggctggtgtctgtgctaacttttggcctttcccgcaggtagtaatcttttatcccctagtgtcctcgaatatccatatcttgaagaagttactcaaaattgtatttgttggacagtgtgcatattgtatctatgaaaaaggaaatggaagaatgtgtttgatatcgagactgttgttctttcttgagatgtactttggagttggaggagatatgtttaaccctaacctcgactaattgctcctattaaaaaaggttcaattagttacatatcaattgctggtttacagagttggaggccaacaggttattaagttctcattgcaccttggttcttatcatactatgctacccaaattgaggtattttttgcaacatcccttcgatggctatttctttcgtacactggtttggttttcagaaatgtttttctttacctgttggctttcttgagctattttttggtagccttttccttctatgttgtggttctgtgttttacacttcagttttgttcttgtttttccaggcgtatactgggccagcatatgaagggagcacagcatgtgtggttgtcatcagaggtgaccaaatgattgttggacatgctggtgattctcgttgcgtactctcaagacaaggtggtctggtatagtgattgtttccctattgaatttctggtcgttacctaatttgcatgctcgtttcttgtggtgcctaacatttgtgcttgtttctgttctgtcaaaaggctattgatttatcctccgatcataaaccaagaacaagcgagtctgaaagagagagagttcaaaatgcaggaggaatatctcttggagttgattgtgaaaaagtaatggagaattatgtaatcaaggaacaatggatcctcggttactttggggaaagtgtaacaatctcaagatcaattggtatagttttgcctgagcctatttttcattgattgcatgtaataaaaaaaaccacataacactgtgattggcgttttacctacttacatttcaggtgactttgctttcaagcagaacaaagatttaaatcgtgaagaacaaatgttgatatgtgatcctgacatccacactgtaagtgtaaatatgttcgtttggtagaatataaagtttgttttgccggggtgggatctgatggaaaatggccctttctacgtcagcatgacataactggtgacatggaatttcttgttatagcaagtcaaggcctctggtaagtggtaactcttcagcaaaaaagaactgtcagtaactatttgatcattttgatgtcaccagtactcattggcatgattctttttctcctttttgatgcatatatagtttcattcataatttcatactaaccgcattacgtactgtatattttttccctgcaggtcttgcatggaaagtgcggatgtggttgcttacatacatgtccgtttattggtgagtctttttttttttcctcagtttgtcttcttggcaggacaatatatcttattggtattaattatgctatctgttctaggaagtgacttcaaccaagaaatataaataacctggtttctcttttttatagaataacagtgcttatcccctaaacccccgaaaaccagtactttgtttcgcgctgaatatacatgcctgactgacaaactgccatctgctttgagtttggattctttccctgttaaaactgctgttaccaatattgctgtgaccaattaatattgctatgcaggagggtgtagagctgcgtgtcatctgtgaggagcttgttcagtccggcttggcatcgggcgagaacacgaccgtcatcctggttcagttcaagcccggcgccttccagttccagtatgagctagtcgatcccgctgcctttgacactgccgcctctaacgttgccagcaccagtgccggcccggctggtggcagcgacagcgacacgagcgccacgagcgacgagggcgtcgacgacactgccactgccgggaccaccaccacgggctatgaggccggctccagcaccggccccggcagcggcggcggcagcgccaatgccgcgttcgacagcggcggcgacctcgccgctaacttggacatcgccactaacttcggcagcgacgacctcgccgctaacttggacatcgccacggacatcgacaccgaggacgtcttcaccttcatcaacagcgacgacacgttcggcatcaacagcgacgaggtggagctcgatcccaacttcaggcccaagcctcaggtccgcagggcccacgacggcccctctcccactcccagcgaaatcgaggccgacctcaatgccagccccacgaggtacaatatgagggatatcttcgaggccttcgacaaagtcgaggccgagttgggcggcttcccgttacagggccacgatgtctccagcaccagcaccaaccccaacaccgcgactgacactggcagtggcagccgcaccggcgacgatgacgtcgacggcgccattgccagagccatggccgtggctagcagcgtcatgacgggcgcgggctacgaggtcgactccaccaccaccaatcccagcgctgcggctgacactggcagctacaccggcgacgagatcaaggtcgacgacagcaccagcggcagtgccaggggtgacagcggcgagctcgtcaacaacgacaccaccgttgctgacaacaatgccagtggcgttgctgacagcaccaccgtcggcgacgaggtcgatcccactgccactgtcgcggccgacgacagcaacaccggcgacaaggtcgatccccctgccatcaccaaagccacggccgacagcaacaccagcggcgaggtcgacgtcgacgccactgccactgccactgccagcgccagcgccgccgtggctgatgacgagggcacggctcctgatgacagcgagggcagcccgtagatgcatgattcagaagaaagaggtcaccggttcattacagcttccactcaattttgtccaagacggagatgatgtgtgatgatgcatgcaccactgcattcgagggatgttactgatcataggtagtagtagtagaactaatgcattgataggatcggagtagttggtttctgctaccttgtttttggtttatgactcctggttggctgggtacgtttggggtaggagattttgcttgctagacttggttactgagaacacttgtctggtttttgagtttttatcaaagtacttaatctagtgatgcttttgttgatcttcattttgaatctattacacatgctgagagctgagtatgtactacttgctctgttcccgaattaatgttctcttggatacgtaatcagtaatgcgcttggtttggctgattacctctcttctcttgtctgaactgaagagaattgcgtgctgaaaccggctctgaaaatctgaagccggcctatggcatactccagcaccgcaacagcaacggactcgtcactatcaatataaggaaatcgggacatttctactagttctgcacatgggttcttcatgctgcagaagctgatcctgatacaaaatgtacgtcagtaagtgttctggtcattatggatcactagtttgcatttcgttcgtcaacatagagagcaagtatggtattggctgagcgcataatattaatagcgtcattgttcaacgccaaacaaagaaatacagttgtgcagggtaaatgttataccaaaattcatttgcgtcgattttgattttagcccgaaagaagagtaacttcattatgagctaacaactgcaatttgggtcaattagtactaaaatcaacccaaatactataatctactctctccgatccccaaaactctcttgcttcgtgctgcccaaactcgcaggaccaaatatttatgtccgaggtgatctcccttgtggcagacgaactgtatgacttgggaacaaatgctatttcgctgtcacgtataacaaggtcgacatggatggtctcgggccagtcgtacagcctcgggaggaacaccttgttgtgcatcaacctaagcttagtcttcctcaacatcgtcgtgtatgtcccggtgaacaacgcatgtccttccaatgaccgcatcttctcccactccatcgtctcttcattgagcttgacgacatggacaggcgcaccactgtagccaacgaggacagccatgagcgcgccagcttggtcggactcaaacaggtggctatcgacttggtgttcgattccaaagctcccaggcttatcaagaaccttaaaactatcgccatggttgcacggatcgtacaccgcgagctccccgtcttcgccaagaacgtacagcaagccaccgtggagcaccgggttgctggtcggtgccgccagaatttgcggtccgaagcccgtcaattcccagggcccccattggccatcgtcttgttggatcgcacgggcgagccgtagcgcggacgtcgtgttgacgcaatacatccttcgcgcgcggtcgtcgtagacgatgaaatcgggcgacgagtcgaaaggcggtgtcggcttcggcagctcatggatggtgctgccggcgagtagtacgagatcggcttggaggatcgatttaggtgagcacagcgtgaggcgtcgtccggtggagcagcagatcctagcgttaggcaccttgacgagcgtgtcggcgatctggaaacacttgtggtagtaggggctgtagtacctggcgctcgtgacgccgacgtcggcggcgctcaggaggagaggcgtgatccacgccgggtagaagggcgacacggcggagcgccagtgccggcacgtcgacgcgaagctggggtgggtcgaccacccgagccgatattccaggacgagcacgagcatgtccaacgggagagacgaccagtcccgtcgtccttgcgccgccgtcgcggcggccgcctccatctgtcgatctctgcttgcgcttctttttgcggtgctcctcacgcgagtcgcgagagttcgtgcctgcatggcgagctgcgttttgtgctgctacggagctctactttcatggcgtgtttcctccggactcgtattataggtcggcttcagctcggagattgtataccgccccagcgccccggttggtttttgttggtttgctacccactctccatatatgcaaagtatttagattttgcttttgaattgggttgatagtttgaattttgatatcgtgtaggaactcatgtttccttttcctgatctacgggcggtgcagatgataattggtaggagtactaattgtaggtagtggacgtgcatacctctttcctatgccaatagttatttataaggactagcaaatatacccgttcgttgcaccgggtgaatatcaaacaaatatggatggttaagattgcttgtgtacttataatacatgtgcacaaaaatattgaatttgtacataccttgcaaatatctccaagttttatacaggaaaatatcaaaacatatctcatactgtatacatattcagattcaggtcgtatctcaaactatattccaaattttctacacattcagacaatattccaactttcacaaattttcataaacgggggcagttacagctctgaattcaccatgctctacaaaagaaaaatggtaaaggcatctgcaatgggaaagaaacacacactttgtagtatcgaaataaaattcactcaaaaatctttagtggaatatgtttgaattctagaaataatttaatatttaaggaaataatggggcgttttggtttgataccaaaatattgccatatcaattttttggtagtttaaatagtaaatatgatgatttggtttgaagccaaatgtttggtaatgcctatactcaatttggcacaattctagaatattcttcatcacaatttaaaatttggctctcaattggcataaatccaaagacactcatttataattctaccctaccaaaatattggtagtgtcaaaacttgcctagagtttggcactaccaacataggataataaaccaaacaagcccaataattattttgacatgaaaccatattaacttggtcaaatacaatatcatatgattaatactttctagataaattttttgttggtttcatttatctaaaaataatctatgagtgattaaataattaatcgtaatttcccaacaattttaaatggcttaaaatagtaccaaacaaatttctgtaaatataaaaataattaaatcagttgcttagaaaaataaactgattttggcctagcattgtggtttagggatgaagatttggggacaacttgagggaccaaatctgaacttatccgtgcgaagcatacacgtggcccaattgtgtggcggcctgggaacggcaacccgacgcgggagaagccacactcgtctgatctgatcaacggtcccgattgatccgaacatatataaaaagtcggcagcccaaaccctaaccctaaaatcacttcccctcccttctctctctctcaaacctacggcgtcagcggcgcctctccccttccgccgcttcccctctccctccccaccggcggcgccgctccccttccccctccctccatcagcaacgccgctccccttcccctcccccatcggcagcaccgttccatctccccctctccctcccgtctcgctagcatggcacagtgttgggggacgacggcgacgacgaccatccttccatttcccctctccccgtaggcctcgatggtggggctacaagcctatgacacggagacggcggcgacgacagtccttctctctttctctcctctgtctccgagcaagaagagagcgccggaaggtaggtcgccggggtagagggagggggtgtgtaagttcaagtgccttaatttggtttcggtgattaatgacaaatctaattatatgagactaacgtttttatgagtctttctttgactagtctcatttggatatgaaagtaaaaatgatgagaggtatgtattaaacttcacatattctaacttggtctctcttgtggatccaaaatatagtgtgagcttcctatttgatctttattgattatgtgcatatgcgttccttcatatgcatatgtatgcacatcttgagggggagcttattctattttttttattataagatttctatcttgatttgaaattattttttatctcatctctctatattgtttatatcgggttattatccatcaccaaagagagaaaagattgaaagatcttggattaaacaatttgtgtaattgttactttggtgatagatgataaaccgatgtttatgggattaacttctcttttgtataagttgtctactaggttatttcccgataatgagatgtggaagacatgcatttttttgtgatggaccttaatcatgacaagaatgaaatgcatggagataaaacgatatataccacttcttatctcctacgttttgatatgttcatatatatgatttccatgttattgatatataagtgtgagactaatgtttactcgaatgttatcttatttagtctcatttacattgagaacatggagatcatgaaggtatatgttttatgttagtctacatcattactacatatgtcttctctatatgtataggataaacccccattggtcattctctaattatgcatacacttgcatctcttgtatatttatttgtatgcatatatttagggggagcaaatcctatacatttattgtgcatgttctagatccatgttgttcacctattatttatatcggatctttgcacttgagcttgcatacgagtatatgacacttgtgatgttaatgaatactcaacaaacatatccatatatttcatatgcacccggttggtcatcaagtgaaggatgacaaccgatttgttgagactaatgttctcctttgaggtgtgaaaaggaataggtcccactacgatgaggctaatgaatgacaccatgggttagtggtcaccaagccaaggacatcatcatgttggcaagaatgaagtcaagcttgtgatgagaataaagtcctgacaaaagatggacaagacctcggcataaacatggttcaaccggatggttacaagtgttgatctcggctcaagcttgaccccaagatggatggcgcaaggcaaaggtataatgtagctaagaatgttttcttagtcttttcccggtcttggtgtttggtgtagaccggatttgctagataggcgccgtactatcaagaggggtctatgaagcgagcttgtggatgatcttgtgccatattagttcctatgcatgtaggtgcattttgtgggcttgtctaaccaagtgtgatgagttttctcaagtcctaaaccaagagagaagtgggcatgtcaaataggagtgagtgacatcttgtgggtatgtccggtggatatcctttggagtgtgagccctttatccttgacttaagttgtgtttcttggatggatttttcatgggttggatggccctttgaataagctttccatatattccaagaacgccaaattccgagacccgagtcaagagatatcgccgttttactaacggtcggttgagctgaaaagtgacctgcggtctgaccgtgggccttaggccggtctgaccgggtctgttagccagtctgactggcgtggtaaggccggtctgaccggccccattggtctgttgcactagtctggtttttggtggcgatacagagccgccagagccgcaaccggtcagaccgagccgacagcagtctgaccgagccgtggacggtctaaccggccactacactgcggtcagaccggccaggttgagtgggctcaatgattgccctgtaacggctagttttctagccgttacaaagtagtccggtctgaccggcatcacaacggcggtctgaccggcagaacacaaagttggggattttggttccaacggctagttttgatggttgggggtatatatacccactccccagcagcaagggtaaggttttggcactccattgcattatcttgaacccttgcaagagctctcacacccttgtgcacttagtttatctagtgaggtgttagagagtgagttaagtcaatccaagtgcattgcttcattgttagagctagtgtggcacctgatcatcctcggcaagcatcctagacttgttactcttggaggttgccgcctcctagacggcttgtggaggtgttgcccggtgacctctccgaggagattgtggaggaggcccggcgccggttgtgagtggtttggagttcaccaccttcggagcgaaggaagaactacccctagtgatcgaggcttgggtagtcctctccgtgggccggctctcaccttgcccaccccttgacgaagggggcgtgcggtggcttcgtggttgagcggtggagttgggctcgcctcaacggggattaggaaaccggcgagtttccgaacctcggtgaaaaattccttgtctcttgtctcatttattttctgcatttacatttgtgcaatttgcattcatagagacatatttgagcccatatcacctaggtttgcaaaatttaacttagttgcttagttaaccttgcacctcaccttgcctagcaacttaggttagttttgtttaagtgccattaagttttaagaccgcctattcaccccccctctagtcggcctccttgatcctacagggtgccgtgcgcggttggggatgtggtgagtgtggccgtgcccggcgggcgaggccatgacaggagcgcggtcaatggcaatggtgactgtcacaccctgaagttctttcccaagcctaaattgaagttataaatggtctcaagaaaataccagtgtaaagcaagagtaaaccttaataaattaatgcaaataataatcagatttggcatgtgggatttttcttgagttctaaatgtcgaaatacgctaacaagatttttagtggaattttcagagctctagaaataattttaaccaattaaaattgagcacaagcaatatttaatcccaggaaaatccatttccttccttttctttttcttttcccctttttttctttcgaatgggccgccggcccgttctctctccctcctcttcttgttgggccggtcgaaggccgaggcccagccgagctgagccagccgcccgcctccctctcccggggttgccgacaggtggggcccacctgtcgggcccgtccccttcctccggccggagccgccgcgccccgctcccacgtctcccgggccacgtcgcccacgtcgccctcgcgcccgcgttccccgcgcccacttcccctctctcccgcctgcgcccgcgctcgagacagccgggattcgattttcgaatcccgcctctctctcctctcccacttcccccacgtcggccggcgattccctcttctaccggccacgtccgagctccctctcccctatttaagcatccccactctctcctctctctttttcccatttcgccaagctctcccgtgccctctatcgccctagcgtcgtcaccctcctctccgccgctgccgctgctccggtcgccgctagccacctctagccgccgtgccgagccgtgtcgtcgacgccgtcgcgttcgccgtcgtgccggccaccccgtccacccctctcccgtcggattccgccgccggaacccgctccacgccgtgcgccggtgagcatcgccatggccgccgcccttggccgccgtcctcgccctcttccatctccctctccctctctaactcctttcatcgtgttcgctaggtggttccggagatcgtcccgccgtcgccatcgccctccgtcgctcgccgtcgtcgcttgtcgtcgatgaggcacctcctcctctttctctctctctctctctctctctctcccgcaccatctagtcgccgcgccgccgcctagccgcttagccgctgccagcgtcgccgcgccgtcgcgccgccgccgcttgccgtctgccgcgccgccgccccgcggtagcgccgccgtgcgccatggccgccgggccggctcgagccgcccgtgcgcgccggccgcgtgctccccaccgccgtccgatctaccctcgggtagttcggggccgtcggttcagccgcccgcgtggcgtgccatgtggccgccgcgtgtgcgccacgtcagcgccacgtggtgcgccgctccttccccggtccgtggacttggtccaccatgaaccgccctccccgagtcactgccatgtggggcccgcatgtcggcgccgcccctctctctctcccgtgatttatttattgcgcaataattcaattaaggatttttctgtttatagtaaaaacacagtgaatcttctaaaatttatatctaattcatccaagctccgtttaagcccattgaagtctcagtaaatcaataaaaatgtgtagaatccattaaaaatggttttgttctctgtttcagtagtcttatagcctgtttgtattgtttgctttgtatgtcgcttagattccggctctccccacgctccggtgtactttgaaatagtcgccgaggttcctccagcagtagagcaaggcaagtcatgcttgtcacttgaacatgttgatcctatattgcaaatgctccattgttttccttcaaatactgcattgttttataatattaccatgggaagtttacctactgttatagccatgctattttgtaccatgttcctttgttagcttgggatataacatgactagagattggactagggatttcttagccttgcttagttcaactagcacacaatgggggacaacattaatgcatagatatcagattctaggaatgatgttggttaatgctcaccgctccagtgttggttaattaaaatatattaaatggtgggctgtgggtgcatggttttgatggtcgcgcccatggcaattaaggaccggttcgcgggaaatcctggaagaattcctcgtacttaccacaagccagcgtgggcaacggctgagcttgtagtgtagcttttctctagccgacacatccaggcaagggtgggcgtgatggagtttggatgggccttacgacggcctatgcggcttccggattcacctaggcacgagaggggactgcccgctgccttgcgagaagtgggagtgaaacctgaggtgtggtgtgcttggttagaggtggttatgcgaagggtcctgtcatggcctctttccggtatgtcgtggtggcatgtcggcgcacggaaacgtgtcgtggggctgtgtcttgtgggtacagttgtacacctctgatcagagtaaaactattcaaatagccgtgcccgcggttatgggcggtcaaccagattcaccgtgattagtctcaccctagggtagtctgatggaactgattagttcaggtggatggttgggcctgttgcaacgtggtgtagcgttggacagtggatggttaatattgattaattactataatggttttacttcttccaactactgtttataaatgctcgctttatgcaaatgaaccactctagctatcctttgattaccctgcatcatacccctatcccggtatgacttgctgagtacagtgggtagtacttagtcttgctctatttttcccaaaccccagagtttgagtatgcgtcagatggtggcttttccgaggagtaggtttcgtccgtgccatcgaggatgcctgtggagtggtgttcccgctgcagtccaagtcaaggctaagctccagatatcttttaagttttccgctgcatttatgtaagacttttataatatttgtaagacgtggatctgtatgtcaactttgtcgtttgtgtaccccggccggtcctggacggggattttaatgcacattctgcttggaattctattcgggaatttctaggcgtgacagtgacgagctcagaacaaccggatccgatggcaaactcgctcatttgtgtgatttttttcctctctttttttccttttttctagggttctcaatctgtgtaactatccgattggatgattcttttagattctccgtgtagttctgtttgataggatgacttttttcaggttctctcagtccgtgtagatctttgatttgattttgtgctttatccatcgtacatgattggtatatagagtgattaataagaacaaaaaaaattctaccttttttatcacggacggtgggtcttcttttctccgtgtcattgatgaatcggacttttcttttttttttctttttatatgatgagggcatcatcaccatggataaaccataatgatgttttacctaatcgaacataaggtgcaagcttcttatgaatcggagaggtgtatcgatcgctaagggcgcaacgcaatgccttgtacggttgtagtcggatcatcaacgtttcttccaaatcgtagttatctcaactcaccgaaagatcggtccaaacaacagctttgagcatcttgagtggagctcagggtttatcattatatatttgttcgcctttttttttatcacgatgacgaaaacaccttcaattttttaagtatttttttaagtagtagagatagagataatagaaagattaaacaagattcgatagacgcatgtgatgatatctctaatctaaaaaatataccaacttagtcttggagattctcatagagatatgttgtgcgtgtgtgctttcatatggatcaatgtgcacgtgtttatatgaatgcatgtatctatactgtgtttcgaaaaaaaatacaacctgttctcaacgctatattgacgtgaaagtaaagtgaaagtcttttttactttcacgtagaataattgattttgtatttttcttatttacttaaagttgtctttataaattttagcaaatgagatattttcaatagactttcatgtctaaccggaggaccgtagcgtttaaaaaggaaagaaaataaataaagaaaatgggaaccgttttctcgctccccttcccaggcgctatctcctcccaccactcgaaccttatcccctccaggcgcctcactcgaaccttaatttcgtgttctagttagaaatttggaatttagaaacacagctggattggggttctcctatggatcatgcttcagattttatttaggtggattagagtcttattcctttcgattttggaacgacctgggctacggactacacacgttaggatttttatcgatctctttttctttctttggccgctgtaaaatagcgaagatagagggccactcagtcggaatcgacggacgaatcggtcggaattgacgcacgaaaattttgtgacgaaaggaaaattttgccaaaggaaaattacgattctttatattagttaagatttatgaatttgatcggccagtcgtccgtcgaaatcatggaggaggcagtcgacgcatctgccgctctggatcccaagcttgctcctctgctgctgttcggcggccacggcgacgccacgttcctgtacagcgtgccgaagagagcgctgctggcgccaatgccaacgccaacgagggtgggcgacggcggcgtcgacgacatgatgagaggccaccgctggtggaccacggcgcagggctggttgctcatggcgcgccgcggctcgccgtgcactttcctatgggaccctttcaccggccgccgtgtcaggctgccccccgaccacgacggcaccgtcctcaccgccgaaggcagccatcgccggaggtgcctcctgtcatgctgtggtcccatggacccgaccagctgcaccgatctcgtcatcgacctcgccgacccggagctctggtattgccgtcccggcgacaaccactgggtgaagctccatcagcaaccgtaccagtaccgcaaccctgcccaccgtgacgccatcatcagttttttacgcaagtttacggcgatcgacggcaagttctacaccgaactacacaccggcaatgtcggcgtcctcgagttctcgccggaggttgccgaggggaactaattcccctcggcccaccggcacccgttgtcaagcgttatcaaatccatgcaggctcttaagtcgtgtagttatacaaagtcacaaacctgtattatcgacgaaaatctcgttccttgtagattgagatgcatggcctctctgtttactttaaacatcattcaagcggacaacaggtggatgttaatttgcctaaaaccgacatttttcatcttcactaatagctgatccattttgctgtgctacttatttactgttctctgcaatgactgtttggagatgctgctccacaaaattcagtggtgaatagatgtgtcttgtgtatttatcatacatctgttcactttaagccaatattcgagccttttgccctgttacatcaaattgcattattcacttaaataaataggtatgaataaggttactcaaaaaaatgctttcgcagcaacaaatctgacaaaactgcaaaagttcacccttaagaagagggatatatatatatagcattggttctgcacttctgcatgctaaagtactccacatgatacagcaggctggctttccatccataaggttacaaatgggcaggattgccgtttctgtttgagataaaccaaaggagttgcaagttagaataaagcatttatagtcacatcatgcatacagtttcagtactacctccgtcccaaaataagtgcagtcgtggaaattcgtgtctaacgtttgaccgtccgtcttatttgaaaactttatgatttttttaaaaaaaattagtcagacataaagtactatttatgttctatcatttaatagcaataaaaatagtaatcataaaaaaatttcaaataaaacgaatggtcaaacgttggagatgaatagtgcaaaactgcacttattttgggacggagggagtacaagatacaacacacagcgaactggcaatagattgcttttttgtaaatcttagcactccaatgcagcttgagcttgattagttccaggtgttgacagacggtcctgtgactggttgctcatctagggcacggcgcaactcctcaaagaagttcatctgtactaccaatgaccacagaaaaggaatcagagtacagaaactaagacgtaggagaacagtatgacaaaatcgcaggttcaatatacctgatgaggaagtttcatgtgaccatgaccccatgatgatccactagatccagagtacatcaccggcttatctggcaaaacatcaacagcatttaataggttactttggtttagtgcttcccgttggtacaactgacatgaaaattcacttgagtgcacagggtacttgatggtgttcatagtaacatattaacatcacgaattgctatacaatactataattgctagcaccataattgtgcggcgtcactactgttgccaacactttatattcacctccatatttctatcataacttatgaaacggtaatctaaattaaacataggtctaggatagtatgccaggtcttgtagaaattgatcctaaaatatctaaagattcctctaccatgattcatgacatagtaaatctcccatcatgcggcctgaatttgcttaaggactcaccaggggaatcatatgactgatcattgtacaagttcattgctgcagcccaacctacaggggaaaagcagcaaaggtttattatcacataagaagaatggttgtaaataaagttggttcaaaattagtacagcaactgtaggaatacatctttgttatatatgcctagaccatccttgattaaaagttgcctaacttccggtaaattaccggtggcatatgcacaattgcacataaagagaacagttgatggtatgattaatgaacaaaaaagataggataagcagtaggtacacagtttgaatattcttccatgttactaacatgcagagaaccccaaaataaatcacaacaggtgctccacgtatttttctttacaacttacagtatctgaatattggattatcagcctgtgtaaacttattaaagcaatgggcggttctgtaatatactgcatgtgcttttactacttactccctccgtcccaaaatataagcatttttagaccacgacatagtattcgagatgctactttgaccaacaatatctataaaaataaaatggtttaaataaaaagagttgcatataataatagtttgattaatgataaatttagtaacatcaatttcacattattgattttttttatttttttgctattaatagttaaagttaaaaatggttgacttagcactatgctaaaaatgcttatattttgggacaaaatgagtaatatcttattactgtagacataatgtatcactaccacaataacatgcaacaattcccagaaagtcaaaaagataagaacttatatcatagaacttctacaagcatttaaaagggcagcttggtctctgagaaacatacggtcattgagaagctgggcagcctcactggcacaacatccctccaagggtattaatcttgtttgactgtaatcattctgaggattgctgaaaaaagtctcatgagggataattggtggaaggttctttaatgaaggagcatggctcttctctccatcattattgtacaaataactagccttctcagccctatctgtttggtataacaaaagtgttacagtgtcagccaaaaaaaatcacctcataaattaaattgttatgcttaaacatacagataaatcattaaaaaaacacatggataaggaaaagatagcccataaaaaaattattggaaatatgaataatcaaataaagacatgtcaaggttagaagattctggacagctattggacataataagtaaactctgagtaaaaaacacatttgacttgtaaatgactgattgtggggattatgattgcaggtagcttgcattagatgcatgaagttgcatgttgtacagagtattggcatcattaatacaatggagtagaggggctcatacaaggatgtttgcttgcaaggatttccttatagatatagagtagttatcaacatggtcggtgtaaggcacatatttttcagcccatttgtggaaaagaaacatggcagtttcactgcatagaaatctactagaggaataatgaattaagtttgataccataacaaccaacaactggataagaccttatcaactaatttggagaccttatatagcagtcaagccaaaataataataaaggaaaatataataaatccccaaaacatcatgaaatccaactgattcaataataattgcgtcgattgttagcacggttcctgaagcatattcagtaaagatagccatcagaaagcatatctatgcatgatatgtagcaagattattaaaactaaataataactaacattagactgcagacaacagaatatttcaagaaataactgatggtttcaaacaaaataaatatttagctcataaatacaaagatggaacaaagaagccatatcaagttatcaactaatcaaatcaacaaggtgatagactgattgaacaatatgtcttaagcaaatctacttcttcattgtgaactccacttataattgtgaaattgtgattacgcgatcacctatcaaagggcaattttcaatatctggcagtacagtaactaaagtatgatagtctttatgcagtcattatatgccctgtgttgaagtcatgcgttaaacttatacaagctgaccgactggcagagttttgctaggcaaggttagcttaatccgctaacccaaattcgaaacatgggcaatccttcacttgctaaaacaggtagttaggtcagcattaaacatgccctgaaataagccattagccatgtagcttgaacaaagatttttctaaaataaataaaagttagttgctaaggttgttcattctcaaaaagctaaaaagagagaccagcgagccaataagccttataggtcggcttccgcttggagattgtataccgccccggcgccccggttggtttttgttggtttgctatccaatctccatatatgcaaagtatttagattttgctttagaattgggtagtggtttgaattttgatatcgtgtaggaattcatgtttccttttcctgatcaacgggtggtgcagatgattggtaggagtactaattgtaggtcgtagatgtgcatacctctttcctatgccaatagttatttataaggatttatgaatttgatcggccagtcgtccgtcgaaatcatggaggaggcaggcgatgcatctgcagcactggatcccaagtttgctcctctgctgctgttcggcggccacggcgacgccacgttcctgtacagcgtgccgacgagggcgctgctgccaatgccaacgccaacgagggtgggcgacggcggcgtcgacgacatgatgagatgccaccgctggtggaccacggcgcagggctggttgctcatggcgcgccgcggctcgccgtgcacttttttatgggaccctttcaccggccgccgtgtcgggctgcctcccgaccacgacggcaccgtcctcgccgccgaaggcagccatcgccggaggtgcctcctgtcatgctgcggtcccatggacccgaccagctgcaccgtgctcgtcatcgacctcgcctacccggagctctggtattgccgccccggcgacaaccactgggtgaagctccatcagcaaccgtaccagtaccgcaaccctgcccaccgtgacgccatcatcaggtttttacgcaagtttacggcgatcgacggcaagttctacactgaactacacaccggcaatgtcggcgtcctcgagttcttgccggaggtggcgttcaccaagatcgctgtacacgacgacgataggagaccggcggtgtacaagaaacgtactacttgcttcgtggaatcaaacggggagctgcactccgttgtcttctctcacccgatcggatgtgaccggattgtcgcgcgtgtaggcgtttacaggttgagcattaatgcggcggcaacgcaggagcaaagatcagcagcatgggtgaaggtggattcgctaggtggcagagcgttcttcgttaagataggcagttttggagcgtcacttgatgcggagggaacaggcttgagagggaactgcgtctactactcggtgttcaatgggaaagtgttgtgtgtatacgacatggaacgaggaactacggctgtaatcgatcccggcacacatcttccgtatcaccagtcaccccaagtattgatgccaacatttcctagatatcatggcggagcaactcgaagtgttgaaagcatctatcaggttgggccaacaattcaggaaaatgcttatgaggtaaaagacactaaggtaagtaaggtgaagagggatgttcgatttttcgagggtggttgtacttgtttgccgattcctattcaaaataagttaataaatcagaagaagagtaagaggtctatggctgaaagatttccttgtcaaggggaaggtgcaagcagtcccgaaacgaagaactcataccgcggttgtggctttcctttggagccgctcaaatgtcttctgcgtatgaagaaataggagtgcactacatagaggatccaacttaccttttatgccaactcgatgagtgtttttttagttaactcattcattcaaaatatgcactaatgttagctcggctatgtcacgtctattaatttcattaagttttggtctctactatgtgattgggagctctttttctctgaaattttatgaaaccatcttcttttttcttttaggtgtttaacagctccccaatctgctttcttcctgagaaagcctcgttgtgtagtgcccgttccgtcgtagcgcctagctaacatcgtcagatcccaatcccccaatccatcgtcaagttcgaattccaacttcaagtcccctccaaatcaaatctctcgacagaagtctatttcgcctccctaaagttttgtgggccgagctccctccctcggcacatcttctccctcagcccatcccctcctctcgcacatgccgtgcgagtgcgctgagccgagccgagagagagccctctctctcattttcttgctctctctttgttctctctctccccgatttcccgccaacgacacccaagttgccgcgccgcctgttgccgcgcgtgcactgtggtggccgaccggccggtcgccgccgccgtcagccctgcctgttagagtatatggtagttagagtcatattaggatagaattggtttgtttggattccttccatatctgtaatccttccttatcttctccccatgtactcctgtatatattggctccctgagactcaatacaatatgtccaatattcacagtatcctctctccctatattatctaacatggtatcagagcagacgatctagtcgcctctctctcacgcttccgctcgtcgccctcgggagggtttcaatctcctggggcggccaccgtttttttttccttcgcgtcgtcaagtcgatgtcccgagagagatcgatctctcggacgcttgcgtcgtcatcaagcggcagtagcagagtctccggtcatcatcagtctgcacttcgtcctccacctccggtccgccgcctccaccgcccctacctccgatggccaccgtcggcttatcgacctccgccgggctccgcggccgacggacgaccttgtctccgcctcgaccgctgtcttcatcaagctccgccggggggatggaccgacgtcttcaccgcctctccgcctgccttctgcctcgtcgccggcaagacgctgctggtccggcgtctctggcacgggcgcgcggcccgacacctcgccgccaggatctgcaccattgtcgccgcttgcggcctcgacgcctccggactcagctccctcgtcgttgccgccggtcagcccctacgcgtccgcgtctatcttgcctctcgctccctgtattgtttggttgtccgtcactttgctgtgatcttacacgtgattagcaagggagaggagagagagagaagatggttgcagagagcttgttggctggctggctggctgtggagggaaccgattgtgcatgtgtcgctgctgctggtacagttgaggcagagaggttgctggacgtggacttggtctacggaccatttgagcacgtagggctggttgttactgtgctgcttgctgctgcatgtatctttttttttcccgatcagagatcgggtttgcgtcgtccaccgcctcgtcgatatctacgcgtctctgacatcggcatcgacttcgtcgtcctgccccgcgcatcttcggcttgatcacccgttcaagcgtccgactacaacgacttctgtaaccgatcgtcatcgagcatgcgtctacgccatcaagctctgggttgccgctgtgtcgcctccttgggccgcagtgccgctgcctatggtccacacctccattggctattgcaacgctgagaggcgcccttctcagcgtggcctcaccgccggtggacttctcgccgctgcatcgacatggagctgcagctgtgctgtcctctcggaccatagctttgccactttcgtcgtcttcatcgccgttcgcgcatcgacaacctcgtcgtccgcactggtcatagtcagccgctcggggtctccttcctctacttcaagcatcgccgccgcatctccaagctgccactgtcgccactctaggccggtggtgcagctacctctacatggctaccgatgtcgccgtccaggccgttggtcccgctatttcgccttctactttgtccagcatgactcatcgccagcgtcgccgtatcttcctcgactacacttcgctcttctccggcaactgcgtgctgctccggcaattctccctctacgccgttctcgcgctgcgactgtcccagaggccttctctgctagtctcctccgacattggcgtatgattcatggtggtctcctgtctcgcccgcgcggtattggcaacaccggcgcgcgcgtttgtcccgagttgtcccggggtctggcaagccctgtgtaacgtctcgtcctttacggttcgactacattggctcttcggcgtcatcttcctcaacgaccgccgcgattgtatcaccgtcttcgtctccagcgcgtcctcacgcaccattggtccacgatgccctcccgtccatccacgaccactctacgacgccccctgcgccttacggctcgactacctcgacatcatcgacttcccgacttcggctacatcgaccacggctactctacgcacggcttcatcaaccacggctctctcggctccttcgctttggttacatcgactatggcacaaagggctatcatctgtgttgagtactctttccggtttcttctccagtccaagtgtccgcgctgctcacgcttggactgcgggggatgttagagtatatggtagttagagtcatattaggataggattggtttgtttggattccttccatatatgtaattcttccttatcttctccccatgtactcctatatatatcggcccccctgaggctcaatacaatgtgtccaatattcgcagtatcctctctccctatactatctaacactgccgcgcctgtgccgtctgtgcccgcgctgccaccctgtagccgctccgctccacaccgcccctagccgtcatcgccggcgtcatccactccggccccgccctccgtgcgcgtgcgtccaagggatggaggtagagccctgcctcatcgctccttctccctccttcctttcccgttttggcaaggagtgccccccctttctttcttctttttcttctttttcctcccctcgccggcgtcatcctctgtcgccgatttggccgcgtgcgccgagcgccagccgagccatttgactgcccaaggtcggttctcccctcccaaaccgacatcgccatcccaatctctcttgttttcactctccaccgctgtcgcacaccattgtcgtctcgctgtcgccgtccgtcgctgagcgtgccggaggagctggcgcgttcgtggacgcgtgacgtgaactccgcgctcccgcttcatccccttcctcggccaaaacgatcacgtttcgcgccgtgtcctctcttcacggcgccctgtcccgtcgcggtatcccctccgttccccctcctcgctctccctcctccccgtagcacacccgatagctagtaggcgccaccccaagccccgccgccgctcggcatggtctcgccgccattgccgcccgtcgcttgccctcctcggctctgcttcgtccaatccgacgctaggaacgagtcccggtggtcgtgtgtctgctctagcttcaagaaatcgaaccctcgtcgtcacgtcgtgctttccctcttttgccgccgccgacgaacaccgccgcaatccgccgccgtcggaagggcgacacggcggagcgccagtgccggcacgtcgacgcgaagctcgggtggctcgaccacccgagcctatctaggacgagcacgagcatgtccaacgggagagacgaccagtccatctgcttccgcttctttttcgccggcctggctggtgttccacacgcgagagttcgtgcgtgcgtgcgtgcgtgtccgcgatggcctgcacggcgtaatataggtcggcttccgcttgtagtttttgttagtttgctatccaatctccaaatagatgcatactggagtactagtacaattaattttgatgtcgtgtaggaattcatgtttccttttcctgatctacaggccggtgcagattataattggtaggagttactgattgtaggtcttaggtgtgcatacttcttcgcttctttatctcttgtagacttgtactactattaaatcgcttctttatctcggatgatttggaacagaaatcacgagacaacacttgtaggatttctaaaacactgcacaaattcgtataccgaaagatcgatcggccagtcgtccgtcgaaatcatggaggaggcagtcaacgcatctgccgctctggatcccaagcttgctcctctgctgctgttcggccacggcgacgccacgttcctgtacagcgtgccgaagagagcgctgctgccaatgccaacgccaacgagggtgggcgacggcggcgtcgacgacatgatgagaggccaccgctggtggaccacggcgcagggctggttgctcatggcgcgccgcggctcgccgtgcacattcttatgggaccctttcaccggccgccgtgccgggctgccccccgaccacgacggcaccgtcctcgccgccgaaggcagccatcgccggaggtgcctcctgtcatgctgcggtcccatggacccgaccagctgcaccgtgctcgtcatcgacctcgcctacccggagctctggtattgccgccccggcgacaaccagtgggtgaagctccatcaacatccgtaccagtaccgcaaccctgcccaccgtgacgccatcatctggggattacgccagcttacggcgatcgacggcaagttctacaccgaagaactctctggcattgtcggcgtcctcgagttctcgccggaggtggcgttcaccaagatcgccgtacacgacgtcgataggagaccggcggtgtacaagaaacgtactactagcttcgtggaatcaaacggggagctgcactccgttgtcttctctcacccgatcggatgtgaccggattgtcgcgcgtgtaggcgtttacaggttgagcattaatccgacgacaacgcaggagcaaagatcagcagcgtgggtgaaggtggattcgctaggtggtagagcgttcttcgttgagattggcagttttggagcgtcatttgatgcagagggaacatgcttgagagggaattgtgtctactactcggggttcaatggaaaagtattgtgtgtatacgacatggaacgaggaactacggctgtaatcaatcccggcgcacatcttccgtatcaccagttgtagcgcccgttccgtcgtggcgcctagcgggaaaattatctcttaaaaaccctaattgcgaaatttgtttccttgctcgttgtgtagtgtccgtgccatctcagatctcaaatccccgatctatcatcgagttcaattccgaatccaaatccttccaaatcaaattcctccgcaaaagtctagtttgcctcccccggggtcgatgggcccaatccctctcggcccatctaccccggggggggcgcgctcgacccctgcggaggtcgctgtctcggccggctctggctccggtccagtgcggacccacgcgccgcccgccaccgcgcgaccctggccgagcgctccccctccgctctgcccgcatgcgcgtgagccgcccgcgccgagcgcccctccccctccgctctgcccgcgcgcgtgcgcgtgagccgcccgcgccgagccgagccctcctcttcgctccctcgctgccgctccccgcgctcgttcgcgcgcgcgcccgcgtggttgccgcccgtgccgcgccgtctacgccgtccgcgtcacccggtcccgctgccctgccgcctgcagccgcgccgccgctcggccccgcagccagcgcgcgtgcccgagccgcgccgctccatccgccgcgcctcccgttgcaagccgcgcgcgcgtgccgagtggccgaccgcctggtcgccgccgtcgtcagcgcctgcccacgcctgtcgcccgtgtcgccgctccactccaaaccgccccgccgtcatcgccgtcgtcatcgcctcggccccgccactccgcgcgcaagccgccaaggaacggaggcagagccctcctccctctgccgcgacgcccccgctcccctcctccttttcccaaagaagaaaggggcgagccccccctttctctccctcctttttccccttttcctcccgccggcgtcatcctccctccgccctgtcgccgattggacgcgagtgccgagcgccagctcgcgccttgaccgcccaagtcggtttccaaaccgacattgccgccctttaaggccccgggcgccctccctctcttctcctcccatcgcctccactccattgttgctgcccctctgtttcgctgtcgccgttcgtcgttgcgcgcgtcggaggaaccggcacaagcgaggacgcggaaggggactccgggcgctcgtcttcctcctcttccccggcccgaggccggagagattactctcgcgccgtcggcctctcgtcacagcgcccctcctcatctcggtagtgcctccctccgttcttcctcctcgctccatctcccccccttagttttcggtagtagctcgagtagcctccccgtagctagccggcgccgccccgaccgttgccgtcgctcgctgtgtgctggccgccgtcgccgcccgagctccgtagcacccgctcgtcgccggcctcgctcggcgtagctccgcccaatccgacgctagcaacggattcccgtggccgcgtagatgctctcaccgccgggatttggcccctcgtgacctcgtcgccgtttcccccttttctttccgccgggtgccgccgccgcaatccgccgccgacggactccctccggcgaatccgagccgttagctcgctccctctcactctccctcgtcatcccggtgtacgccccgtcgcccctcatcatcgcaaggcgtccccgagaaaccgccaccgcccgccgtccattcgcggccgacgccttcgtcttcctcccgccagcccacgtggcagccacgtaggcgccacgtcggcgccagctcgaccgaggtcgggtcgggccgaccccggtcagcccctcccgtgcgcacgttctaccgcgagccgtgaggctgcgcgtgggcccgccgcatccgttcctccgcgaaccgcgcgcgtgcaccgcgtcccagccccgcccgcgcgcgcgcgccgcgtgctcgctccgcacggtgaacggagtcaccgacaagtgggtcccacccgggaccacgcgcggtgagcccggtccaccggctctctctctctcctccctcccgcgcgagcgcgcgccttgggccggccggcccatttagctcggccagaccgccccaattctctcgggccgcgccctagccgcccgagaaaagtctatattccctccctcttttcttttcttttattttcttttcaaaaaggatttaattaaatccttttcctttagaccaaaaatccaataatcttagaaattcaatatcttcccaaccataaatccgtttgactccgttcaacttccaaaattcctcaaatctcgagatctatctaatggcacgcttagaggtcattaatagggctttattttcgccgtttgttgagttgtcccgtttcgcgtgtagtttcggagcccgaagacccgcagtgcgaggatttcgaggatcaagctccagatctcgagcaaggcaagccacctttgaacatcttgagcctatatttgaaatttaattatgttgcttgaaaaatattatgcattgataggaccgcacttaatctgtttgtcccgtctgcaaggcagattggcggacctacctagtttgttgcatttgatccttcctttgttaattgttatatcatgtccccttgtatccatctagttgtgtctcgatattcgtgcaccctgtgcgagtatcgacggacgccttcaaacttaaaatttgaataacaacttgggtaaaacttgggttttacaaaagacttggaaaacccggcacctgggtcggtgcttgcgaactaaatgaatttccaaaaccgcggaccggggaacgtaccgggagtacggtttcccgctcttgcacttaaggaccgtttccttggaatttcatccaaacataagacaagtacgaccatatgggtggaatgggacacccctagctgagtaactagcttatcaggggagccttgatgccgagagacatgtggattcgccgaggtggtgtcggggaggactctgggcttcctggcacagtatggtctgggacctaacctgttgttggtctgggacccctctcgtcggcatatggtaaacctgtgtcggctttggaaatgccttgttatgaaagcttggaggtctcccgatgtggctgattcccacgggctgggtgatccgggttagtaatgtcgtgtgggtaaagtgtaccccctctgcagaggttaacaaactgttcgaacagccgtgcccacggtcatgggcggatgtgaggtgattcctagcgtagttttgtttgactactgcttgtgaaattacggttgtggaaaggggttcgatgtttgaaaaatctgcagctgatgggatcagctaggcccgggtggccgtttgaaagttgttggcccgggtggccgtttgaaaaactgttggccgggtgccaaccttgattcaattctaaagactgatacattgcacatactccgagcggacgagacgcactgtctcatccgtgtcgtttgagaagcactcacttagttgtttttagaaaagagttcaaataaaatcaattgcaaaaacaacagcctttcctcgaagcctgcattaaacacttatttcccatggcttgttgagtactcccgtactcacccttgctctatataaataatcctccccccccagttgctgaagaagatgaagcggaagctgctgatgagtagttcttccaggagcaagccggctacgatgagttttagggtttcggcctagttcccaagtcgcgcctgtgttgtttggtccaagtcctggcttccgtttcccttttgtaatgcagttgtgagctcgggatctgtccgcagcccaacatgactgtacctctactctataataaagagacctctgttgctgtgatattctgtctccctgtgataccagcactgtttcctgggactggtatcgaataacaggttaatttggagcgtcacgggctagttccggtcgggactagttcggggcgtgacaccagtcgcctcaagtattgatgccaacatttcctgcaggatgttacggcagaccaactcgaagtgttgaaagcatctatcaggtagggacaataattctgaaaaatgctaatgaggtaaaagacactaaggtaaataaggtaaagagggatgttcaatttttcgagggtggttgtacctatttgccgatttttattcagaatacgagagtgacaaagcagaaagataagttaataaatcagaagaagagtaagaggtccatggctggaatacctccttgtcgaggcgaaggggcaagcagccccaaaacgaaaaactcataccgtggttgtggctttcccttggaggcgctcaaacgtctcctgggtacgaagaagtaggagtgcactacatggaggatccaacttacctttttatgccaactcgatgagtgtgtttttagttaactcattcatttagaatatgcagtaatgttagctcggctatatgacgtctattaatttcattaagttttggccactactaagtgattgggagctctttttctctgtaactttatgaaaccaaaccttctcgttgcattaagagaatgatttggtaaattttctttgataaaataagttagaaaatattaaaattaattatgaccttttgtttttccaaatatttgttaatttggcaataatttattcaaattcagtaaaagaatgtgttaaaatttcaaaaattttcgtttggagtggtgcctaccgaaattttctagctttttagaaagaaaaaatcctgcttatacccggttttagaattgagggccgcaattgaaactcgacctcctccataagagacggaagtggacttttccaactgaaaagcatttcctgcctgaaaccggagagtgagagtcagagactcgttgttctaaaaaaaagttctgaaaaaaaagtgagagaccctcaatccctccccaaccggaacacccactccgacgagaacgacatggacgccggcggcgaggaggagaagcaggagcgccaccgggttgatggtgcttcgccttccatggtcgccctccgctccgacgtcctccacgccgtacggcaccgcaccgccgtctctctccctctctctctctccatccatcggccggctccccgcctgcacgccggtagctgacgtgttttggtttttcttttcttttctttttttatgcggggttggctgccggacgacgcgctgctggccgagacgcgcgccgcggatcgacgggtcgtgttactcttattgctcagaaaattaggtttgcccgttgctgttcttatggctgtaggcaactcaagtctatgtggggataaattttgtgacaactcaagtctttgctacgattcgtttgcctaaacgaacaggtgtaattgggcttgtagaaaagcaatatgccaatatagattcctaaggatcacaattcacaacttcccaaccaatataaaaatttctgcaccctcgtcaccaaggataaaacccaatgtgaactaatgtgaaggaaagtcgagatatagaacttcattagagcgtaaatagtatcctttggttccagacatcaacacatgcccttttagctggtcgcatatatcttccgtgctgctctccgcatttgttctgtatctaatgtttcagttactagcaagtttgataagaatcattgcttcctctgaaagtaattatttttcatgtatcaagaattgctgacgctgaagagaatttgggtgaggttgaagtgcgtgaggcccatatagccaaatccttgtacttcataagggttggggagaaggtataaatctgtatatctctatactttaccctgtgacctggttgacaaagtacatgctcgaaatttagctacttcagtgacaggggacctcctgttgcaggtccttggagggaagtctcataatcaggacacttctgaattggtcacactggtatgaaagagtttcatctatcatgtcaagttaaatcagggaaatcttgtaaatcgcgtcttggaaaaactaaagatttgcagtcggagtggtccaaaaacaaatttcctttgtatgcttatgctgctgcttttatgttcctagtcatgcaagaatatgataaaagatcacatggtattgacttcctcaatcgggactttgttgtccgaggtaaattgatatacatgctcggtgtctgtatgaagtgcatggcaatgcatccggaagcatcagctgttgccccaggtcttcttgatatgatcagatctaggtatgccaagcctaaacaaacatttccctgttaaggaattttattggtaagttaccattttgacatcaaattttgttctacagagctgtttgacaacatcctgaagcatatgtcagaaggtctgtgttgtttgcagcttcttgcatattgatagcgctgcacctgttgtatgtctcatcagctcttatagaaggaaatcaggacattctacatacacatatgggttcttcatgttgcagaagctgatcctgatacagaatgcacatatcagtatgtattttggtcactattggggggggggggggggaattatagtacaataggctcagcacataatactaacagggttatttttcaaccaacaaagtacaggttttcagggtaaactttatatcaaattcatttgcgtcgcctttaattttatcctgaaggaagagtgctttcaccctgagatgattcaccatctgaaaaataaaaagctaataactcccaccttatgctttagtttcctgtgacatacttctttctatcattcctttaagtcttctacttcaaccagtgatccagctcttttcagtaatgtgtagagaaaattcggactcttttttttcaaaaaaaaaaacgtataatgagaaaccatttcagtacgctggaactcagtaacttctcacaatgtcatctaactcctccattggcatgtctgtctccttgcaggccattatgacctgtttgcaacttcgttctgagatcttcagacatcacaagcactgaatcggtggatcacagcatggccagcagctgcaggtctctgccttttaagcttgataccatcaatgtactggattagaaatataaatcgatcaatgtatttgggattcagagtgctacatttttcgtcatttatacatagaacatgaattcccaacatgaattgatttatgtgaaacgtctgttccagattactactatgtttgaaaactttgaactgattagttgagcaaaagaaaattactacatgtgaacgggtcttgcagggcgagaggaggaggaggaaggtgcatgctccatggtgaccaccagccacaggacagggcactcccggagcgttggattagccgcgagggacgatccaacggccgagatgcgtctggtgcaggtatttaagcgcaatgctgcttttccttgcgcttggctggctgcacaaccacttttctgcttctccctctctcacacattctcatctcaagagcagtagcggcgaaagatgaaggacaaatgttatatcgaattccgtctgcattgcctttgattttagtttgaaagaatggataatttcactgtgatatgattcacaatctgaaaaataaagagctaatgtcactcatcatatgctttagttttcagtaacctactccttcctctcattcctttagtctaatattatactcattcagtgatccagatcttttcagcaatttgtaaagaaaaacaggacttctttttatcgtataaagagaaaccaatcaagctggaaactcaataacattttacagtgtcatctgactcttccattggcatgtttgtcttgtagatgggtatgtgctgcctgcggctccattctgagatggcccttcagacatcacgagcactggaatcggcggatcacagcaaagccagcggaagcaggtctctctaccttctaagcttgataatatcatcataccattttgcgaacatgatgtgaatcgatgtactagattaagttgtaaataaacatatacttatcttgccatgtaaattcctgctcagctagttctgcttaggcttgatcatatcgtattacaggcaggggcggatccaggaacaaaagattgggggagttcaattacacagtttcttcaaccttgagccatttagggactttttagtttatcatttatggtgaaaaaatcgaacggggtactccggagggtatccatgggttttgtgggtgtag

SEQ ID NO: 7012 - DNA, 44821 bp, Oryza sativa
  unsure (1)..(44821): unsure at all n locations
ggttatggctattggagagcaaagatcgctagtggtgttctggctctgcgagaggtggctaggttgaggagatcgagtggtggatggcattggtgtggggaaaaaggcaggtggaggtcgagggtagaaatgcctcctacccattgccatcaccctttttttgccttattatcactgtgtcactcagcaatgttcgagaggagtgaggaagaagatgagtgacgaggagagaaagaagagagtataagaaaaggagcatatgcaaaggccgacaggtgcaccccacgcttgcccccaccttcttggtttacccacacaagaaagaaaatagtccatggtaggtgggctccacttgctgactcaacgtgtcaactgtggtcaacctaccatattagcagaaatcacatcctaaaatatcgaaggagttgatttgtgctggttttgaaagatgggggaggcgttattgtcggttttgcggttgagggatgcggttcattcaataggaagaaatgaaggagagaaaatagacttattccctacttgcagcatctcattggaggtccagtacgtaaggcccactacccaccacgtccacacactgcaggccttaaggcccagtaaaatatggaccactcacgtgggagttctgtttgggcccaacaggtacttggggacgccgttccgacccaaattggcgtggagtgcaaaacggcccgctcttctgctgcttgccagaacttccgcatgatctctctccagctctccagccgtccgagcttctgaagcgctctgctacttgttccttgagagtttgagacgctttccaccatccagccagcatcttgcgctaatccgctgccgccgtgaagccgatccaccgatccacggaccacggccgtctttttggcttcatgcctccgacccgccttctgctcggacgcctcctctgcgcgaccatcggtgcttgatcttttctttttctttagacaatgataatgatcggtgcttgatctgaccatgtattatcttgtcggcgtcagattaagcaaactgcactttcatcttctctgcattttaagcaaacggagtattaattaattaatttcggaaacaaaatggtaccaatgggcacggcggtagccatcagctgccggagatcgaaaagaggtgggagaccgaagatacagctccgatacaggtcacgggtatcgtcgggcttctcgagaaagcggacggccgccgcccgccggacgcgtgcctcgcgagatgatcgagctggccgttgtcatcagactgacgaggaggtagtagtgtgccacgtatgtatagcttcgcggcaccccattccaatcaaatgatccttgcgacgtgaaccatccaaagaggatcggtggaatttcgacttgcacagccagcccattcctgcaaaggcttttatcaacttctctccgttcgaaaaagggtttatcacgagtgcacattcaacgtgtacacgtatactacatggttcgacactcgaacagttctttttcttttaaagatgttcgaacgtcagttcgggcaaacaacgttatctgttttttggagtgcacattttacaatcccgaggttgcgatatgtggcccaataatgtgcactctgctgcattcccctttggagaaggttggatcagatgtagtatagggtgtgtttatttcacgctaaaattgaaagtttggttgaaattgaaacgatgtgatagaaaagttgaaagtttatgtgtgtaggaaagttttgatatgatgaaaaaattaaaagtttaaaaaaaaatttgtaactaaacaagaccataatgtattaatcacttgcgttgacaacaattggcacactcaaactccacaagccatctcatacactcctattatattattattagtagtattttttgctgggaacattaggtacagtctactattttaaggaggccaaaacgaaaagcacatcctcttttctttttctttttaacgcattgacatgacagtgtagcaccaacaacttcaacaccagcacgatcaagcatattctaccatagaaacttcaacagttcaaccaacatcagcatcaactcctgttccgttcaaaagaacgtccaaactctacctaattgacaaatgatttcaccacgtccctttccattttcccttgttttttttcctcctcgaagaggtcgctttctgtaccgtctggaagacgtcatgtgttcttactatagaatgtccacagaaaatcctgcattccacggcggccgaaatccaatcttgccgatggtttggtttcctcttcctcactttttctttctttcttcctctccaagaagacaagtcacccttccccacgcccctctctctcctgacgagtggggcccaagtcgtgcggtcatagactttttactactacaaccaacgttcgcgacccaccgaaagttccagaaatccaccgctctccgggccccacctgtcgccctgggcccgcatgtcatacgcgtgcccgccaccgcgctgcgggcgccgcctctcccggtgggtttagaaactgtgaggccgatccgcataccgcggcggccgtggtgggcccaccgtctagcgaaaaccacccccgccgccgcgcgtgccacgtttactcccgtgggccccgcaacgaggcacaaaccctaggccgcttatataaacccgacccgccccgctccggtgatcggatccccacagctttgcgtttgcactcctctcgatctccattcgtttttgagttcctcgtttgctccgcctctctttcactcatgggtaaatccgccaatctttgattttattttattttgagtttgattttgggtttgattttgtatgtgtttttggctgattggtttgtgatttttttttttttggtttctctggaatgagcaggcaagattaagatcggaatcaatggtgagtgttcgagcatacgattggatctggttattttatggtatggggtttattcggtgcggatttgtgatggatttttttggtttggatgatgcagggttcggccgcatcggcaggctggtggccagggtggcgctgcagagcgaggatgtcgagctcgttgccgtcaacgatcccttcatcaccaccgagtacatggtaccgtctctttccctcgcctcccccgcgaattagttgatctggtgcttttgagaatgtatgatatgatgattgtgctcgcttcggttaaattgaattgcacgaattcggtgcccatcaattgggattgaggcatcctggtagatttgttaggactatttgttataaaccttgtttggatttgtgatctgcagtactgtagatgtcactgtcgttctgctctgatggaccacaacgcactctgtttataccatggattcataaatgcaattcttgtctgctttgactgaatatttctgtagatccatatagtagatggtttgtgttcatctcttcttttatctgatggtgctatggatgggatgattggtatgagtctattacactacagtatttataaagtcatgcagacatgcatactgatgtgggtctcttttgcatgcttcaatgcatttagaaactatgtgtagttgagtacttgaatggcgttcctacctacaagacctgatttccttgatagtacagaatgctaattttggtttgatctgttgtatatgctaaattggactgtcgttgcgtgcagacatacatgttcaagtatgacaccgtccacggccagtggaagcatcatgaggtcaaggtcaaggactccaagaccctcatctttggcacgaaagaggttgcggtgttcggctgcaggtttgttgccatccatttcagtatcatttttgttcatctgctcacaagagttacagccagtctgataagccaatattctgatgtaggaaccctgaggagatcccatgggctgcggctggtgctgaatacgttgttgagtctactggtgttttcaccgacaaggacaaggcagcagctcacttgaaggtacattcctgtgtcaatttttctgttcagggtcaagctgtagatctgttctcaatcatttttcatatgcagggtggtgccaagaaggtcgtcatttctgctcccagcaaagacgcccccatgttcgttgttggtgtcaacgagaaggagtacaagtctgacgttannnnnnnnnnnnnnnnnnnnnnnnnnnnnnnnnnnnnnnnnnntctcgccaaggtgtttattctgatataatttggcgcctgctcctgtgcgcatgtagctactactggagttttaagctaacattttgtcttgttacaggtcatcaatgacagatttggcatcgttgagggtttgatgaccactgtccatgccatcactggtaggcatcactttgcttaatattaatattggactgagtaaaacgtttggtaccatctatctgatctgatttcaattcaagtgattaacatttgaattcctacagctacccagaagactgttgatgggccctcgatgaaggactggagaggtggaagggctgctagcttcaacatcattcctagcagcactggagctgccaaggtataaacttgtatttctgtatgtattacattgttgataatgtttcgttatcagacatttgcacctaatattgatatgtttcaaggatctcgtggtatcgttttgtatttactttataatgcaagtataacattaaaaaattgactttccactccttgctagtttgccccccttttcctttgcaaaattaaggtttgtttcgttgcctgccaaataacagtagcggtgtttaatcagatggaatgatggatctcacaaaatgtggcaaccaccttatttttgttgtgttttgttaaaactacactgaaccttctgtatcgggcaccattaaacctgtttatcgtgtactcaattagttttactcaatttctcataggctgtcggcaaggtgcttcctgccctcaatggaaagctgactggaatggctttccgtgttcccacagtcgatgtttccgttgttgatctgactgttaggcttgagaagcccgccagctatgaccagatcaaggctgcaatcaagtgagtaattcttaacaactatgggctctgtaaatctttatgaacttctgatttctggaccgagaagaatctgcttgtgttttcagaaaagaaaattatttgctgccttgaatgtttcactaattttgctacatcttctcagggaggaggctgagggcaagctcaagggcatccttggatacgttgaggaggaccttgtttccactgacttccagggtgacagcaggtaaatttacccattgcagtttcttgtataattatgggtcatattggttacctctaggctcttgctatccgacctattaatttaccaaaaaaatgcacttatccatcacaggtccagcatctttnnnnnnnnnnnnnnnnnnnnnnnnnnnnnnnnnnnnnnnnnnnnnnnnnnnnnnnnnnnnnnnnnntggggatacaggttagtgtgtgctgcattatgaaagtgtaattctctgttacatgctcacgacagtctgcttaaaccacattttcctctgattgcagcacccgtgtgatcgacctgatccgtcacatgcacagcaccaactagacgagccctcctcatggaggcctgcagatacaggggagttgtgttttgccccagagaagagtagatgaagcctcttccgagaataaattttaaattctgtatggttttatgtccgtcgaaacctaaaactatacttggttgtatcatggtggttggttgggcctggtcatggctcatattttgtgtctaattttcttgcgcttaatctaaatcgaagtgttgcttcgcagatgcatttgctctgttttctggttgcttcttaaatacgcgcgccctaaaccctatgtgcgcgcgccagagtttcttcctgatttacaacgtttgctgtttagtcattggccaaaccccttagagcccaccttgattgatcgaaacccatctcctccatcgataaaaattggacctaacttatcgttaatgcaagtgcattgtctcgctggggatgagaaaaccaccagcaggtcagcaagccaggagctacttctgtccgctttgtctctagaatttgtagaatgctcgttttcaacggaaatgtggactgccatcaggcctcaattgtgaagtctccattgcacacgaggatttatctctagaatttgtagaatgcccgttttcaaaggaaatgtggactgccattaggcctcaattgggaagtctccattgcacacgaggattgaatcaaaaaaaaaaatttgaaggacgaaataagcaggtgttccagaatgattgcaggaactgataaacaagaaaattgaagaattgtgaacttggaggtacagagtttctgtatctctgttctgaaaactgaagaattgtaaacttgaggtgagactatttctctgcccctgctctgttttcttctatcttggcattttagctctgtaacttgctcttgttttatcgcacagcctgacctgttaaaacgaaaaactgcacgcacaataatggatgatctctatcacaaatgagatcgaaaatcatacgttcatttctgacaagaagtcgtacgaaggagatatgaacagcaaatttattcagtcacaacgatcacatataaagcatggaaatgcagagcagacagccagagaagcagagcgcccaacggtgtgtaatgctgctttgccaacggcgggtggtggctcactgcaagggcacacgaacaatgggacacaaccaaagtggattctttcttcccacgttgatgcctatctcctccgtcatgtctagttcgttcggcgcaactccttcaagaagctcccatttaaagtggtataagagcgtagcaagcatgagctccacggtggcatgcccgaatgtcaccccggggcaactcctcctaccagcaccaaacggaatatactcaaagtttgcacctttgaagtcgatcttgccatcatcgaaccgctctggcttgaacacctcagggtcatcccaatgcttggggtctctgttaattgcccatatgttcacaaacacggtggtgcctttaggcacgtcgtagcccatgaccttgcacgcatggagacactctcttggaagaagcaatggtaccacaggatgcaaccttagagtctccttgatgataagctttagatacttgatgttaactaagtcatcttccttcactggatgttttccttgaagggtgtttcttgatggcccattgaattatatttgaagatgtatcacttcccgcaccaaatatgtcctgtataccgatgtagaatttagtaaattgatttaacaatgtcaagcaaaaaaccaatgtgccactgatgtacattcatcacagtactacttccggtagaaaatatatgacgttttgaagaaggtccagccaaaattttgaaacttctctcattaattttcataatacagtttgaaaacataaaaatgatatttgtagatttgtcctgaaaatcaatactttcatagtcctacagaacttactattagatttttttaacttatttgtaatacaaatctgtggtctaagttgttcttcaaagatcttaaaaaagttaaacattgtatatttctttactggagcattagcaaatgtgcttaattacctggataactgctttgatattgtccatggtgagaggcatgtcgagggcaccttccttctggatcctgaggagagtgtccagcaggtcctcctccatggcgccgccgccaccctgcgcagccatggcgtcccttacctgctcgtgctgccggatggcgctctcgatcagctcgttccccttccggtggctcgcctccgcgcggcgcgtcatgccgccgacggcggcggcgatcctcgacgacgggaacaggtcgtccaggctgaaccccgtgaagctcctcaccgcctccgtcatcgactccaggaactcctcccgcctctccaacctgtccccgatcaccacgcgcatcgtcgcgtccgccacggccgcggcgaccagcgcgctgacgttcacggcgtcgcggcgggccggtggcgacgacaacgaggcggcgacggccgcggcgaggttggcggcctcctcctcacgcacgcggcggaacgagcgcacgcgccgggcgctgagcatctccacgatgcacaccttgcggagctgccgccacatggcgccgtagggggcgaacaccacgccctcgcggtgggggcgcagccggcgcacggtgggcggccacggacgcgacgcgaagccggcgtcgtgcgtgcacgtcacctcgcggccggcgtgggggagggacgcgacgacgacggggaacgccgccgagctggaggcgcatgatcggcgcgtcgtcgagaccgcgcgccaggtccgccatggtgcggtggacgagcgggccgcggagcatcagctggtggaggttgccgatgaccggcagccgccacgggccgggcggtggctggcgcaggcgcgcgccgtcgccgccgcgcccgcgcttgcccccgatcctgacgaggagcaggagagccaagaaggcgcagatcgaccagcacgcgacctgatccatggcggtggaggccatggccatgcaatgcaagcgaccgcgttctggtatggagcggtgagtgcaactgtgcaagatcgccgtgcaaagctcaagcactgcaagcctatatagagaggacggaagtggatcttttgactttgtgcggtttacagctcagtaattaacatgtaaaccatattttactgtatttcacgtgtcagtgacataactataaactatacaaagtctaagggcacccacaatggttatctataggctctctataagagatccatgtcagcatattttcctacttggaagagattaaatgaagagagagagcaaagctatctactaacctggagatagtctatagagaaaaacgagacaatatattagagagctatagatacccatgtagacatactattgagatggtttactattaatttagtctattgctgagatgtacatgttttatagatagcaccttactttaccattgcgggtgctctaagaagagagttacatttacattccacgatgcgctacgtgatgaatgctggtgatagatagatactccctccgtcccaaaaaaagacaaaccgtgggtttccgtgtcaatgtttgactgtccgtattatatgaaaattttttataattagtatttttattgttgttagatgataaaacatgattaatactttatacgtgacttatctttttaatttttttataatttttttaaataaaatagatagtcaaacgttgaacatgaaaactaagtttcgttttttttcaacggagggagcagacggactgcatagccatcgcggtgtcgcccacaaaaagccaagcaggactcgaggtcaaaggaagccatatcttttgagatatagatatcataatgactactgatgcactgctatattggagatagtattcggtgacagcgtacaccatatcagtttcgtttaggtttcgttcgattaattcctcttcaaagaaattgagagaatcgatgcatttttttaggattaatcgaataagctcttatatgaaactgtttctcatgggaaaaaaatactctatacttgttaacagaaaaatgaatctattatgctgaaatttttatagagtaatgaaaaaccatttcaattggcagtagagtttcataaataattactagttctaaattcaaatcatcattacagtttgtaaagagtaccgtggtaatatagaaatatttcatatttagagctattcatttgagtagtgttgaaggttcacacactcacaaactcacaataccttcacttggatgtgatcacaaatgtaacatgtggccttgtaggaatgcgggtggtgataatttaggactttttttgaaatttggaattgagaaaacaaagaataggaaaagcataggccgatgatttgatcccatcttttgacatatagttcgagcctatttgactggaatggtttaggctgaaatctccctggtttggttcgtccggtttggtatttggaggtggggaagtagggtgggttggtttggtgagacttcatgagaaagtaaactagggcgattttcagttggatttcatcagcttattaatggactaattagcattaatcttaaaattcgttctgatgatgtgttacaccacccaaacatcaagtccgtgtctgttgcacttatactgggaaacaattataaactcctgaggggacgttccatcgttgtttgctacctgccttcactcgtcaagtaggcccgctaaagaaatatttgtatgtgcaataatgcataatccatatcacggttcacaactgagattaaaaattcgtctacaattggaaacaaagtcatagaatgaaaatgagaaccactttattaagtcgccacaaccatttatatataaaagcatgataatgcaaggtagagaacccccatggtatgtagcacaactacgacatagtagcttgttccaagggcacacggactataggatgcagataaagagcattcttcctacccacagtgatgcccatctcctctgtcatgtctagttcgttcggtgcaactcctttagggagctcccagtcgaagtggtacagaagcattgcaagcatgagctccacggtagcatgtccgaatgtcatgccagggcaaatcctcctacccgcaccaaacggtatatactcgaaatttgcacctttaaagtcgatctttccactgtgaaaccgttccggcttgaacacctcaggctcatcccagtgcctagggtctctgttaatcgcccatacgttaacgaacacggtggtgccttgaggcacatcgtaccccatgaccttgcatgtttgacgacactccctcgggagaagcaatggcaccacgggatgaagcctcagggtctccttgatgacaagctttaggtacgtcaggcttgccaagtcgtcttcacttaccatctgcttcccttgaagggtactccgaagctcgatttgtgctttgtgcatcgcttctgggttcctcattagctctgacaagacccactggaccatgtgtgaagatgtgtcactccccgcaccaaagatgtcctgtgtatatattacggcattatacaaagcgaaaatgacactattatcacccactactatagaacctggcatctgtgatgagtcatctgtgacgggtttgacgttaaagcaaatttaatgtatacataccaggagaacggctttgatgttgccggtggtgagaggcacgtcgaggttgtcttccttctggatcctgaggagcgtgtccaacaggtcctcctccatggcgcaatcatcaagatgcggctgcgcagccatggcgtccctcagctgctggtgctgtcggaaggcgctgtccattagctggtggcccttccggatgctggcctccgcgcggcgcgtcatgccgccgacggcggcggcgagcctcgacgacgggaacaggtcgtccaggctgaaccccgtgaagctcctcaccgcctccgtgatcgactccaggaactcctcccgcctctcgaacctgtccccgatcacggcgcgcatcgtcgcgtccgccacggccgcggcgatcggcgcgctgacgttcacggcgggggcggcgccgccgtcgtggccggtcggcgaggaggacgacgacgaggcgatggacgcgacgaggcgggcggcctcctcctcgcgcacgcggcggaacgaccgcacgcgccgcgcgctgagcatctccacgacgcacaccttgcggagctgccgccacatggcgccgtagggggcgaacaccacgccctcgcggtgggggcgcagccggcgcacggtgggcggccacggccgcgacgcgaagtcgaggtcgtgcgtgcgcgtcacctcgcgcgcggcgtccgcggacgacgcgacgacgacggggacgccgccgagctggaggcgcatgagcggcgcgtcgtcgaggccgcgcgctaggtccgccatggtgcggtggacgagcggtccccggagcatcagctggtggaggttgccgacgaccggcagccgccacgggcccggcgggaggcgcacgacgtcgcggcgcgcggcgcccagcctgacgaggagcacgagagccaagaaggcgcatgcgcagatgaaccagtacgcgacttgctccatggcgaccaagctgcgcgtttagatggatctgtgagtgcaagatagaattgcaaaagcctaggccttgcaagcgtatatgtagaggtgagagtgtgagatgagttgcatttctacgtgccgacgtagtggctgaccttgctgagagataatagatttaaataaaacccggcctctgtatcccttggatataatgctctatcttggagatactattcggtgaacattggtcatcttggagatatcttgataataaatgttaagaaatttctgttttagttacaattaatgttttaaagtttatggagtatatctgagtcttacttaaaaattaatgggccacatcacacctgttgtccacagggaataataagacaatactactaagacaataagttcacttgccatctcttatctttccgtcgagtttaaatcatatctctaaatcataatactccatccgtttctaaatatttgacgccgttgactttttaaacatgtttgaccattcgtcttattaaaaaagttaagtaattattatttttttcctatcatttgatttattgttaaatatatttttatgtatacatatagttttacatatttcataaaattttttgaataagacgaacggtcaaacatgtgtaaaaaggttaacgtcgtcaaatatttaggaacgaagggagcactaattaaattcgacgtaaaaattatgggacagtttgtggacttattccagtcaacaggccacattctcccacatgccttgattagatgggcctaaacccagctaatatacgtggaggcccatccatactaggccataagtcctgggagtacctatacatctttcgaaagatttttataatcgtatcacacagatttttaatctttatattaaaatccgatagatataataaaaagcaaaaagcaattaagaaacaccataatgaacattaaattaccatatcctcaagaaaaagaccaaatccaatacaaaatttaaaatttacatgtgaagattcaaaaattacagtgtaacttacaaaagttacagtgtaagtttcataaattacactgtaacttacaaggaaatgcactgtaaatttgagtgagaaaatcgagtgagagataagaaaaaatctttcgagtgagatatagcaaaatcgtaagtccttgtctattccgggctagggttttcggttcaaaacaacgggccgtatattatatgggccattatttagtcggactaccagcccatctccccctccaagcccagcacggcgcaacgcctccacttggcccgccatctcgccgtcccttctcacgagtcacgacgagcgccgcccccgccgccgccgccgctccactcgttgcctcctccatcctcttcttccccccccccccccccccccccgcgacgagcgtcggcgacggcggcggctggctggctggctgcctcactcctctcatcgaagatcgatttctctcctcctcaacccgctacctcgcctcgcttggatcgaagaaggtacccttctctcattctcctctcggcggctaccgaaccgggcagcccgccctgggtgggattggttcctttatttggcgatgaactactactacccttgctgatccagatttttttttctgtctccagtccatccagtttgctccggatttgattgctgcgtgcgtggagtactgtactgacagcggtttcttcccaagaatttttggggatttttggggattcagcttgagccttcatgctccaacttaggtgctgctcctgatgcgtcttatgagtgtcggatgccgccatggcgctgcgagggcgctgcaaccacttccactctgcagattgtctatctcatcatgtacgcaatctagccgagatgtcagcaatgttaacctcacggtggaggaagaagaggcggcgaggctgatcaagaattcgctctcaaaggcacgcaagtggagtgtacaggacttgattcagtgccttggagccgattgttcgggaatccggcttaccggaaacattgtggacaccttgctgttcaagtttggggatgactggaaatcggcattgggcttctttcagtgggcgcagtcgagggatgattacaggcacacggcttatgcctgcaatcggatggttgacctgcttgggaagatgaggcagattgaccaaatgtgggagctgttgtctgacatgcacggcagagggttggtcacggttgagacggttgcaaagagcatcaggaggctggcgggtgcgagaagatggaaggatgttgttttgctgtttgataaactggaggatatggggttggaaaggaacacagagacgatgaatgttcttcttgatgtgctctgcaaagagagaaagattgaagtggcacgtgaggtttttgcggtgcttagtccgcacattccgcctgatgcatacacgtttaacatttttgtccatgggtggtgcagtatccgtaggatcgatgaggcaatgtggacaattgaagagatgaaaagacgcggatttccaccttcagtcatcacatacaccactgttcttgaagcttattgtaagcagcgcaactttaggagggtctatgaagttcttgattcaatgggttctcagggctgtcatccaaatgttatcacttacaccatgatcatgacatcgttagcaaagtgcgaaaggtttgaagaagccttgagtgtgtctcatagaatgaagtcatctggttgtaagcctgatacactattctacaactccttgatcaaccttcttggtaaatcaggccatttgttcgaggcttcccaagtatttcgagtggaaatgccaatgaatggtgtgtcccataatctggctacctataacaccatgatttcaatcttttgctactacggtcgagatgatgatgctctcaatgtgctgaaagaaatggaagcacaatcttgtaagcctgacattcagtcatatcggccgcttcttagactttttttaagcagaagaggccaagctgataccgtccggcacttgttgagtgaacttaccagcaaacataatctaggtttagatcttgatacatacacccttctgatacatggtctttgtagagtcggtgataccgtgtgggcgtatcaactgtttgatgagatggttagtagtgaaatagcacctaggagtaaaacatgtgtgatgcttttggatgaagcacaaaggacaaacatggagacttatgttgaaagaatcgggaattacatgagttcctttggaatttctgtttaagtttttaatggatttattctcccatgtgattaatttattagtattcagcatattacatatatttttgcatgaaaaaatgatgcttgctatagtgattgggtgaagcatggacaatctgtatcttaccattaatgcataaactaaaagtcaggaagcatcttttgaccataaccataatagtaggttgttaatcagtagaattataggcaaatcaaatgcaaacgtcttcttttactttagtatttgatgcataatgcatttgtaaacatgatacaacgtcgattgaactaactatttttctggtatgttggcatgagtgcatgacagttactattgcctgagattcaaaatgcacgatcgaatatatacttctgtgtgaacaatctttttagattttaagcactaaatgtgtaaacaactaaacttgtatggattaactgcatataaacattgttgttgggtgtgtctagcaaaaaacttccacaatatatagctttgttactcttttgctagtatagtatgatgaaaactatatgtcgatgtatttattgtattggagaccatggagaaaaaaccatccacatggggatggaaagtatgtgattatattttggacgaagtctctcgcctgacaccttagaatactaccatcattttggtaacagagttgcaaggcatgttccattggcttaagaatcacagcaataataaccggttaacatgccatctctcctacataaaatgattgattcgattatctggaatagtggtctttatttactatttattgacatggagcaaatgatgcaaatggatcaagacttggatacgccttagcaagagcctggaagatttccaatcaggcgttcattattgataagtaaacaagttgctttacatcaacctctccctatttctatatgatatcagagaagagccgccaaattaatttttagctagtgtatgtgagtaccactaatggctggaaataaaattgtatttctttcgggagaaagaaactcaccaaactgacaccatgtttagatcccaattttttcttcaaactttcaactttttccatcacatcaaactttcctactcacatacacttcaaacttttctgtcacatcgtttcaatttcaaccaaacttctaattttggcgtgaactgttctatgaaactggtgctggtaatgtcctggtgtttgaattcgtgatgcctactgaatccactgttactttctccaggcaacgaatttctgcaccatctctgaatccatcttttgcatctttgtctacttgggggtactgagatacatccatccaaaagaagacataaccgtgcactcttgtactggtgtagttggagattattgtcatataggagtaggagtattagttttgtttgtccgagcttgtccaattcagaggtcatgtgcatctgaattatggcgcctttcacttgtcctgacctctgggattccgccggaccctctgtctgggtccctgtcgtcttcacgtaaactgaaccacttctactgaggacggcattactctgcctggtcggcatgtctgcccattgtcaaaaaaaaaaaagttactactagcatgtagttttgattgagtatttggtttacttttttaaaatggtttatatctccaatcctcgtcattaggcaggtcttgatactgaaataaaaggcacacgaggttaccacttgctaggtatcttcaatctgtcgttaggcacacatccggagtcctgactgatactgaaattttaaaaaaaaggtacatgaggttataacataaactttggtatcctttcgaatgataagttgataaccggttgaatcaacgctactgcatgttagcccttcatgggttttcagtttggaaattgctatgcattctacccaaatgtacaaccagcatacccctagtgtatgttaaggcacagctattgcttgtctggctcgcatggtaagaagcctgagcacggtgaatggtggatgtggcattgtcagatgtaagctgtatgatccagtcatattatagcacgattctttcagttatttgatggttttcatcaaatattattccaactagtaataagtcctttttttcaaacacagtataaatgcatgcgctcaaaatgcgcgtacactcatccatataaatgcatacaaacacaccctattcctatgagcatatccggaaaactggatcgatatattttaagattgacgaagtaaccacggacatctcgttatcgacggtacgtcacctatcactaaatgaataattagccgtaatgcagactagccttgactgcacgcacgtatgggttcgaagcatcccgtgcaaagggaggtgccgtcggtgcagccgtgcagggggagggcaaaggatcgttgcgaatgtgcaactgccgaccagtggcatgtgtgtgggggcggagtcgccggccgaaacgagcggaacttttttctggttcaacggcagttgattcattcatccctcctccagtccagtgtgttattttgggctaatagctgaatggcagaatgatccgaggtaagtaggaataaattattaaccattatatagcaaggtgagtatagcttaactgattatatttatttggtgaaatcagcccatctaatttaacacgaatgctcgcatttatggttatttatatatattttttggataggtgggatgtgcgtgtgcacccacattgtgagcgtcttagtttgcgctgtatatttttttaaaaaaataaatttcaaatagtgtttgagaaaattcatgtgtagaaagtttacaaaagttcacgcagtttgaagctcgggaaagcgcgtatatttttattccgttccggagaaaatgaacactcccggtcacatgtgtaggctctccgcgaaataaaaagtaacatgtctaggtgatgccgtgcacatgactaaggtagacgatcaacatgcacacacaacacatgggattcggatcaaatgcagtagtagtatggactgcaacttaaacagttgtagctgctacgttggatctaaatccaacggtaagtattaggtcggttactgtagcaaaagtaccaaaccataaaatattgttcagggtactgtagcacgagtactgtagcagttgatctgaactgtttatcacaaaaatgaatggctgaaaatgcatgcagtcctgagaattacgactgcacccgatctcaatcccaacacatgcgggggtccatcgttgtctgcacaagatgctaatctgcggtcaagggaaagctgataaacactgctccgtctctgacaccaaggttagattgatgatactcctacagattgttcgccatcatataatttcagatcaaaggcgttctctgtccacttcgcagcatccaaatcaaccacaaaatttccaacctgacaaagaaggaggttcattacaccactgattccttgccatttcggctaatgacaagtgaacagtgtggaatgtggttgccagcaatgccatgagatcggtgcatgaatcttcttggctttcttctgatcttcataagatcgatcaccggcgatcgattgatctggagcaaattgtttttaaattcgtcaggaacacgcttcaatttgggggcggtttcgctgccacatcaacgtcaaaagtaactgattaggagatgggcaacgcactttgctttaattctgcaacacatgccatagaatcattcatccagtagcttcgcaataactagccagatcatatcaccgactgtgcgcgccgactggttggcacatactaatcctatatcgttctaatatataagaacttatccaaatacgttgtacaattatgttcttgattcttatattttgaaacggaggtaataagtttgtgtgaaattgcaaaatacaagtagttcgaattatgtttgattcgactgcaaatctgtattaagatgacacattgcatcaatgtacaaatctgacgatgacagattattgtcgggcacagagcgtagtactagtaataagaaccatagtttaacaatactcaggcagagctcatattgaattcactaaattcaaaaacatttgatgctgcattgtacggagtactacacagtggcagccattgaatttgaaatcaagtccattattacctcctgtggctatttttaattacacgcatattactcctgtcggccaaaatagccatgattagcactaacccagtactgaaactacaaagaagaaatcgccatcaccatgatcatcatcatgcacatcaactatgtgcaggcctaccatcgctaaaaagcaagccaccaaactgcacaggacagtacaaccctttttgcatcattttgccaacccaaaccctaaaaccaatccaaatcaaaccaaccaccttcctgcgttgatgaccactgctgatcctggtgcaatggctatcactctctctctctctctctgtctgcctggcgtgcgtgtccccctcatcaatgacactgtttcgtttcacctttaattaaagattcctatcctctccaatgattctttgctctttttttttctctcattctgatcatgcaaaaatttccattgaattctctgtctccctgctttcagtgaaaactgaatactgaagaagagagataatgcatccatccatgtgtgtgtgtgctgtgttgtgttaagctttcctttacaaagaggaggaccacggtgctttgtcagtgtcactgcctcactgtttgtggtctcaccttttccctatcacgtcctcaacttacactagtctacatgccacctttatcactgtgcttgaaatccatggctattttagtggcctaatgcaagagtactcttcttgaccctggtggtgagtggtgactggtgagctgagctgagcttgcagttttggttcttggggtcttgaggagttgagctgtggtgcttaacacaggcatagctgcttgcttctttctttcacaaggtattctttgtcttcagatttgcttcattgcttggtcatgttgtatgtcttattatgtgttcctatgttcttggcttttcctgtcaatgtgtactagactactagtgctgttctgctctgcaatatctagtgttcttgctatttgtagaacagaatgtgaaaagaacagcacatttgtttaattttagagtttcagagcagtatgttcttcacctatgaaaaaaaaaactacaatctcctttcttggcagaaaagcagtggcaacaaattggttaattctattcttctgatctccattctgcatatggcctctccccttacagcttgcaaatgctttcatcctactagcagtgcaatagtgcaatccaaccacgagcaataaataattgtgtttttttcttattcttttctattaatgtagtcagctcacatggtgccatcttcttcttccactttggtgcagttgttggcattggctccatgtgatcgatgagctgagagagctcagctcagctcagctcactttcgccactgcagcatcggcgagctagagctgtagatcttgggaagatccagcaatggagaagccggcgtcgtgctgctgctacttcccgctgcggtgggagagcaccggcgaccagtggtggtacgcgtcgccgatcgactgggcggcggcggacggccactacgacatcgtccggcagctgctgcacctcgacccgaacctcctcatcaagctcacctcgctccgccggatccgcaggctcgaggcgctctgggacgacgacgcgcgcttcgccggcgcggcggggcaccgcgcgggcgtcgcccggagcctcctgctggagtgcgagtgcagcaagaacgggggcgccgccgccgccgccgagaacacgctgctccgggcggggtacggcgggtggctgctctactcggcggcgtcggcgggggacatggcgttcgtgcaggagctcatggagagggaccccttgctggtgttcggcgagggcgagtacggcgtcacggacatgttctacgccgccgcgaggggcgggaacgccgaggtgttcaggctgctgctggaccacgccatgtcgccgaggtgctcgacgaattgccccaacggcggggaaggcgcgcgcggcggtggcggtggccgctcctcggtgttccggctggagatgatgagcagggcggtccacgccgccgcgaggggcggcagcgtggagatgctgagggagctcatcgagcgccgctccgacgtgtcggagtatctcgacttccgtggatccaccgtgctgcatgctgctgcagggagagggcagctagaggtgaggcatctacttcttggccattgcttacttcactacttctgcaaaatgcaccatagtgaacttctgtttgtgccaatatgcatggatgacaaggtagatgcccatttcatcaggatgtttgggtgaaaatatttctaaactcgatatctttcaacgttatgaaaccaattttgccttttgatgcgctgcaggttcttacccggtaatcgatttcaacataaatattaaggaacaaattattttcattcgtcctatgtgatgattagtttgagcttggaaggatattgttcagctagaatgctgcgtgtaacccaaggagacattgagatatgtagatagttgtcattaaagaacattttttttatcttatataataagcataccacgcccagatgataaaggctcatttagttaatatcgtcatgctcaactctccagtgtattatgaaccaaagaataattataaagaccatactgatttggcctctttgacatggacttcaagttgtgcaattcatgaccagattttctttaggaattttagttagaagcaacaaaagctccaatcattgatctctctccaataattcgagttgaaaagtggatgtactccttgtcgatccagtttagatgggggtaaaatcacactttttagatatatacggttcctttctgtctcttgatgttgatattcagccaactttctttctgtttcttgatgctgatattcagccaatatttcttgccacaaatcattgtaatgttaggtgtgcaaagctccagttatatgcaaactagaatggaagtttccttctcccagtattatgcccttatgtatgtaaaacatacctcttgcaggttgtcaagtaccttatggccactttcgacattgtcgattcgactgataatcaagggaacacggcattacatgtagcggcctaccgagggcatctgcctgttgtagaggcattggttgctgcatctccatcaaccatttcagctgtcaacagagctggtgatactttccttcattcagcaattgcaggtttcagaaccccaggcttccgacggcttgaccgccaaatggagcttatgagacacctgatacgtggaagaacatcaaatatccaaaagattatcaacctgaagaatgatgcaggcctcacagtccttcacatggctgtggttggttgtgttcatccagacctcgtcgaactcctgatgacaaccccatcgatcgacctcaatgctgaagatgccaatggcatgactccacttgcattgctgaaacagcagctgcgctcttcaacatctgacaagctcatcaggcagatagtttccgcaggaggggtgctgaattcgactgttctgcgaactcggtcagcgatcgtttcgcagataaagatgcagggagggattgcaagcagccccggtacaactttcaagatatcagatgcagagatcttcctctactccgggatcggaaccgcggagtcccgacgccctagctcatgctctagcaatggcaagtgtgaccatgcccatcatggagatgcaaaatgcggaaatgctgaaaaccatggatcttcagagaagaggctgagctctgccagccgtgccaaggaccgtctcaagctgatgctgaaatggcctcgtcagaagatgtccagaggacacaagaaatccgacgatggcgacgccatggattccatcaagaagctgagcgagcaggccgtcgagaccccggccccgctcaggcagacattcaccaagacgacggcgctgaacaacaagaggaccctcgcggtgaagacctcgactcccagctcggccaccaagaagaagctcaacagcaagctcatccacggcatcatggaggccatgccgcacctggcgtcctcgtctccggcgtccgccttcccgaggtcctccaccccgccgccgccgcagtccggcaagatgaagggcgtctgcctggaactggacgacgagaactcgatgacgacgccggtgttcggcaagctgaaggacatcgtgctgaacaacgacgacgatgatgacgccatgggcgagccgtcgagctcggggtcgtccgtgaacgacgacgcgtcggcggagatgccggcgcggcggcacgggtgcggcaacgggaggctgatcaacatctgcttcggcgcgcagggcctcaccgtggaggactcggccagcgggcagcagaccagcaagatgttcaagcagcagtgcctcagggtgtcctgactcccgagtgactcacacgcgcacacggtataattagcctgcttttctttggttttctgactcgaattgagcttgcagttcaacggaacatatatggtttctgcatgttgaactcgtcgggcttgtgtggattttgttggctgctgcgtgtaaccgtatccttgcgtggcgtgcttggtttctggttgggcttgtgttaacgccttaacggcttacttcgatgcaaatatatttggtgaatgtatcagctagttgtggtgagttagtcgatcgttttgtttaatttaaacaaacaaacagcagttattcacgtttccggaagaatccctgcacaaaacggaatgaggaaagacaagaaatatcttgtgtattgagaatattgaacatccacaacaaacagtcgacaaacatctgacaggagacaacaaattgcgctaaaagacgcatgaattttctttttttttccctgtaaacaagaaaagcagaagctttttcctatttgcccatatgcccagcaaacaactatcgcttcctccactacatcaaaattcgaatttacagcaggaagcaattggacaaaccgaaaactagagaacgaacgaacgaaaaatctataagccgctgggcaacaccttttgccgctgggagctttagcacctggatcactaattcactatgtgcaaagaaccatttggtcctctcattgcttacccaccttgcggcctggccatggcacttcaaagatggctacatacatacacccgacaacagctcggagtaccgcaagtcgcggccattatggctgtgccgtcctccaagcacatatgatgatttgtagggcaggttaccgcgatactccaggcgcataatttacgacatccagcagcatcaaaattgagggccttgttcgagctagtttggaagcagaaggaaggagcgtctaccatatgcacagctaattcagcaactagcccacaagcactgggactagttgatctctccttcctctgcatctttagtgctggggacactgctaggatcttcttcctcttcctcctcatctgctttcatgaagagtcccagctgttccaatggattgcctgatccaggaagaaaactgggcatgccatcctgggaatgctcaggactagtctcatcaacagaactcacaatatgttctgtggttgccgttccaagcatttccaaatcctttagatggaggttgtcattgatttccaccgttctctccatctgcattaagttaaaccactcaaattttagcgggaaaaagaaagctcgacaccagtaaatgcagtttttttcactagcctcctgcagggcctggcgagctttctccctctcaaggtcccgtttacgcttggcttcagcttcagcttcagctcttcgagcttccatagctgcatttccttcagccaacagccttgctttctctgaatacatagataaggcacttctcagggaaaatgtaagaaccatcatttaagagtaaacttcaggtggatatgcctgttaccttccttctggagcttttccagctcctcctgtttgtctccaccctgagctcaccaaatgttcgttccatgtcagaagcagcgcaacaaaagtgaacaaacaaaaccactcgatgaaactaatcacaaacctggctgagaatcccctgtgccttaacaatcacatcagcataacgactcctaaggagggctgctcttaagagcttgtctggggagacttgcctgtcgggttttgaattctcccctaaagtttcatagggaaaggatcagatgatccaatcagcttaatgcactgagaccccttaatggcctcatatgtactgcttgcaaattcatgcttaccctctggggcaggctttgactcgttatcctgctcacggagctccacatcatcagcaggacctgtgattttgaaagttgtaagagcattaagccaaaagctcatccaactgccacatgaaactacaaacttgtgctgctgtgacgattaaggtgcattttgatttctaaaggtaatttttttgtagattttaacccaaaacttggtcaaactacaattacatttagtgcataaaacataccaatagatttatatttcaaagagttctcacactgatattatgcaggtgcttattgttgaatactttttcaaatcaaaataagccttaagaagacgtggggaggtagtagaacagaaagggcacaggaatcttacggatggcatcgactggacttataacatcactcttttcttgctccaccagttgttcagatctcttacttccctaaattatatagatgacaactatttcagtgcaataacacggaagaaaaggaaaagttgtttcgatgagaagaaaaaagcaaccttgacaaaatgattaagagggatagatatcacattcaaaattgagcctaaatttctcaaagtaccacagtaatagattatttaaacgaacatgtctgtttctgaccaaattagacaataagggtatattaaattaatatgagagtcagcttatacagtatgcaggggctgatgtctgattatagatgcatagcaatcaaccggccagaacaaaatattcacaatttttcatcaagcacccaatgacaaatagccaaaataccttcggctttcctgggctaccacctttttcttgttcgctttcactgtcactgcccgactcagaatctgcattattggagtaaatgtgattgaggacacctcaagacaaactcatgataaaggaaggcttatgacaagtgggactagcagaagtccaaacaggaacaattacgcaaacatttagccacacaaacaagatatgatgcatgtattgctattctgaagataagataagattgttgcaaattagcacaagggtaaattgcaggatggtatcctgcttgttcgtcagttaacgatatgaataacagtaaccccagttaaagtttctataatactgataatctagtcccccagaagatcaaagaaagagggaatattgttgaatgcatgagcatgcatactgactagtgggcatctaatggtacagatgcacctacagtgaagtataattgtgcgtacttcttgttcagtgcctcgttagctaaactcaactaaacatctactcaaaagtaattagcttcaagcttaaacgtcacagaagttaatataatgaaatacacaagtgtttgaagtaaccagatcattcttgcaaaaacatatttgtttacaaggacatatatcatactaaagagagtatgtaagcacagaggagcacagaccgctggaagaagatccagagtcactgctggaactacttgggctaccacacttgttaggattgttgtgtgcatctttttctatcaatataggggatgcattcccgcaaatatctacatcctcctcaactggatcaccacctgcagagaaaaagaagttgtaagagtactgtgatgttgcataaaactaagcattagcaaaggaccagggaaaaaaacctttgcagggatttgtagaggagtggctaaggccagatacattagcagcctcattctcagaaggctcagattttgcctgctggctctgctctctctcttgcaaatacttgtcaacatgtttcttcaactcgaatagtaggtcatcactgacagcatggatatcaatctctatctctccatcaccaagctgatctgtgttgttgtcaatgcattgctgcaacaaatcaatgatgtgtgaaggtacctccggatcctcagacaaagatgccaaacagttcccaaatgattctttctcctcgaatgtcatttttggctttacagactctgttggtctaacagactctgttggcctcacacactctgttgacacctcactgcagtccacagggggagtcttcctcctctttgagtcagccctgtcaacctcgacgtgcgcctctgtggcaatggaagccagcttcttttcaattgtcctccatcttgattcaaacatcttgtttagttgaatggcataatcatgcactacatgcccacgaggattgtaagtcatcgcatttgaaaaggtcagccgtacatcggctgcaaattcagatggactcgtgtaggaaccagagtcaagcttattcctgatagttccaagatccatcggtttcttgatgatttgaaaataatctggaatattcagcttaacagcatcaaccggggagtcgaatatgttactacatttctgagtcatcagctttttcagaatagcatcgcattgcttaaaaatcgcatcctcagtcaacaccgtggaagcctcaggtcggggctttgtaggcaagaaacgccccttggcaccacggaccacatggttaccacgctgtcccttcttacctcgaggggcagccgaggacgagagcgcgggagctctattgacagggacagggacagcaaactccggcttcttgaggagattccggaccgaatcaagctctgtgcggaacctcttccggagatgcctcctctcggaggaggacatcttggctgggacgaaaatctcccgcttgacatcgaagccgtcgctgtttaggctgatgcacttgcgcttgggggccgaagagtcctcggagtcaacacgaacggggctgcctgccgcgccctccgactcgccaacggtctccgcgtaaccccgtggcgccgctgacgccatgccccggaacgccatttcatcgtagccccgcttaatctgcctctgctgcccaaactccatgaggaccgtcggtgtcatgtgcccgggcgccagatctgttcaccattgacaaccataagagacccaagattcagtcacgcggaagggaaacttgaacttagcggaatcaaatgccaaatttgaacttcccgtacagcttgatgtaagagaacaacagaaacacaaaacgtattcaaaaagttccctccaaaaaccctaatcccacacctagacctaattcgaattcgaaccccaccccccgccacgcacgaatccgacaccgcgacccccgaatcctccaattcgcgcccagaacctaacggcacgcgaaaccgaagaaaccccaagagaaaaacatccccgaaaattcgaaacggagacggggggtcgcgagaacctgaagaagccggatctgaagagggcgaaaccctaggccggggatccgcggcggacggcggcctcctcctcccgtgcggccgccggcgagccggatctgctccggagacgggcggatctgagggtcgcgaggtggccgccggctcgagacgcctccccgccttatcctcttttttttttctcttttttcttctcttttctttttcctcctctcgagtcgagccgtctcctgcttatccttttccttcgcgaagcgactcgacttgagccgagccgaggtggagggagccgagccgagccggggagagccgaagtggagatccgcgcgggggaagcgagagacccgaaactgggaagcgaagcgatgcgagactgtgacgcgcgaggggcggacgccctcgcgggcggtatttataggcgggggtgaggccgcgggtcggatccgggccgtcggcttcgcggggatcggacggaccaggggttagatctgggcgtgggccccacccgggccgacgtgacgtggagcggggcgcgctttgactttcttcgagaaggtccgcgcgcggacgcggattcctacccgaactgaggatgacgtgtggggcctactatagctcgggaccacctgtcagtgaccttgaggggtcgtgttggggtgggtggtgcggagatcggccgtcttttatcgagcacgcgggatctgggtacggtttgggcgcgccggggagcgaggtgacttggaggagaaggcttggtgccacgtggaaggaggtgcgtggctgggttattggagggaaggatgtaacgggtacgggttaggtaccgaaagagaaaaaacggaaggttagtcgttcgctccattttccatgcgattttcctttttaataaaagggccatattcggcccaagaaaataagggcctaaattgtaggccttttgtataagaataagtccaccttgactcccttaaaagtgaccgaatctaatccgtgtccctgaaccgcaaaaccagatatcatggccccctcaactgttaaaaccggtgcaacttacctcccttagcagttttggagaatggctttactgatgtggtgtctttgactcgatccaactagctaactcagcttgtgggacctacacgttagtgtcacaattttatctctctcctttctttctttattcctctctttttcccacgctgtctaacagcaaccgaggcggatgcggattggcaacgatagcgccgtcgcggccacacctcacggcgcggggtacggtggccacctcgctgacaccgccgcgggtggcgcttctttctcccgctccgcatggtcggcctcgacctccgcgacagccacctcgcggacacggccatttgctcggcgactggacgtctcgcggcggcggtggcatcgccctcgcctctattttcccccaagcgtgcgtgcgtgtacaccacgtccacggcgcacgtctgcgtcaagaacgtcgcgccagccggggcacccacgtcaacagatgggttcgcttctccgccgcgtcgagagggttcagctgaagaaaaaaacatcctccccctgcacgttttcagtgacccagataactcctctgctcatattgagtttcttcatctgggttatgtctgcctgaacacagttgctaccactggtttgttggctttgccaacactcatcttaagttcattaatcaattgttgaattttacgtgtcgtacaccaccaccgtcgccggcctcccttgctccgcctcttcccagaccagctcatccagtgccaccgacccgacctcctccaaccgctcgaagtatgggccacggtggccgcccaagctccgttgggccgctctcgtcacagccgtcggagaacaccgcgacgtgcaccaacgacgaaccaaggcagggcttggtcgagccaacgacgaaccgcgtcacggcgacggtgcaccggacgccgccatgaccgcgaagacgagcagcaacggcggcggcgctggtgggaggggaggccgacatagcgtcgcctcgaggccgcgagcgctgacggctccctctcgcacgccgccgccactccgcctccgtcgccgaagagggagagagagagggagaaggaagaagggatagacctacatgccgcacgcaccgacggctccctcgagctctggctcctctcccacggcgccgccggcgcctacgccctcccgcccaccgctgccactccacctccgccgccaccgctggccctcgctcgccgaagaggagaggggtaagggacagagggagagggaggaggaagaaaggatagacccagtgggccccacatttttttcccgaatgacgaagaggtcccacatgtacgtttttagttctaatgctacataagcaccacgtcaacggcacaccaggtcaacactgccacatagacgccacgtcactaaaaccactctcagaaaccgctgagggagtcaagttgcactggttttaatagttgagggagtcaagatatctggttttgtggttcagggttatagattagattcgggtcactattaaggaagttaaagtggacttattccttttgtataggacgtaagtatggttgctaaggccctaaaaagcgactcttttgtggtcgtagcagcccagtatagtttaatttgagacctatgtgttctacttctaagagcaccaataagagatttgctaaattctatcccaaaattctgaatttggaatcctaaacggaatgatgtaggaagaaaattctctccaagagattaagtaaaattaattccctaaaaccaaaagtgggccccatgccaaactactaacacgagacagtttatttaccttcctcacgcgtgattgtgagttccggatcacggttgtgcgctcacggtaataagatcatgtgtctcgatgtatgtcgccgttgttcgctcgttcccaaccctcgctgcccaccatccgttccctccctaaccctagcatgtcattgtctcctccctcccaattctagttgttgctcatttctcacgactttagtgtacgtcgccatgacactacgagccacaatcgcctggtgtgggcgccaagaactgaggggatcatttttgtgtgggcatgggaacaagatgacactggtgggagttagagattgggaagtgtgcgcgtgaaaaatgatggagcaaaatctaggagagagaaaaaaacacaccctaagtgtcagggttacagataaggcatacttcatatcctacgacttatgtagtacacggatatggtatactttcacgtatacgaatcgttcctatatacgctgttggaatctgttataaattatgggaattatctccacgagacaggtgatttccaaagtcctactcggaagggatcgagtttctgttataccgtgcaagatccgatgtctccgagtcttacttgggataaaaatgacccacgatataaaagggaccccaaggaggggtgcaaggcatcatatctcatcgccaacacacccactgtagtttacgaagtcagagtacgcgaagccaagtcgccgggagatcttgtcgaatacatcgactacgatctttctacttttgttgtaatacgtggttttccatcatcaatctcatataaaaactggactagggctattaacctgacaaggggcctgaaccagtataatccttatcttttgtttgcttgatgtcgtattgcgtagatcatcgttccaatgtaccctagtacccaaatcatctggtctacaagtatcactcgtcgatactaaggtgtcttatgatgggtgagtatcttttacaaaatggtactatcattacaatcactgacacgtaggttccacttttctattgtcatccacgtcaatggctttgtttggatcctccaggctattaaatagccctccggaatcttactatttatgagtattaaacgtagattactaacaaaacccattccataacccctgaactattttgcgagacgaatctaacgaggtatattaatccatgatcaaactattttgtgagacgaatctaacgagatatattaatccatgatttattttgcgagacgaatctaacgaggtatattaaatattaatatacctcgttaaattcgtctcacaaaatagaccaggggttatgacgctataccctccgttacaaaataagactttctaacaatcaaaatttatttatctgagagtatacctatttcttcacttactcatcttaaacaattgcaatgaatgctcatttcatttctccaactaatcacattcatctcattcatctcttgtttagtttcacgtataccaaccccgtgaaaggctttacgagtacttatactttgagagaaagaggatgctaatttccaagataaaaataataacaagatgataatgtcaatgtgtcggttagcttatgcttaccgaacgatgccaggtatacacacagtaatgcccagatttttctcaccagcacacatcagatctagtgacataccaaacgaacagtaaaaaagacatcaataaactgctgcatacagcagcggtttccactcagcgtgtacttgcgcactagcgcgctcattgggcctcacaagtactacatggaaacacgcggcgtgcgtgcgtccatgagtccatccacgcgcgacgagctgtgtttgtgcttgtgcccaaacattcgagcacagagcagccaatcccttcccttcgcatgcgtgcccaaaaaagttgcacttgtcacgtggggcgatggggtgtcgcgcgcctcgccgccttggattctagccacgcagcgggggaacaaaaccacatgctgggcttagcttagctcccatatgcgcacagcagcacagctcgtgctaaccgacgacggcacacagtagcctcacatgagtcgctcgcggcccaaaagcacacccccaacacaaccacacgcactacctacctgcacccgttcgtgcacgagaaacaggggcaggaaggatggccgttagatctctacttccagcggccaagaatctcctgtgacgccgcaaagaaaacgaatgaaacaaccgaaagtaacttgttcttaacgatttaaaaactaatattaaaaaaaataaaccacgctaaaaaattattgaaataaactttaatatgaagttcaaattttgaatttcaattatggctgataagctactagaggctggagcgatgtagaatgcgaactggatgggagggtgaaaatgatgagcggggattgcgatttttttacttactttttttaacttaaaatcaataatatgtggaaccgctattcagaaaggtcatatgttagtgatcacgttaaaagaaaaagtaaataatacttcctccgtttcacaatgtaagtcattctagcatttctctcacatttatattgatgttaatgaatctggatagatatatatgtctatattcattaacatcaatataaatgtggaaaatgctaaaatgatttacattgtgaaacggaaggagtagaatcctgttgcgatgagcggtgcatcgtcgtggggagaacgtgtggctcgttgatgatcggcggtgccatgttttcagggaccgagcggcaacttttgtgctgatagcgtgcgtcctgccgggcgggcgtgcgtcgttatgtgagggcaaggccgcttatatgctgccgcaattaatcggaagaagctgaccggtgccggccctgaggacgtccacggtgcagacgtgcacacacagtacagtctccgcttgttacagtgaccgccaatcatgagctcaacactctctattcccttcctgattgctgacagctgcagctgacttccttccagctatagcagcagcagtagctgccgtcacttcgccaccacagtgttctcatctccctttcatatcccctgcttcctctccgtccatggaggaggtggcagtagcagctggcatcctcctcctctgatctcctcctcggtcacttcagtgcttacttgccggtgatgaggaggtcttctcaggggaagagctccagcggcggcggcgttggcggcgtacggaggtatgacgtgcacggtggtggtaacttgctggcctgctacgcgaaggcggcgaggccgaggccgtccaagtgggacgacgcgcagaagtggctctcccgggcgggcgacgacgactgcggcggcgaagctacccggcggaggagctcctgcgccagcgccgacgacgggctgctgctgcctcctccgccggcggcgcggaagggggccggcggctggcgatcgtggagcaacgtggaatgggagggcgcgcccgcggcgatggcgccggcgctgaaggccgcgcgcggcgacgagggggtggacaccaaggtggtggacgccgtgcaggcgtacgtgccgcagcggtgcgtggtgtcgctgagggacgtcggcacggagatgacgcccggcgggagcaaggagccgtcgagggcgaacactccccgcgtcgtcgcgccggcggcgaccgcccgtgtcgtcgcgcggggcacggcttcgcctgggcaatgcgacggcgggtcgcgtgacagcgccgtcgccggcggcgtggtggatctccgggcggctcgcaagcgcgccgatcaggggcacgacgaagtcgcgggcacgatcacggccgtgtcgcccgcgacggcgtggggcgacgcggagcgcgccaagtacatggccaggtgaccgatcgcgttccctgctgctcatcaattttctttcatcttatcgatattaacatcaatataaatataagaaatactagaataacttatattgggaaagggggaagcagttctttgcttgttatccgtctaaaaccagcaaattcgactaaaaatttagttgctcatctcctctctaaatccatggttaaaatcggtttgaactacgaaatcctgctgcaaaaatgcgctaaagctgtgctctgcatgtgcagtcaacagtgcgcagcattttctttcgttagcattttcttttgtcggacagcaccacatcagtgctgaactgtcagctagaagcactgagacaatgacatcctctgaaagcctgaaaccaaaagcaagcagctaccaccactatacttgtctactcacgtttgcatcgtgtgccattgccattttcgctttgtcaggtacaggcgcgaggagatgagaatccaggcgtgggagaaccgggagcggcggaaggcggagctgcagatgcggacggcggaggagaaggccgagcggatgaggctgcgcgcgcaggcgaggacggcggggaagctggcgacggcgcaggcggaggccaaggcgcggcgcgcgcgcgccgaggccgagctggcgctgggcccgcccgggaggcggtgccaagggttggctgctcacgcggagcgcgagctggagcagcggcagcggccgctcgccctcctctctctcgctccggttgccgctgctgtgccgctgagaaaaatccactgccacagtcaaaaggctcgtgatcgatctgagagtttccgctgcttgttgaaggcggtttctgatgtactactagtaccaggcacagaagaattttatctttgtaccatcaatgaagacccgtttagtttcccaaaagtttttcctaaaaacatcacatcaaatttttagacacatacatggagcattaaatatagattaaaagaaaaactaattgcacagttatggaggaaatcacgagacgaattttttgagtctaattaatccataattagccataagtgctacagtaacccacatatgctaatgacggattaattaggcttaaaagattcgtgtcgcggtttctagacgagttatgaaattagttttttcattcgtgtccgaaaatcccttccaacatccgattaaacatccgatatgacacctaaaaatttttatttcacgaactaaacagtcccgaaatataatcttgttacacgaataaatcagattgttttattgtactattcggcatcaatcacggcatgttatggtccgtgccatttttcaattcaagcatgtggtatgtagttggactctttgaccaacctgtcaggtcggccactaccagtccatttccactctcggcgtcggggccccacctgtcatggacccgaatccccccgcgccgcgtacgcgaaggtcggtgggaaaccggcagagcaaaccgcacgataagaacgcggccgacgtggaccacgtggtgcgcggacgctctgcgtgcccgacttggctttctcctcctctctcctcccgcaacccgcgcacgattcggttccccctctcctcgcggccgcctcttcccccctcgaatcccgataagcagaggcggaattctccaccgcggcagcaacatgcaacccccagttcgattcggctgcgaggtgaggtcgtccgattcccaattcggtcggaatcacgcccaattttttgtctctactagggtttggtttcggtctgaggatttctagtttggtggagaatcgaggtccgatcccccaaccgggtcggaatcacgcccaatttttgtctctatagggtttggtttcggtccgaggatttctagtttggtggagaattacctctgggattttgcggattcgacgtcggttgctagggtttgtgaggggagcgattcatggctgcggggagccacggggggtacaggggctacgaggtggcgagggagcgggagcacgacgtgggggtctctaggaggagcaaggagcactaccaccaccgccacccgagccgccaccgcgactcggaacgccgccgtgacggcgggcgcagcggtggccgggagctgtcgaatgggtacagccaccgccgggattcgccgcgtccaccaccgaggaggcgtccatcggaagggaggacggaggacagggagcccggcgaggtctcaggtgggagtggctcagagaggtccggtgagcgcccaatgaagaccggggagccgagggagaatggtgtcacgcgagtcagcaaggaggaggcgaagatgtccccgagtaagaagaggaagcaatctccagtaatttgggacaggaatggttcaaagcggcaggctcgagaccctgtgaggggcattagagaggtagatgctgtagttgctgagattattatgcatcagtcgcattccttgcctgtcatgagctcactgtctagcataggcgatggacactcgccaatgattttggatgtgtcagttgataaggtacaggagtatgagaagaacaggattgtggatgaggaggaagagggatacccaacaatgagaaacattctgacctcaagatgggcagatgctggcgacgaggaggaaaatgtgtttgtgcccaagaaaaagaagagcgtgtcacctgtcgactcgattgaacgagggtccacaaaaaaggttacaagccctgagtctggagaggtgctggtgtataactcagtgagaagctcctcaaggtcatctgactcgggggtattacagggtagtgcaaaccgggaccttgaagtggagaagggtgacaacatagatgttgaggaggcggctgatgatgattatcctgctggtcatttgctggattctgattttgaaggtgaggactgtaggtctgaaacccctgagtgtacacggtccccacgtaggtgcattaacatgcttcaaggttgtaggagcgttgatgagtttgaaagactcaacacaatcaatgagggtacatatggagttgtatttagggtgagggataagagaactggtgagattgttgcgctgaagaaggtcaagatggagaaggaaagggaaggtttcccactgacttctcttagggaaatgaatatcttgttatccttccaccacccttcgattgtggaagtcaaggaagtagttgttggtagtaatgacagagatattttcatggtgatggagtacatggaacatgatcttaagggtgttatggagacaatgaaacaaccgtatagtcaaagtgaggtcaaatgcttgatgcttcagctattagaaggtgtgaagtatcttcatgacaattgggtacttcataggtaatgattgttaatcactaatttttcttctcctttacacattttctggaattggttttgatgttagattctaataattatgctgttccatagggatctcaagacatctaatcttctcttgaacaaccgcggtgagttgaaaatatgtgattttggactctctcgtcaatatggcagcccgttaaagccttacacccagttggttgtgactttgtggtacaggtaagtcattagacagtctatagtttcatacaatcagtctaactcaaaatttaacttatccatggtcttattacatgctccttatgactgcagggctccagaattacttttaggtgcaaaggattattctactgctattgatatgtggtcattgggttgcattatgggagaactcttatcaaaagggccactgttcaatgggaaaagcgagatagatcaacttgataaggtatatggttttgacttttgtctattccatatctttattttgattaaggaaatcttatgatgaagtgatttccattgcagatatttagaacacttggcacgcctgatgagaatatatggcctggttattctaagttgcctggtgccaccgtcaaatttggcaaacaaacgtaagtgccaactcatttcttgtttctgctggtttatttatttggatcatgcagtttctgtatcatataaagtcttaccactcattcctccctcaggcacaatagattaagggacaagttccgagctgtatcattcactggtgggccgatgttgtcagaagctggatttgatctgctaaatagattactgacatatgaccctgagaaggtaatacacttaatagagtgatccatctgattcttgtatcttcattttgtagctgactgaacatggttttttcatacagcgtatatcagcagaagatgccttgaatcatgaatggtttcgcgaactacctctgcctagatcaaaggatttcatgccaacatttcctgctctaaatgagcaagacaggtacgagtgattttgctttttacttctaatttatcatcctaattctgaaattggcgttttatgtggtttgtaatgttgtatttgcaaaacatgcaggcgcttcaagaaacatatgaagagccctgatcctctggaagaacaacggatgaaagaacaagggaacaatggagatcgtggcctttttggctaatcttgaaccatcactataggtctgctgtggatgctaattttcagcgtggaatcaatggaagtacatgtcttccaaggtgagatatccactggaatgaagtatctgtcttcttggtgcctgcgacaactgatggcgttctttagcaggcatatgaagggggataacatgtctccttatggtccatgctagctattatatcattgcagggttactgggttagctctttctcagacttctggtcacaatctaattcacctgcattataaggtgtgcagatctaacccacctgcatgatctggcctattaacttctatctggtgcaccagttttgcttctgaaatttctgactgtaaagtaccttagtttggtactttgtaaacaatgatcaacaggacctttttttttctgtgcaatgagcacattttcttttgatcttcgcattttgtttgcaagagatggatggagcaaaagagggagggtgcattatgctttttgacgaggaaactggtacatagtaatgcaaaatgtaaggtaatatgctgaggcttattgtgtccactgatgtggtgtataaaaatgaaatgtatctttaatcttttttactgtactttgcaagatcacttcagttgctccctgaagctgcttgaaaactagctaatttatgtaactggtcattataaaaatgatcctccactttctggaaggaaacaatacctgtcagatttttcaatatcacttgcgtgctacaatgatgtattactgactctatctacttctaatcttgtgtaatagaagaaccaatcaatttaatatcatttgcttgctacaatgatttatcagacaataactgactcttgtctacttctaatcttgtacagtataatagaagaaatcaataatctaaggacgtacgattgtattaatttatctttggaccatttgtcttgcatcatttttttgtaacaagtgacagccaggaagagttctttgtttttatttatttatttatattttcttctaatgatctacctttttaatgataggccgctagacttttatcaaccaaatcattattcatgataatggtgaaagatgtgaaatgtttttaactctgaggtgctggcttttccctcatgaaaaggcaatactcactgatctttgattcattttgctatcctgttgccgtatgttcagttcaaatcatttgcttgtgctttacagatgattatagtgaaatcagtgattcttatgatgtccattcttgcacttatcataataaatctacatgtcatattgacttatcactaaagttcttgccagaccagttaatgatgttcctttatgctagtttgaacttgctggagagttgattgggttcactgtaaacaactaagtgttctgtgacacatctgcagcttaagctgtggctataccgagacaggaagcttgatggacgtatctaattgacttatttgtggaaggcttcgagtcttcatctgtgatctgttactgttgtgaattctagtggtcagtctgctatcttatttctcaatatattggtgatcagtatgcttcttgctagtagcttcttttgtagctgtacacctgtttttttttttcaatgacagatatattcttgacatgttatattttcagtcctgcccatccacatatgtgggacatgattttagtacgagttaccagcctagatgtgtggatgaatcaggattttgggcaatccataatttcttgtatctccttgtgtccatgcctgcaagtacagctgtgtgttatcctgcagaacctttcgttcttttgttattctttttcaagtagaatcatgttgaagaattgcttgcatttgataaaataatattgagtctggattctgcaactggaaactcattgtagactggtagaaacaaggaaaactgtgcttttgtaattcatttccacaaatcatttactcttactcctacctttttcctttatgttttagtaagatgcagactgaccaagaacaacgttgaggcgcaggacttgtcatggttgtccagtattttcgaaggttgattctatcaattccgcctgccttttatatatatttacaattacccacattccttgccagttgacaccatgatcctactttttatcttctgctttacaatctttcagtgctgctttgctaattttctactgtgctactatcaaattgcatgctttactggcactattttcactaattatttctcttgcgcacctgtgaaaagtttgatgcccctgtggctaataacttttttagtgtcatgggttacttgttttaaacttataagtaaatattctattgagtgaaaggcttgaaaattttgtcaccaagatgcgaacgaccattaaatactcagcacagttaaggcttggaaaataaggttacatgtttagcatgacagtgcgtgaagtagagaaaaaagcgctgtcagcaattatgctttcctgaagcaaatcgatgtttctggtattcgaacttttagggcatacaaaacagtctttatagcaggctcttgggggtaccacctaagctcagttaatatcaactctctgtagactcttagcgccagataatagggaatttcctcgcatgaggctagataaaggaaagaagaataatgataaaaatattttggtggattcatggttagagcctctgttgtctcaattgttataagaggatagtctctaagatgatgtgtattaccaaggaacccatactaggctcaactgttgtacttgccatactacctccgttgtaaataagtgcatttctggtttcctaagtcaaactatcctaattttaaccaaattcatagaaaaaacaatactccaataattactattcaaatgagcatcattagttccattgtgaaatatattcatagttttacttatttgacatggtagacattattactcttatctataaacttatgcatttgatttagtagaaaactacaaacgcacttattttaggatggaggtagtagtagtttgtctaaatgagaaacgtatccatgacagtcacactcacacactttactccatttccttaatacaaagaacaatcttaccaaccatgcttggttctaccagtatcaacactctattcttcttgtcgtgtcatggatctgcactgcatcttttctaatgtctttgcatttacttgttttaactgtccctttgtttgtgtcccctgcaaacctcgtgcaaagcgacaatgggccatactccgagttgcagaggcaacaagttctctacgtctcctatcgtatgtctgaccattttgtaggagcggagttcagggacctttgtcaaggcaggcggccggatttcttgtttccggtgctgcaatatgctcaggcgcgttccttttttcttttttttttggagaacttagccactaggtaaaggttgtaaaatgccgtagcatctgttctctgtaaatacgactgggtgaatacagtgaattggtatgtttcactttcgtcgatttgttggtttgaaccgtgtctgaagttcacaaatctgtacactatcatgctgcatcagtcgaatctctgggaaacggaatggtcatcagacgtcttttgagaatttgagatctccgagcactatgtataagatgtattagaacgtgtctttttttctgaacacgtacttgaattccaatcactatactttgtcatttcacaaacaaatatactagattgaaattgacgagaaacgcatccccagtttccctacggagaagtaccatccaaacaaccatgcgtatcgaggtctgaagatgcaaaacctgtggctttcagtttctactttcagtttccacagtccagtgctctctgcttaggtggccactggaggaggaggtattgcagcaaagcaggtagcaactggtgggccccacaccctgagtgtcctcctccagaactatagacaaccaaatgggccggaggcacgtgggccggcccgggcacggcggtactgtggcc

SEQ ID NO: 7013 - DNA, 55448 bp, Oryza sativa
ctggctaacgattgtcagtagctcataactaaggttctcatgtgatacgaacataggtgctgaaaacaaaacggacactgttctaacatgcactaccctatagatatttgtcaaagtatgataccgtactttggattatcgtgatagtatttaaaaaaaatcactttctctcagttacatataaattcttctattattttgggataaaagttaactccttcgatttatgtgacggtggtaatataagtctatgtttaattagatgaagtagtatcatcagctatatttttaataataaatatctttcattaatatatagtaaaattaaaatgttactttaagtcatctataacatacacaataaaaaaagttatataaagttgggaaactccaaaaatttaaaagaaagaatcacacataatacaaatagatatgaactaactccattattgtgacatattttttctaataaatttgaggatatacattttcaagtaatacgcccaaaccagttattaacgaacatacatttcaaatagagacaaaatttttttcaaaaatatgatccacacataaacattcgtaataaaagttcaaacaagattaaacaacatgcccgcgcgtatgcgcgggctaccttcctagtttttataacagttgtactccctccgtttcatgttataagatgttttgacattggttaaagttaaactactttaaatttgactaagtttgtaaaaaaaatagtaacattttcaaccaagacaaaaaatttattatgaaaatatattcaatttattgatttgatgaaactaatttagtattataaatattactatatttgtttataaacttagtcaaacttaaaacaatttgactttgatcaaagccaaaacgtcttacaaattgatttgatgaaactaatttagtattataaatattactatatttgtttataaacttagtcaaacttaaaacaatttgtctttgatcaaagtcaaaacgtcttacaagctgaaacggagggagtattatattatttataatccaatccataaaggttaaagaaagttacttaaacaatctgttcagtggcttatttcttttttttttaaaaaacacaatttaaatgcacaccctatgaatgaacaaatatacaccctattcctatgagcacatccgaaatactggactagtatatcttgagatgaggaagtcatcacggtgcctcatctcgtctaccactaaaagaataattagtcgtaaatacgatcactcgtgttaaatttaaaacttgaaaccgttggacacattccacaataaggaacccaaccagtggagctacgttcacttcgttgttcaattgcttattaggtactcagtccgttctttaaaaaagtccaatcctaactatgtacctgggtacaatatgtatccagatatattgttaggatttagtttttatagtacgaaggatgtaagggtgtggcttatggttttaaaaagtttgaataaaaaattatttgttcgtgcttatccaaaattaaactaataaaaagagtgaaatgggtgaaatattgttttgataaagcagtggttctaataaagagatctgtactaattaggctctttaaggaaactcccatactgaaaacagattaaagccgttaattaggttaatcatgtcatcacgattatagattgcattgggaattcttctagacggaaaaatacaattgagaacatcatggacttttattttatttccaaaattaagaattaaataaatataaagttgtacctatcttcactttcaatttagtattttatatatctatttacttctgaaattcaaaatcaataataattagcaagatataaagggcatcattgacatatcttcaccaatataaagggtgaaccctacgaaaccaggtaatagttattcttgttatcataatgtgtggataagttgtatctcacatttaagagaaatggctggattgagaagaaagaatggacgagagagagagagaggagagtattaatatttatttattgcttgtcgcctgttattagtgttactactaagatgatactactacctttttactacttagagtatctcacaaaggtaaactagataacaagcttccttactactcactttttgacatattgtgaatactctactgatagatcgttcttttaatcaaaaccacacaattcaataaataatcattgtattcactgtatgattaaatttagagtaaattttacaaaaatatgtatatactttgatcaaattatcacaaaactatatatttaataccaaatttatcacataactacatatttaagttggagtatcgtaaaactacaaatttaataataaagctatcataaaactacatgtttagagtcaatttagtcacaaaacttggatgtttataattgaaacataacattattagtgctaaggatttaaatcctaaaatatgtagttttgtgatacttcgctttgaccgtatagttaatgttgtgataaatttgttattaaattcgtagtgttttttgatacatcaccaattttgggataatttggcgaacgtatttatagttttgtgaaatttacttttaaaattataatattaataatccagaataaataaataacgggtaaacttcccatgaatgcctaggaatgaaagtgaaaggcggctagctagccgacgacggtgtgtcctgcgtcgttgaccacctaccccccaaaagggtactactccgtactagtagttaagagtaacagtcgcggagaactgtcaacagtaaaatcatctcgaatgcaggaagcttcacagaaagcatctgttgctagctgtttcacttgtactaccgttctgtttttgcctctcaattctcacgtgaataatggaaaatttcgacgtcctcgcccgagcgccattgtacttagggcatccacaatgtgttgagaaaccaggtaataggcattcaatgctcctctacaacctggtaatagccattgtggaactagtaaataagtagtaccgggtagtatgcttactaccgatagcaagggaataaataatgttgtttacacaatcgagacagagagagtacaggatgaaagcatctttacttatgaatggttgagggttggagaatattttattggtggaccccaccttaaaatctcatacacattatgctgcctgcgtacaactactacctctgacccaaaacctgacactaatgctcacttcaattttatacattggtgttgccctcatgtcatctgcttcaacaaatggagaaaaataataaagaaaaaaaaaagcttcctctcacatttcgcacgagggaaaacaaaatcggctactccaagtcagctgcttcaacaaagggagaaaataattaaaaaaaacttcctttcactttcagtgatctaccattccaagcagtgatataatatggggaacgctaataggcgatcaatcgattggagtgatcgatccccattcccctgtacgctcctctccccttcctcatccccttcttctcttcctatacaccataaatttttaaaaaaataaaaaaaacaaagttgaaaaaaatatgtatagaaatactatattaaaaatatatttgaatttaaattcaaatttgaaacatgtatgcaaacttttgatttataaactttgggtctataaattaatatttgaattcaaattcaaatttgaatcgggtatgtaaacttttgacttataaactttgggtctataaactttagatgtatagaaatactatatataaaaaatatttgaattcaaattcaaattaatatttgaattcaaattcaaatttgaatcgggtatataaacttttgacttataaaatctgggtctataaacattagtttagatgtatagaaatactatatataaaaaatatttgaattcaaattcaaatttgaatcgagtatataaacttttgacttataaattttgggtctctattctttaggtgtataaactttatatgtgtaaacttgaggtgtataaactttagatgtataaatctattaaaataggaaattaatgtggtgtcaggaaaagaagccagccacgtggggaggggtgatcgcccaacaggattttcgtataatatacggccgggaatgctagataccaataagatcccatgcatatatagcgctcccaacggcatgccttctcctattttctcgacgcgagtcacatgtcacgcacggttcttccgctcggtgggccaatggtttttgctacgtgtaaatcacgacataataagtaactcacgtcgctttcctagctgagcaacgacggcctcatcttttcactaatgctgatgtttatcagccaaatttaaaatttaaaatttaaaatttggagttgattttagggttttttcatcgaagtttatttttcagtctttgctttagatcactaagaacacgtatataaaagttttgttcacaaatgatttttcatttgcaaataagtcaaatgatggggccgctaaccatatgacataggttctttctcatctttacctatttttctcctttttttggttaaatttcttatttatgagttgaaacaatttgattttttaagagaaatatatgatacttgtgtgacaccgatatttctcatttatttttttcttgaaaaattttcttttttttccaactagcatggtggcccgcgcaaattatatatatatatatatatatatatatatatatatatatatatatatatatatattcttaatttattattaaaatatattaaagtgacaacatatttttagttctgtactaactttaccaaactactaatgtgtgtaacattcatgctgtattgtatatacgtgatagttattaattatttttattatcaaatttaagttatttctaaattgtattcctatatggactctacgctcgtcttctaatattcctttttttaattccattttttttatttctagattgtatttctatatggacactaacctaattttaattttatttttttttaattccgaattttcattagttctaaattgtatatcggtatggactctagtttattctttaatattctctattttattaattctgaatttcagctatttgtaaattatatttctatatagactatgtttttctttttctctaattaatatgagaatttctaggttgtgagagcgaacgtggaggctcctttttctattagttcaataagttaatagatttatcaagcgatacatatgtatggttctgctaccttatgtaccttatattgtacaagtatcttatttgatgcctttatagatacattatttatctttgtcttttgtatgtgctaccagtacgtagaatattattcttggcaccaattgctatataatcaggacgggatcgggcatttaaatatttgccactttaaagatgtggtaattaagcatttgccactcgcgatctatgacatataggctctcatatacctatgacatatgggaccaatgacaaatccttaattgccacttgtaaaagtggcaaatagttaatatttgtgtggtactatgtggtaccagcccttgtacccacttgtatcacatgatacctacctagtaccactgtagtaccgaccaagtatcaatgggtattaattagctggtaccgacgagcatcagttggtgcctgataagtaccagccgatacccctagtacatataggataccagagtctgatactttatagatatcatcctgtctgaacaagatccatggtatagtagcccctataatatagttgcttgtggcaaactcataacaggtccaactctaaccacaacatgtgtaacttgcttacttgcagcatatatagtcttctttttattccaagatcaccaacattacagtgttctagacaggcgaagtagtaggagttcttttaaaaaaaatattacaaagctcctgataaaccggcatctagacagagcctgcattggtacatagcggctagaattttgaaagggttggaggtatccaaacgtagccatgggtctgcacgtagcccatcctcttgctcagctcgtcggcctctgggggtccccgggttcccggcttgtacggcagggccttcaccttgccgtcgtcgatgtcgtgcagcagcggagtgaagatctcccacgcagcctgaaaaccaacacggcgtcaggtattcattcagtcacaagcgagccgattgcaagtcacacagcgtcaattacacaaagcacaaaccttcagttcgtctcggcgaacaaagtgctgctgatcccctcttatcctgtcaaaaaaatggaagatgatatcatggttcatcctttatatatatataatggattaaaaacccggcctctacatccaacacggatagttcatcttggatatggcatgtgttgggaacaaggcgcaatgcaagtgaagaagttattagtgtagcagaaagaaatgggggaagaaggatggaacaggacgtacgtatccaggatgaggcgttcatacgcttctgggatcttcacgtcttggtagcgtagcccatatgacagatccagctcgctttgttcggttgccatttctagtccgggtttcttgacctgcaacagttcatgcactttgttcagacaacacttgtttttttggagttctcttcaggcaaagatgaatagacaattctgacatatcttcagataaatgggtttacagaagttgtacatacagttaatttcatatacatggcttccgatggctgcaaccgtataacgaattcattccttccttgcttcttgcctttatcagggtgaaataaaaacagagttttagacaccattggcagaagcaaaacaatagcagacagaactgtattgattcaaataggttacggatgtttaactacattcacagttatgtgaaatttctctagtctgctcatgagacaaaaatacgttttgttatcatgtaaaggtaccacacacgcacacattttaacttactgccagattcttgcgcctatagaaaacaataattagttatctgaaggagttaaacagaacaagtttttacttcataccaggtcttttggacagtattattaccaataagaaaatgacagctcacttccaaatctattaaacacaaacaggctgacaagcagggtcaacataagtcatagaaacagtgactcaaccaattagtaaggtgacccggcaaaaaccaatagtaaggtactcaggtcaaattgaaagtagggagcttatagcaattttagatactaaaatgtagcaaagtagcaaaccgtctcatgcttattcttgtctattttctaaaggaagtgttgcttatactaaggtgtcacatcataacccattataagaagtaactttttcataccaaagcactagcacatttttacattatttctcagtattatcaagaaggaatgtttagtactctctttagtgcttgcataatgcaacatcttatatttccaatagagttgtctgccgttatccattaactcttgacagagatattcagatttttcagtttgttttggactagcattcagatattctaaatcaaataacttagtttcttaaaataggttgtgacttttgcaagatcagacttgatgacaagtttcacagcacatttggatacgagaaggtgtttagcgcatacatttaaaaatgtcaccaggagcatccttgaactgcacacgtatctctgctttcctattgttcagtgctttgccagccttgagaatgaaaggaactcctgcagcgcacgattattactatgttaactgcactgaaagataagataatggtaactggagggtcagaaatagatgtcaatgcagcttcattttttctaggacaatgtaggcatatggaaaatggaaatcttggaaccaaatgcccatgtttgatcaaagtgatgcagaacagctgaaactcttgtatcgaaaaaaggcagttcagttggaaaatgcagatatttgtttaaaagtgacttcaaaatactgtatatctgtatgttgtaaggtgtaacatataccttcccatctttcattgtttaccctcaatacaagagatgcaaaagtaggtgtgttggagtcatctggtaccgtagagtcatccttgtagccatcatattgcccaaggaccacctcatcatgctttataggtgtcactgactgaagaacctgacattgtggtataaaaacgcagaaggaagtattgtaagcaacgaaggatgacaaaaaaaaaaaaaaagatccatacaggtttcctactttcagttagagtagaattgtataaggagaagcaaaaaccttgactttttcatctcttatgtgctcaggcttaagagagacaggcttttccatagccaccaaacagaagacctgcagacaagagcgaaatcaatacagaaagggggcctcaagtcgtgaaagtggaaacagcaatattctcttttgaggaattataatgcatgacaggttgctgctctgcctcctcgtggtataacataagaatggtgatggaataaagcaccaatcattctgaatggtcaagtaaaatgttcagcagtccccacagaccacagtaagcaaatgctaatgtagattcacattgggaagtgaaagtgcacataaaactcccctagaaaaggcaagtgcatggaaaactatgctgcataccaaaaataaatatatttacctgcaacaaatggttctgaatgatatcacgaatgatgctgcagcaacaaaagcgaggtcaaatatttacatcagcgaagacgaataacgatgcacgggaggtcctctaggtgattatttgtctcataacataaacaccataatgcagttgatttattttaaatctagcaaatactgtattatcataaaaactaaagaagtttaatgcctagaagaaaataataaaatgcaatttgtatatttctaatggacaactgtacacgatcgaatgacttcatgtgaactatgggaaccataaaccatttacaatatatcaaagtgattttacacttttatagtatatccacagtcacaagcatatgtgcttacaacaaaatactttcagtaaaaggaactttcatgcaaaataaagttactcccaacatacccatattgatcaaagtaccctccacgtccttcagtcccaaagtcctctctgaatacaatctgcagcatatatttattatgttcaagcacatgttgttcgcaccatgataatgataaaactttccagaatttccaaaactaatccattcaactttataccaataacagaggatgtcatagatgtaactacagttgacaaataaaaatacaaaggactacatagaaaagcatattacctgtacattagcaatgttatcacgattccaaagaggtaggaacaaacggtttgcaaagcgaagcacaagctgaaatatattgaaatatgttatagtagcatggaatatatcgttcaactaactagacgaagccatacaacttaccagattttggaccaattcttttcctaaatagtggtcaattctgtacagctgttgttcattaaacagctctccaagctgggcactgagttcctctgcagactccaagtccttcccaaagggcttttcaacaataacccttgtccagccagaatgagaagctgaaagcacaatatgacagttacagaaggtgactagcataaaagaaatgaaactacaacatagtatagcacaacttctaaaaatcaaacttaaaaataattaatttgatttttaatttactatgaaccaacacatgactcaattaataactaagagcaaattcattgcacccaaattgcttccagaaaaccaaaactttatgtttcaaaagtcccaatgaaaaagcaatgtcaggaaaagagtcggcgactgctaggaattggtatgcttagaaagttgaaatagtagcaaagttccacaaggcaaatacttagttaaataaagaggacaaaaggaaaatagtacaaacaagagtggatacaaccaaatatatttcctatattttgaaactctgttgtggataacttcactacaccaaaggaagtgcagcagctttcaaaatccgtaaaaaaggggaagtactcacatggattcatgcagtatgatcttatcattttgcatactgaggggtagactgatggaggcaatgccaaataaaatagtctacgtgagcttcctggtttgttgttcttcgaagtttcattctctgaaatggcgttatttaatgatgcaaatccttccccgctattgtaggaaccactaacatatttaatctgcaaagaaaattcaacgtgttacgaaatctaaatgcaaagaagctattcatgatatcagtgacttactaattgcaaaaattgtgaaatatgttcatctgaagctcctttgaggtatctgcgataacaggagaatgctatttaggcactagtatatcatcagacttaaaaacagagaaactacttcctcatacagaacatcccaatttatttttacatgaaattcttaaattattttatggtaaatgttggtgctaatatgtatctttcttacccacgaatgcgttctcttaatccatcatccgaaatatttgatcttgcatacccaaatatatggacttctccagattgtagaaatccctatcaacaccaaaggttacagttcagaactttgtacgtgtgtcaacctgacaaaacattatgtacatggcatgcaatagcaatatagcattataaagtgctgcagtagaatttctgagcaattataactcatcacgaatgcatcaattttatttctttttcactacaactctttcagaagtttgacaactatggaagaagctagtataccaaactatgtaagaagctactagttacaatcaaattacctgctgaaagaggtgaaacagcgctgggaatgttttcttcttagcaaggtctccagaagcacctaggaccacaatggacaagcaaccagactctgaagacagttctaggtccttcaaacctgacaaagaactgaagctagcccgccctgatgaaggggaagaatcaccagatcctcctgacatgatgaactgtatggtctcttcctttggagacaaaacctaagaatgtaaaaaaaagtactgttagtctcaatatgaggtattcacaaataacttataatctatccaaaactttaatctatgctaatatgaacaaaaaggtctattggttgaatgatggattcttgaactgaatcacctgtcagtacctaacagccaatttgcaacagagtgtaaatcaaaatgaatgtttgcttcagaaaaaaaaaatcaaaatgaatgggattaaagttggtttcatgaaatcagtactaaactactaatatagctaccctgaacttacatcagcgaactactcccattgtttgccaacttatagtcaaagttctcataaaacacaaacaggtactgtagttatgctagtcaaatgcttctatgagattctaatacagaaaaaaaaaagtatctacaagactacaaatgtaaatcaattgaactcggtgcccctacattttgtacgggtaaactggaacacatgcaacaactgaaccactgcactcactagaagtctagaacacacaacagcccaaccacccaataatcccgaaataaactagaactgcaacttgcaaagcaaattctgttccgagagcttcaaatgattaaaacgaacctatacagcaagcgcatcagggcgccaggaaatcgaggagcacacgcagaataaacacagagatcatgaacacaaacacggcgcacagaacagaggaatttgcctgcgaaggctgcgatgagatcctaaggccgcagcgtagcacaatcccttccacggcaaatgaaatcagcaatggaaaaaccgatcgcgcagaactctgctacggaaccgatcaaccaccaaagaggaatctaagcagtgtggatgaggaggaggagggagactaaccagcagtggcgacgagatttgacttcccgaggtggaagaagaagacgacgacggcgaattgggcaatggatggtgatcttttccgggtgcgatttatagggggatcttcctcactcacacccgctttccatccacccctccactctcctcccccgccgcttttatactcgcggacgactcgtctctcgtcggcgttgttctcagctttgacccgcgcttagccgcctctctgctttgccacacgcccacacccaccaaccctgctcgcttactgttaccctaccaacatagtataaatcaccaatcttataagttattttttttaaaaaaaatagcgtcaatccgattgattgaactactaatataatccatccgtttcacaatgtggagagtgctagaatgacttacattgtgaaacggaggaagtatataaaaaatgtgaaccgtgaagcgtaacgctgtggtagaaccaagtcaggttcaagctctatatttactcccttcggattgataatacttgtcgttttagaccagggtgagatcaaatcttttattatgaatcatttttaaaatatttatctttcaaatatggctactatatgtataaattagtcttaaaaagtagtttaataaaattatatatttgttaatatttttatacacattataatgaaaaataatggtcaaaattatttttttaagactatgcctttgtccaaaacgataaatattatccggagtaacatggatgctcgtatttatcaatactgactttatcaatttgtaatgtatttttgtcaaggactacgtggcaacttcatcaatatatactgtgtttcaaataaaatatgaatgaaccggtagaaatagtttatcattaacatttaatatttgtatcacttgttttagcgatagaaatagtgcatcagtaacatttactcgctttatataagttaatagaaaataaaactacgacaaataaaaaatcctaaaatgaactctataaatttcaaattttatatttttgctgaagctgatatactgagatttacactcccgtcccgtaaaaaaaatatacttagatacatagttagaagttgaacatccataactaaatattgtttttttttctatggattgaagggagttgaagatgcaggcgataagtctgagatgagaccaaagcaatctgtggaatgccgatggattgtagttttttctatggattgtagttttcccgagtatcctcactctggtactctagtactctacgtggccgtgtttagttgtaatttttttcttcaaactttaaactttttcatcacatggtttaaatttcaaccaaatttttaatttttgtgtgaattaaacacacctagtgttggtgacaaagtttttcactttttccaacccatgaggccatgacatgacatcaaccaaatggcgccgcaaatcgagcatcgtctggaaaatcaattcacgagtcgaacggcgcggccggtggtatatctatcatccccatctctttgttctttttttttttctgtttcgatgatttaacaatggtcatcagcgacgtcacaaaatacgctaaaaagcaccacgttttaatcctcttgtggatattatgggtaccccatacccatacggcatggttatccgactagtcataggggataacttatatctatggaatatgtaatagatcatgactcgggtattacgtttccttatatattacggaacggcctaaagtcctggtttgataatattgtaaagtagatttaggaaaccgataccgtattggttaaggtttctatcttgtaatcctgccccccaccctatataaggtgggcaggaggccctctagggggcatgatgacacaaactagatcgtcagatctataatacacccggcggattcaaatccccaaacaggagtagggtattacctctcattgagagggcctgaacctgtctaaatcctttgtctccgcatccatccacttttaggtctcgtgcgctacccccttttattattgccgaattcatgtttcgacagttggcgcgccaggtaggggttgcgtcgagtttcccatcaacaagcgcgatggaatcaatttcatgggtcgccgacttcgttttcgctttgggagttttcacttcctttccgtcgaccacttcttcaacctcctcttctctgacttgatccaaatcagtcagggggaaactcaatctgatttttatcattgtttatcatattgatttttaatctcagattaatttcttgctattttttgttgttgttcgcatataactacgccgcactattgaggcgattgatgctggtcatggactcgaggcgtctcagctttccggtcgatcggccgcgagtccactccgccggcttgtcctcgccaccgccattgctgatagcaacaacgacttcaccgtcggccaccaccgttgatgggcatcgtcatctacgccgccggtctgcctccgtcgccgccgactggtgtccccgcctatacggtcggttggtcaccccaccgttgatgggcatcgtcatatacaccgccggcctgcctccgtcgccgccgactggtgtcctggcctatacggtcggttggtcacaccaccgttcatgggcgtctacgacttcaccgccggctcgcctccgttgccgccgagtggtgcctccgcctacacggctggtctattatgccgccgctgttgggcgtccacgacttcaccgccggcctgcctccgttgccgccgagtggtgcctccgcctacacggctggtctattatgccgctgctgttgggcgtccacgacttcaccgccggcctgcctccgttgccgccgagtggtgcctccgcctacacggctggtctattatgccgccgctgttgggcgtccacgacttcaccgccggcctgcctccgttgccgccgagtggtgcctccgcctacacggctggcctattatgccgccgctgttgggcgtctacgacttcaccgccggcctgcctccgtcgccgccgagtggtgcctccgcctacacggctggcctattatgccgccgctgttgggcgtctacgacttcaccgaccggccgcctcgtccgccgccgactggtgtctctgcctgcacggctggcctattatgccgccgctgttgggcgtctacgacttcatcgccggcctgcctccgtcgccgccgagtggtgcctccgcctacacggctggcctattatgctgccgttgttggatgcctacatcctcaccgttggctcaccttcgttgccgtcgactggtgtttccgcttacacggctgacctattatgccgccattagtgggcatcttcgctttcaccgtcgaccgccttcgtcgccgccgactggtgtcttcattgttattgatggacgactttgttcccacattggccacttctgccatcaccaaggggaatattacaaagctaagtcatcatttattttattctttatatgatatttttccttttcctctgcctcactacaccaattggtcttccattgagtagtgagtcgggtgctacagatgttatatcatattttttataatatttatcttgattgcttgcgacataatctgagtacaaaagtacctatcgagttatggagttctatcttcctatgctttccgtttggtttgccaatggatggttgcctttgggccgattcctagcacccgggggctcgttggatggaccgagtaacgcaaggtgctaagtattattcggaataaatcaaaagcatagagataagataatttattttctgctcttaataattgcaaaagtacccgaatagtaaactccgatccgtgaaactttgttccattaatgacgaactcatgtcactcatatgcatgtttgggaagtgcttaggccgactcccagtgcttggtggctatgactagtcgggcagagtgtttaaacgtaatgagtcatctgctcggggaaatcaaaattgacaagaggagaaatacatatttataaatattttaaaatacttgattttttctcgagtattatatttatatcagatactactcatcctatatgtttgttctgcaggatccagatccagatatgcataaaagggattcatggctttaagcttatctcttacgctccaggaatggatcagtcagaacatcaccaccggctcgcctcgaccgccgccgactggtgtttccgcctgcacggctggcctttatgccgccgttgttgggcgtctacgtcttcaccgaccggcttgccttcgccgccgccgactggtgtttccgcttgcacggctggcctattatgccgccgttgttgggcgcctacgtcttcaccgaccggcttgccttcgtcgccgccgactggtgtttccgcctgcacggctggcctttatgccgccgttgttgggcgtctacgtcttcaccgaccggcttgccttcgccgccgccgactggtgtttccgcctgcacggctggcctattatgccgccgttgttgggcgtctacgtcttcaccgaccggcttgccttcgccgccgccgactggtgtttccgcctgcacggctgccctttatgtcgccgttgttgggcgtctacgtcttcaccgaccggccgcctcgtccgccgccgactggtgtttccgcctgcacggctggcctagtatgctgccgttgttgggcgtctacgtcttcaccgaccggccgcctcgtccgccgccgactggtacttccgcctgcacggctggcctattatgctgccgttgttgggcgtctacgtcttcaccgaccggccgccgcatccgccgctgactggtgtcatcgcttgcacggctggcctgttataacgccaactgatgctatcttcttcacggctggctacatcgctgtcactacttataggcatcagtatcttcaacacaagctgcctacgtttgccatggctgccgactggtttcttcacttccatggctgcatgattctgccagtgttgattggccttaccatcttcatcgcctttcgtctcgtctgctgctgactagtgccctcgcctctacgtctggtttatacagctaccactactgatggacatcatcgtcttccgttgccgactggttatgccgccgccgactagtgcttttatcttcacaactgcgcgtcttcgctaccagtttgcttctgttgccgccgactcgtgttcacttcatcacggcgatgcaactttgtcatcatggtggagcgacttcatctttattatcttcggcactggcaaactctattgctgctacttcgcaagttttactacttcaccaaccacgacgtctttgtcatcatgcctcgacatctcggcatgcgatgccatgttattttactacaataagaggctctccaacattcatgatttctacttggaaatcttcaacacatatcttcaatcaagcaataactattcgacgacaagaggctacagttttcgactctatgttcagttgtttcccaactaatcaaagagtcgggggctacacaaatacaaggctcaaaatttgacaaattttatgtcaagctgaagaaatcaattcatcaacccacgagtcaactccaggagtcattatcttcatctttgcttcggagcagacattctacttcaacaacttcaaatatttcggtttagacgagttgggcaacaacatcaactctcctccaagtgaagcatctacaacagctataacattaatttgatggattattgtcactaacatcatcaccagcacctctgcttcatcgaccctgacatctctgctgttgctaatggatgattatgttttcgccgacttattatttcaccttgacggttgacctactatgcaaatgctgatgagcgtctttgtcattatcattggttgctacactgctattggctggatcaccgacatcgtcatcttcatcatgtcggttgcgtttgtcgtcgtcaactattttcttcatcttcatgattagtggatttcgccatcactgttgatgcgcgtctacgtcttcatcgtcggtttgcttttgtcaacaccgactgtttcttcgcctccatggttatgcaacttcattacctttgattggtgtcactgttttttactaccactgacatcttccgttacttctgatgagcaatttcgtcttcatgttggtcatttcatctccatgccgactgcgtcagctattgccaatagacaattttgactatgacaaaatgacaagctatatgctcaggggctcatcaactcaagcgtgaggattatatctccaattgggacttgttccggatacattccacatggattcatagtcatgagtctatcttctatgctcaaagactggaccaattattattccccgtaaaggctatcaaccgaatacttgcgccagtcgggattcaattattatatttattttggagtatcccataagggataatcattcagatcagaagctattcatatgagctacacttggtctatattacccagaagatttgttacccgggagcatgttacatgcgtcatcctttaaagggtatcgaaggcatattttttggcctaggcctaatatgtctgcagcccatattttcaggtgtggcctgtcacgttcttttagggacttaggcactttttgcttaggccaaagtgcgcgtgatcaagtgcccaataccttaaaatccttttataccgcagttacttaactttttaggagttggtacaatgcatcttaaaaggtgtcaaacagtaaagctttatatagctgtcccgctgacttttttatatagtcaaggtgctgtttgggtttatcaagcaattgattggatacaatatcattgctttttgccacgtaagtgtgcatttttattgaccaatattatggcttaggctgattatatattatggtcatttgtcaggcggttggtaaatcctttatgagtttacttactcggatgttataccacatatgccatatatttccaggtgtggtgaaaccatgtgtcttttagggacttaagcacatctgttaaagcagtgtgcgcatggcgtatgcccaatactttggaaatttctttattcacagcattcaagcttctttatagctattttgctatatcactcatcatattttacaaagcagttggtatatcacccggatcatgttatttggaggattcacaccgcatatgctatatattgatatcaagtcacttggttgattacgattatcaaaaccactcggttggttggattatttattccttgactatatgcttggtttgttcaattaaccacattgtcgggggctacacctattaggtgcatctagtcggtgcacctgactttattttccagccctccacagtcttcagatttggtaaaagtactcgggagaccatgacaaagatgattgaagcactcggctttggagtaatctggttcgagagaagattatcttttcgactgcgaaggtctcaggggctactgtggatattatgggtaccccatacccatacggcatggttatccgactagtcataggggataacttatatctatggaatatgtaatagatcatgactcgggtattacgtttccttatatattacggaacggcctaaagtcctggtttgataatattgtaaagtagatttaggaaaccgataccgtattggttaaggtttctatcttgtaatcctgccccccaccctatataaggtgggcaggaggccctctagggggcatgatgacacaaactagatcgtcagatctataatacacccggcggattcaaatccccaaacaggagtagggtattacctctcattgagagggcctgaacctgtctaaatcctttgtctccgcatccatccacttttaggtctcgtgcgctacccccttttattattgccgaattcatgtttcgacacctctatgacctaaatggtcttatgataaactaaacgtcttcgtcctaatctcgctgacgtctcaacgaacccataaacaagaactcaatatccagctcgctagtacggagtactacgctgtatataacagtaaattatacagaataatcaccattcatgtactaatgtattatgtactccgattagtgcatgaaccacatggctaagctgaccactgtgctcgcagatctaagcatgttcctgatgcacgtgttaggttctttctttttactgccacttgcccggagaatttttttcatttttaaatttttttcttttaatatttacagaaataatccatgggcgcaaaaaattacaaaaatagaccctgccgccctctactagggcggcaagctgacgtggcaaacggggagggacgggcggtgacggcagacggaagagggagggtttttttttgcacgaaaaccattgccgccctctgttagggcggcaagggcccccatgcaaaaaagacagcccgggcctagtactttttggctggtacgtctagtagggcggcaagggacccagatgcaaaatgtacgagccaaatgctgcgaaaattgcatttagccccttgccggctaaatgcaattttcgcagacggccgcagacggcgccgtcgagccgccgtctgccacgtcagcttgccgcccaccactagggcggcagggtctatttttgtaattttttgcgccgatagattatttctgtaaatattaaaagaaaaaaattaaaaatgaaaaaaattccttgcccggagatggtctccacggagtcgccggcccagctagctgcagcccaaggccggagcaggccggcccacaggccgtatccctcggcccagtacgggatcaagtcggacttgcgggccaggtcaactccaattcggactcttgagctcgtcgcatcgcagtgatcatgtcggagtcaacgggttcatcatcatatccgtggcgctataaatttgcagcgagcacgtcgtctccctctctttccatcttccaagaatccatcaccgagctcgcggcctagctccgcgcccagagcgcgccatggattatctctatctggatgatgccgacgccgacgtcgaggctatgctccgggagatcgcggccgccgtcgacgacaatggtcccgggggagcggctgctggcgacgagacggacgggagctactgcgccggcgagagatgcgcctgcgcggcgtggacgtacgacgccgacctgtacgccagcctccgggccatggagatggccgccggcgagcggtcgtcgccggactacatgaccgcggtgcagcgcggccgggtcgacccgtggacgcgcgcgtcgctcgtggcgtggatggaggggatcacccgggggcacgccggcctcgccgccggcacgctccaccgcgccgtcgcctacgtcgaccgctaccagtcggtgaggcccctggaggcggtgagccaccgcctgctcgcgctgctcggcgccacggccgtcttcgtcgcggccaagtacgagggcgacctccccgaggagaggctgagcgccggcgacgccgccgccggcgccggcgccggcgggctcgccatcgccaggagcgaggtgctcgacagggagctcgacctgctcgacgcgctcgggtacaggctggcccgccccaccgcgcacaccttcgccgaccacttcctcgccaggtacggctactccggcggcgacgccgtgcacgccgtggcgcaccacctcgccgacctcacgctgctcgaccgccggagcctgaggatcccgccgtccgtcgtggcggcgtcggcggtgtacctcgcgcggtacgcggccaccaccctggcagatgccgggctgccgccgccgctgccgtgggaggacgacgggctggaggcggtgacgggatacagcgtcgtgtacctggcacgctgcatggaggagatgtacgacgtgcatgagatggcgtcattgtggccgggttacgacgagatgaagagcagattcgccattgactacctgttgcttccttgcagacttgtggtgcccttagtcttaatgtgatcatcgtaaggggtttaattaattcatagtatataggggatcgacgattagctaggagagtcaagagaatcaggtagcagaaaaaagaaggggttgatctggaaggggaaaaaattgccggcatttcgatgctacaagcagaagtccgttgcaaacgtgtgaggtttcatcaacgatgttgttgattgtggtaaacctctttgtaaccattaatttgatcttagtaaatttctcttggccgacgaacgccttgttcgcccgtaaaaaaggtggtgcatgtaattgtagcttagcatctgtacgtaagttttttttaattgaaatgtgaaatgagatgtttggaaacgtcgtaagttcaatttctcgatgacgtgtatttgcttacttctaaaattttatttcggaaaaaaatgcttttcattgtctacaaataataccatttaaatttaaacataataattacatctttctagctttgtttacactccgttttagccttttaggcctccttttagaacagatagttttcatataagtaaattttagggattaaacgggctttttagctactttattggattattgtcacagattatttactctaggtctcttaaatatgttttctatagatcacttgttcgaagccatttataaagtttacttttaaaacattaattcattcataaatcaaatatataatcggcagtaacaataatccaacgagtaatctgttaaacttatctttttgcaagaattttgtaaatttgatgtgttccaacatataaactgggaggccgttccatgtgcaacgtggcgtccccgggagaagccacgcgactgctactgtgcctttatttcagctgtccgtaaccacgccacgtatgccgagagcacgaaaccatctcaaaaactatccgcataatcccggtccactcactggcacactgacaagtgggtccagaacccccacccgggcccacacatcagcgaccccacagccatctcaccaccaccagataagctcccctccacggctttatcttccctcctcttcccctccactgcttcttctcccaagtcctcgtcggcggccacaacacgtacaccacacagcggcgcgagaccggaataggaggtttcaatggaggtggtgggcggcgtgtcgtcgctgagcgcgtcttcgccggcgccggcgcgggcgcggctgcggcagctgtcgcccggcgaggcgagcggcggggggagcttcctgctgatgaggacggcgccgaggagcaggctgcaggcggcggcgaggccggcgagccgggcggcgctggtggtggaggccagggggagggggtggtcggaccggcggtcccagcagcagcgcatgccgcagctgcccaagatcgaggacgacggcaaccccgcgcttcgtcatcttcatccgcaccgccaatgtccgtgctgccctgattcttgttcttcttcttcttcttcttctccattcctgatcccaatgcttcgcgtgcgtgtgatcaagatttgtgtgggtttttttttctggtttctgcaggtgtacttctggtacccgctcaacatcgtcaccggcggcacgacggcgaagatcatgctcgcggcgaaggacaacttcctcggaaagtacatctacaaggacacgctcgccaggaaccttgccgctgtcatctacaaagtaattaacagcacaatctgtttgcttacacaaattgtcacacaatcgtgtttgaagagttgtagaaaagagaagatttaaatgtgcgtgtttcatgatttgatttctgaaggatgaggatgacataatagacacagcaaaagagcagtacagggtgctgaagaccgacaatgagtttcgatatggctacaaagttgtggtaattttctcagtcctcatcttctgtgcgtgattgtatgttgttgcactcgaaaaaattgagaattgcaatttacctgtctcatttgggtgagcaggagaatgggaacctgaggtctgcgctgacgacaagtaatgtgatcgaagtacgtttcgctagcgccttttatctcctctccctgtcgaattctctgcaagttatgtaggagtagcaatttctcatgaacattagagctgaaatctctgaaaatgtacatttcagacttgtatcttgctttatcctaggctgacattttctagagcacaaccttcaaattattttggcctagtactagatagtagctcagaaaatgttgtcctggaaaagaacttctatgcagttaagtgaggatggtaggcatttcttatagtaaatgtacaaatgaccatgttttcagtaagcatgtcttgagcaaaggtagcaagtcactaacagtaaaatgttttgattatcccagctcccaaagaaagaagagctcaaaactgtggttgacaaggtgaaggacttcttcggcgacgtaacctctggcgccaaagagtcgtttgcgcagattacaggatctgtcagcgcagaggcagaagcgccagtggaggaagagaagccctgggtgaagaggcgaaacgagaggaagcggaaacagaaggagaagcagaaccagaagcaggggatcagtaagtaaagagagacaatgctcctacactaaactacattactgcttcctgtgattttgcttgtgtgaatctctaggcctttgtatagccatcaaacacagacgttctgacctgcctgcatggttaccatttctgatctgcagaaacggagagctgattgtaaagcgcagcataccagagatcgtcaagtgaacagccggctgtaattttccagtgtgctcatttccctgtcccagattagctctgtgtagttcctcaatacttcgagtttttttgcaacaaacaatgtgtagcttgcctgtgactctgagtaacttgctttgttcttccttactaaatctgcagctagagtctcctgggatattagaaatcggtattttatggacttatggaacggcgaaaattactgttgtatattgacctcgtttctgatgagttacagtggctgtacagtgtgtgcgcgcgattgcgtatgaccgaatgctgtttatctgttttctgaaatgttgcatctgaaaacaggctcagaacaaaaggaattacgcttggttctattttgcagttctcttttgagactagcatgtcaggctatttcaagcatatagagacccataagatcaaacagtgcggaaccccaaaaagacatcgccacaagacttgaaatgaacgaacagattcatctcagaaagacatgcactcttctcgttctacaaatctaaagcacacttactgaaattgcacacggaggttctctttaaaacctttttgctgtccgcaataaaatcaaaccgagataaagatcatgttctcatgagcctaggagtacaagtagaacagcaatttcagtacggtttatgtccatggggagctttgcagggatctagaaggatcacacctccaacgtccaacgtagaccattgaatttacaagtcaatgactcgtgacagtttctggatgcggttcagcaagaagtccccttgcttgatggtcgcttggtagaaggcattcctagcgtcaggtcggtttgtctccagaacaccagcaaccttatcgatcttgcagtgaagcttcccagctgcaatgaaccgcgacaattccctggaacaaatgaaagggagatattatctccacagcacaggaacagaaaagaatgttttgtcctacacaggaatcacaaacataaaactaatgcggatgggtgacagcacttactggtctatgaaatcaacagtcacaccaaatgctgcggccatcgcttccattgtcacactcttgtatgactccaaaaactgtgaatagacaacggtccgcacttccctcatatagtagcggaaatgaggctgaagatagcgatccaacttaatctgctccgtcatgccagctgaaaagaagtttagaccatatattcatatagcccagccgtacagactgtaacagtaaaactatagacagcttatcaagatactttacacttacagaatgcaacaaaaaatgacttgtactggcaattgtaaagggagttcagaaactcagatagatgaggtactttgccaatcactgccaaaatttctggtgcatctaccacctgccatatttcttgttagtgagtcaattaagaaaaagaaaagagagtgtaagaagtgaaattaccttttgttttagagatacacgatccaatgtgattatgcttgtgatgactgtatagaagacaaaagtatcatatggaaacaactcgtaagttgtgaaagttgagatggaatctaaaaataagctggcagctttcttgaagtttctcgttgccatgaagtataggccttcatatactttcaatcggttctttctctcccagtcgcctccttcctcaaacaggcttcaatcaacacaataaatagtcagatgtcattgctccagtatagatggcagaatggaacttcacaaaggcacaatcaaagctataacttacttctttgccttgtcaatggattttgagatgagatcaaagtccatgtggaaaaggcctatttgcaaagtgtagaacacaagatccattttctggccaacagctacagttttcccttcagtaactttaagctgctccagtgctttttcctgcaatattgatttcaaagaatgcaaatagctaaatctcaagcacacacttaatgtaaagtatagaagcacacaagtttataccttctctccaaccctcatgaagtacaaggatttcgccagatgggcctcacgcacttcgctctcacccaaattctcttcagcatcagcaattcttcatacatgaaacataattacttagttacttccagaggaaccaaatgattcttatcaaacttctagtaactgaaatattagatacagatgcgaagagcaagatcagaaagtagaaacaatgaaacatgcaaatcaccaaaaggacatatcttgactggaacctcaacttctcaaggaaactatttctaacaaatttcaacatgccgttcttccttcacattagtttacactggtattttgtctcgagaagttgcgtattgtgatccttagcaatctcaattacttctctacatgctaaattacacattgcagagaaaatgtacaaaatcatgaatatgtacatgaatctaaaacaaaaatgtggaaaaagtttattattatgtagtatagatttgcatagaggtgaattaattggccctaaacataattcataaattacaactaccgaatcaaatgcaagctatctaccagttttagcatctacatctcgcaacacagagtaagctaggttagctaaggcaaacggaccatatcaacacctgagttatcgcaaaacttatcgcatacgcaacacagcaaggggcggcctaatttttggggggctaaaaatctactactacttaaaaaataagaggtgcttccatcgtccgtcacaaataaataaaaacagcgaaaaaaacaggaaaaaaaaagatgtccgattccctggcaaaaaaacacccgatcccttaaaaagggaaaaaaaaagtccgagagacaaaccgtttaatgaataaaaaaagcgaaaaaaaaagagtccgattccctggagaaaaaaaatctgatttccctggaagagatccgatctgtattggattggagaaaagaaaaaaaacacttctctaggtgcttctgtcgtccgtcaaaaaacgggagaaaaaaaccgagcgaaaaaaaaaaagaaaagtccgataaaaaaacctggcgaaaaaaaaccgggcgaaaaaaaaacaaatatgtccgacaaaaaaaaaggaaaaaaaaggaaaaaataccgaaacgaatccgactacatcgacgcggtaaaaagagtttaaaaaaataaaaagaaaactgtcctattccaaagaaaaatgaattatatgtatcgtggagcaaaaaaaaaaaagaaaagtccgataaaaaaacctgggcggaaaaaaaccgggtggaaaaaaaacaaatctgtccgacaaaaaagaaagcaaaaaaaggaaaaaaatcgaaacgaatccgactacatcgacgcggtaaaaagagtttaaaaaaataaaaagaaaactgtcctattccaaagaaaaaggaattatatatatcgtggtaaaaaaatcgaccgggcgaaaaaagaaaaaaatagtccgatccgaaaaaaacaggagaaaaaaaaatgggcgaaaaaaaatttgtccgataaaagaaaaggaaaaagctgaaaagaatctgactccatcgacgcggtaaaaaaaggcgaaaaaaaactttccgataaagaaaaaggaattatatgtgacgcggtaaaaaaaataaaaaaaccatgcgaaaaaaaagataaaagtccgataaaaaaacggggcgaaaaaaaaacaaatctgtcctatccaaaaaaagccaaaaaggggaaaaatcaaaacgaatccgactccgtcgacgtggtgaaaacagggcgaaaaaattccaaagtaaagggagaaaaaaaatcaaaacgaatccgactccgtcgacgcggtaaaaaaagggcgaaaaaaatccaaagtaaaaggaattatatgtgacgcggtaaaaaaaatcgatcgggcgaaataaaccgggcaaaaaaaaatctgtccgatccaaaaaaaggggaaaaaatcaaaacgattccgactccgttgacgcgataaaaaagggcgaaaaaattgtctgtttctaaagaaaaaggaattatacgtgatgcggtaaaaaaaatcgaatcctattatatctagaaaggtttgacactatgtgaaagtggtgaaaaaaacccttcgtaaaagaaatgcacgagaaaaaaaattaaaaggacggaaaaaagcgcggaggaaaaaagtcaaatttatattcgtcgttttttagtccatttatatatcttctttatctctaatctaatctaatctaactataaaaagagaagtttctacagtatattaaaaaaggaaaaaatgcgcgagaaaataaaaacggtttaaaaaaacacgtgagggaaaaatgtcagaaaaaagcacaaaagaaaacgcgctagaaaataaagtttcgtagttctaattttctgattgttatcgacatggttatgcatgaaaaatgtatattatcattatgttttttcacccgttgcaacgcacgggcatatttgctagtaaaataaaatcagaagagaggaagaatccactcacttctcgtcgagcttgcggacctcctcgtcgatccgcgcgcgcatctcggcgagcagcgcgtcgtccggctccaggacgcccgcggcggccagcgactcgaacagcggcgccatgccatcggacttgacggcgtcgagggcgtcggagcggagggcgaccttggcgaggtcgtcgaggtcggggtgggagaggaggaagagcttgtgggccagcaccaggtggcgctcctgcttcgcctcctcgccgccggcgtccatgtcgttctcgtcggagttgggggttcgcggttaggtcggctcgagacgaggcgaggcgaggttggggcttgggtactgggttgggtgggtgagtgatgccgagtctgttgctgttgccgaactgatgaaagaggagtgcggcccgctacggcctaacagcccatgggccggattcagatacggtccccatgggccggattcagagccggtctcagcaggcaacagagctaacttaaccaaagaggtggatttgtctccggttttatttatgtatgtatgtcatccgaaaattcattaaagattttaaagataaattaacatgtaggagtaatatattactcaacagacatgtaagttcaaattcaacatatacaaaacaaaaaacaacaattttaacacacgaactttccgccttgttgaagatttgggggtgctacctgaagatttgaatggatggtcatcactatcatgaacaaccgagattcaatgagaattcgccctagctttttgtctttgacataaaaaaaagtttttcgtattattcacaatcaaattacttagttctaattctacttatatgtgtcaaatttaagcttgcatatttgtggagtgatattatttattcgatctatctcgtccttttctttttttcaaactttttgatgagtttttgggtggcatgcagcagaaggaattgtccttcagggacaaatagacttccccgctaaaccaagcacattactgattacatattcaagataactagaagaatgaagagaaaatttggttaaaagctaagtattcagaaacggggcaagtcataacccagcagtatgtacagatattcaaaatgaacaacaacaaaaagcatcactagatcaatcaccttcacaactcaaaaaccagtgagcgagatttcgtagacagttaattgaagttatctgagtctgacaagcaaaatcttaatctcctatgcaaagcagcaggcaaaaaccacaaaccaaaggtagcagaaacaaactactcctatcaatgcacagtgctactaccacctatgataagtatcatcctgcatgcatcatcacacatcatcaaggtagcagaaacaaactactcctatcaatgcacagtgctactaccacctacgataagtatcatcctgcatgcatcatcacacatcatcttcgacttgctagacaaaaatcaagtggaaacgaactactccttccgaatcatagctatagcttctggcctttcctgatctggactcaaactctgaataagattgatacgtgcgggggggacttgtccgggttagaccgggggaggtcgtcctcgtccgggaaggttgggggggacgtcgacgccgggggtaagtccatgtcctgggagtaggtcagcccgtcctcgtcgtcggtgtcaactagtgcgccatgaggaggattgccagtgccctcgtcagcagccacggcagtggtactgctgctgccgacggcagtggcagtggcgtcgaccttgacctcgtcgccggtgttgctgtcgtcagacccggcattggcagtgggatcaacctcgttggcggggtcgttgttgtcggacgcggtggcattgttgctgccggtggggtcgacatcatcgtcaatgtggctgtcagtgtcagtgtcggtgtcgaccggcggaacagcagggaaggcgccgggcttgaacagaaccaggatgacggtcgtgttgtcgcccgatggcaagccaaactgaacaagctcctcacagatgacacgcgcttctgcaccctcctgcatagcgatattaattggtcacagcaagtcagcaatatttggccacagcaaaaggaacaacagttttaacaacgaaacaatcgagcatgcaagatatttttttgacgtaaacatgcaagatattagtcacagcaatattgatcaaggcaaaaggaacagcagttttaacaacaaaagaatcgaacaatcacaaagcagatgacagtgtacttattagcacttgtttttttcttttttaaaaaatcggatgctttatattgcctgagtgaagtcatttcctagaatttgacacaaaatatttttgctattacagtaggagatctcttgtcctgccaagaagacaaactgagcaaaagaaaaggactcaccaaaagacggtcatgtgtgtgatcaaccacattttgatttgtcatgttgcacctgcatggaaaaaacatagtacagtaggtatgcaactataaatgaaactatatatgcatcagcaggagaaagaaaacagcatcacaaagagtactagtgacatcaaaatgatcaaataataattattgtcagttattttttgttcaaaatttaccagaggccttcagttgctatcacaagaaactccatgtcatcagttatgtccatctgacacagaaagggggattttccatcagaccccacacagcagtacaaacttcaaattcaaccaaatactaaacaaacatagttgcacttacagtcaggatgtccggattacatgtcagcatttgatcttcaggaggtaaacgttcgttcttcttgcaagcgaagtcccctgaaatgtaagtgggtacaacacatcagcaaatcacaacataatatgtttttttttcggtgctattatctgcaataaacgaaaaacagatccaggcaagactataccaattgatcttgagattgatactcttcccttaaaatcagtgaagccccattgtttcttggttacccacctccccattattttacgataactatacccaacagctactcctcctgcattctgaactctctctctttcagactcactgtctggtttatgatcgacggataatgcactggccttttgacacaacagaaacaagcacaaatgttaggcacgaaaataagtgagcatgcaaattaggtaccaacaagaaattcgataaggaaatagtcactatacctgaccatttcttgagagtacacaacgagaatcaccagcatgcccaacaatcaattggtcacctctgatgacaaccacacatgctgtgctcccttcatatgatggcgcagtatatgttgcctggaaaaagaagaaagaaactaaaggacataatagagaattccaacatagtagagatacaggttaaccaagaaatagctcacaaaagcaaccagacaaagaaaagcatttctgaaagccaaaccagtgtatatgaaagagataaccatagaagagatgccgcaaacaatacctcagtttagggtagtgccatactatgacaagaaccaaggtgcaataagaacttaataacctgtcaggcgtccaactcaccaaaccaggcaactgataagtaactaactggacctttttttacaggcgcaattagttgaggttagggttaaacatatctcttccaactccaaagtacatctcaagaaagaacaatagtctcgatatcacacacattcttccatttcctttttcatagatacaataagcactgtccaacaaatacagttttgagtaacttcttcaacatatggatattataagatgtttaggggttaaaggatcactacctgcgggaaaggcgaaaggttagcacagacaccagccttgataaaatacatccatccattattacgaggaataactaactccctccaagcatcggacagttgcaggtcctcatccatgctgcagaaattacacaggaacaatgatattccaaatttgcaagtgcagcatcattcagtgcaacaaaatgatatagactaggcgaaaataacctgtaaaacgcactcctcatcgcattacttagattgctgtcgtagtcttcatgattgcaaagctcaatatgaaatcgttttgcacaatatgatgctacttcagctcctgagatagaaaataaacaactcagaatggtggctcaagattactcctatgtgcatatagaagcttataaagcaaaacaatgtgatgaacacagcagatcagcacttcataggtatcataagaaaaatagcaccacacataaattaaccaacatgttcatcagtggctatccttttaattatcatgactgttaatattaactcacacccatgcagtgttttatccctcgtaaattaatattctgtttacgcagttcatgttatcctagaaagcacaccgcacataggtgattagtactaattagcaaacttggctcattatccagaactgtagcttaatatttatttgaaaattgacaggtaaaagtttcagcataaacagtaaagttctcgaaacatgcacatagataaacacatgacacacaaagacaaacaaagcatgatgtaaacagttatgccgacaatatggaggatttgaaaccaaaaaaaaaaaaaaaagagagagaatgaagatcaaacctccatggccatcataaacaccaaagaatgacgtcatggtatcatcaagatttagaatagctgcatgctagagaatatagagggcatatgtcagtcacagtattttacacaattacttacagatcagtaagaaatttttgcagaactatccttttttttgtcatacaaaaggctgcaagtttactcacagcatcttccattttctcaccccatccttgcatagacgacacaacatacttaattctgtcattctctttttcatcagtgaactttgattctacaggaaggctgttacccatagcagacctttgttttgctgaaaattaataacatgaatacaaatatacaataactttattgacaaatatggagaaagagtaaagtgaatacaattacaaaacactacagatcaattaaatacataagagctttggtaaaaacacgaaaaggagtcaactagacataacatgatatgacactatttatcagggcccctaaatgcatttttgagacatataacatgagagtatcaatcttcagttgcaatgctgcagtattttgcacattaatcttatatcttatacaagaatcaagcaaagaataattaaaataaaatattactgtgaacaaaatgcatacaaggttttgtaagaacgccatataagctttactgacacaaatcataacaccaaattccaaagtgaaatgaagaggaaacaaacagaaaaggcgtattgtacaaggacaatcaatttcctcccggtatggccacctcttcggtgtattaaaacttcaataattcgaaacagagtatgaagtgaacagaagaagaaaaacagagacagcagcgtgcacttatagtagaattcagcaagaagaatacaacatgacagcgtcactgagaagtaaaatataggtaacaaacatgaagaaattgtacaatcttgcagaaccaaaaccgttgggcttagaaggatcccaaatctaagattcaagagatgaaagcttctttgatatgcaaagaatcagaagatttctcatcaaaaagggaaaaaaaaacaagcagtttaaccaagctacacatgcagaaatcattgtatgaacagaacatggagttctttccaaacagaaactaaaccaagataacacgtcagagagaacatggagttctttccaaacagaaactaaaccaagagaacacgtcagagagacacatagagaagaagcatcctgcatcaggaacagcgaaaagaacaagaaggccgaaggcggcatctggttaataaattttcagaaactgaactcccgcaacacaccaaaattaactgaacaaactggaaaatacaagcagacaagagaaacgaattgacgtggtctaattttttgcgcacgcactggtagagactttgagacacacacagcaagatcaatacaccatgaagcttcggtgctcatcagcctcctcctccaactcagaaaaccacactccacctcaaacttcaaaaccatcgaagcaacaaaagcacggtacgggaagcctacaagagagggaaaaaaagatcaaacagctgtgatccttgccccaagtttcggatgacgaaacgcctcaagattcaaagagaggtcaagacgcggttgctgctcgatcaaatgccacaacagcgaaagacatgatcgaaccagaaaaaaccgcgacgcccccaaacacccaagcacgcagaaaccacaccaccaggaggagagggagaacaccaccagaagagcgagatcgaaggaaagggagaagaatctcacggcgctttgggaggacgtagggtttagggatggaggaggaggagaatctcacaactcacctcgcacctttcgccgctactgctcttgagatgagtacgttgcgagagagacagagagagagagagagagaggagagagatgcggaaaagtggttgtgcagcgaagcgcaaggagaagaaagcatcgcgcttaaatacctgaaccggacgcatctcggctgtcggatcgtctctcgcggctgatccaacgctcgaggagtgcaccgcccgtgtctggtggtccccacggagcacgcgccctcctcctctcgccctgcatgacccacattgcatttgcaactatagctgtggtgtccgttatgcacatcccacagctgacatgtggggcccacagtctcgcttctgtctcttcttctcgacgcataggcctctctctccgcgccaccgacgcgagctgccgcttcctgacagccgcgccgccacccacgccaccaacctcacatagtgcagaagccggagtggctttgttcctacgtgacaatcaaatcaatatttttttaaaaaaatcagtgggacccaactattagagagggaggggtgtgagagggaagctgatcaaattatcacaaaactatatattcgttgatcaaattatcatacattgatcgaatttatatttctaatccagtacattgatcatcaagttcgcgaatgtatgatggtatcaaagcttacaaggcagagacctgctgctgctgctgctggcctggccttggtatgaattgtgatccaccgattccagtgctcgtgatttctgaagatctcggaatagagctgcaaactggtcatgttggcctgcaaagagacaaacaagccaatggaggagttagattgaattgtgagaggttactgaatttccagcttactgaaatgggctctctttatgagtaaaaaaggagcttactgaaatgggctctctttatgagtaaaaaaggaatgatagagtaagtacgttacaggaaactaagggcccctttgcctttgatttgtaggaaaagtgttcaaaatttgaaagatttcaaccctttggaaaaaattcctatgaaagcctttgaaacaaaggattgaatcctatactatccttcaaaattcctatggaatggctaatcctatagagattttgaaggaaagttagcaagaggtccaacctcttggaaaaatttctttgagtctatctctctcatccgattcttgcgtttttcctgtggtccaatcaaacggttattcctgtgtttttcctgtattttccaatcctctgttttacacctgcattcctgtcagaatcctacgtttttcctattcctccgtttttccattcctgcgatacaaaggggccaaacataatgtgggagttatttgctctttattttcagatagtgaaatcatctcgcagtaaaattgctcttctttcaggctaaaatcaaagtagatgaaaatgagatattgtataacgtttacgctgaacacctgtatttctttgttggttgaaaaatgaccctattaatattgtgcgctcagccaataccataattgctctctacgttgacgaacaaaatacaaactagtgatccataacagatatatccccccatagtgaccagaatacttactgatatgcattatgtatcaggatcagcttctgcaacatgaagagcccatatgcatatcaattccaaaccagttggaatgtcctgatttctttctataagaactgatgagacatacatcaggtgcagcgctatcaatttgcaagaagttgcaaacaacacatagaccttctgacatatgcttcaggatgttgtgaaacagctctgttgaaacaaaagttaatgtcaaaattgtacctaactaataaagttccttaacacaggaaatgtctgtttaggcttggagtacccagatcttattgtatcaagaatagctgtggcaacagctgatgcttccggatgcattgtcatgcacttcatacagacgccaagcatgcatacaatttacctaggacaacaaagtagcgactgagcaaatcgataccatattaccatgtgatcttttatcatatcattgcatgagtgggagcataaaagcagcagcataaaccaaaagcatacaaaggaaatctattttttgaccactccgactgcaaatctttagcttttccaagaccccatttacgagattttcctgatttaagtatttaacttgacatgatctagatggaacctcctctttcataccagtgtgaacaattcagaagtgtcctgattctaagacttccctccaaggacctgcaacaggacaggaggtcccctgtccctgaagtagctaaatttcgagcatgtactatgtcaaccagaccacagggtaaagtatagaaaaatacagatttataccttctgcctgacacttatgaagtacaaggattcagctagatgggcctcacgcacttcaatcccacccaaattctcttcagcgtcagcaatccttgatacatgaaaaaaaattactttcagaggaagcaatgattcttgtcaaacttgctagtaactgaaacattagatacagaacaaatgcggagagcagaacggaagatatatgtgaccagctaaaaggggatgtgttgatgactggaaccacaattatactatttatgctctagtgaagttatatatcttgattttccttcacattagtttacattgggtttttttccttggtgaggagggtgcataaattacttttatattggttgggaagttgtgaattgtgatccttaggaatctatattgcttttctacaagcccaattacatcttgtaacaatgaaccaaagcatgcattgatgcacatctgtgagcctggaatcaagatacacgaacactggcaatatactgaagacagaattaggcacttggtatgcaaactctctcaagaggaacctcatacaatacataccgaccccattctgaaacataattcataaattacatatatccagtcaaatgcaagtgatcgacaagttccccaaagtaacctaattacctaacctaaggttcgttgaggaaaacgtatcgtagcaaagacttgagttgtcacaaaatttatccccacatagagagtgctacagcctacagctataagaacagcaacgggcaaacctaattttctgggcaataccgcaataagagtaacatgatgccaaaattgaggggaggaagaacccactcacttcccgtcgagcttgcggacctcctcgtcgatccgcgcgcgcgtagtccggcggccagcgactcgaccgcggcgtgcaggcggggagccggccgatggatagatggagagagacggcggatttgacggcgtggaggacgtcggagcggagggcgaccatggccggcgaggtcgtcgtcggcgtcgggatgggagaggaggaagagcttgcgggccggcacgagcaaccaggtggcgctcctgcttcgcctcctcgccgccggcgtccatgtcgtgccggtcactgacgagtctctcacttttttcagaacattttttttttttgagaacaacgagtctctcactctcttgctgttgccgactgccgagccgaactgaaagaggccatgggccggtttcagccacgaaatgcttttcagttcgaaaaagttctctccacgtcccttatgtacgaggtagagtttcaatcgcgtcgcccaattctaaaaccaggtataagcagggtttcttttcggaaagcaaaaaaaattcggtaggcaccattccgaacaaaatattttgaaattttaacacattttttttactaaatttgaataaataaacaccaaattcacaaatatttggaaaaagcaaaaattcaaaattaattttaatattttataacttattttgtcaaagaaaatttaccaaatcattctcttaatgcaacgcgagaaggtttcataaagtttcaaagaaaaagtgctcccaatcacatagtagagaacaaaacttaatgaaattaatagacatgatatagccgagctatcattactgcaaattctgaaagaatgagttaattaaaaagccctcattgagttggcataaaaattcaagttcgatcctccatgtagtgcgctcctacttcttcatacctagaagacgtttgagcggctccaagggaaagccacaaccatggtatgagttcttcgtttcagggctgcttgccccttcgcctcgataaggaggtcttccagccgtagaccgcttactcttcttctgatttattaacttatctttctgctttgtcactctcgtattctgaataggaatcggcaaacaggtacaaccatcctcgaaaaatcgaacaaccctcttcaccttactcaccttagtgtcttttacctcataagcattttccataattgttggccctacctgatagatattttcaacacttcgagttgttccgccatgatatccagaaaatgttggcatcaatacttgaggcgactggtgatacggaagatttgtgccgggatcgattacaaccgtagttcctcgttccatgtcgtatacacacaacactttcccattgaaccccgagtagtagacgcagttccctctcaagcccgttccctccgtatcaagtgacgctccaaaactgcctatcttaacgaagaacgctctgccacctagcgaatccaccttcacccacgctgctgatctttgcccctgcgttgtcgtcagattaatgctcaacctgtaaacgcctacacgcgcgacaatccggtcacatccgatcgggtgagagaagacaacggagtgcagctccccgtttgattccacgaagcaagtggtgcgtttcttgtacaccgttggtctcctgtcgtcgtcgacgccgtgtacggcgatcttggtgagcgtcagctccggcgagaactcgaggacgccgacaagcccgtcatcgccgatgaggagttcgctgtagaacttgccgtcgatcgccgtaaactggcgtaaaaacctgatgatgacgtcacggtgctcagtgttgctgtgctggtacggatgctgatggagcctcacccagtggttgtcgccggggcggcaataccagagctccgtgtcggcgaggtcgatgacgaccacgacacagctggtcgggtccatgggaccgcagcatgagaggaggcacctccggagatggctgccttcggcggcgaggacggtgccgtcgtggtcggggggcagcccgacacggcggccggtgaaagggtcccataggaaagtgcacggcgagccgcggtgcgccatgagcaaccagccctgcgccgtggcccaccagcggtggcctctcatcatgtcgtcgacgccgccgtcgcccaccctcgttggcgttggcgttggcgccagcagcgctctcttcggcacgctgtagaggaacgtggcgtcgccgtggccgccgaacagcagcagaggagcaagcttgggatccagagcggcagatgcgtcgactgcctcctccatgatttcaacggacggctggccgatcgatctttcggtaattaatccttcgtaggagacggccggtcaatctgtgctatgctttataaacgaggagagtttgtggcagcccgatttaagtgttgtctcgtgatttctgttcgaaatcatccgagaggctttgagaactagtatatatatatattggcatataggaaagagaaacgaagaaatctgcacgcctaaatctgcagcgcccatgtaagtaaatcaggaaaaggaaacatgaattcctacacgtacggcatcaaaattcaaaccaattataatctgcaccgccggtaaatcagttttttggcacggcatagagacggatcctccacattactatgcaaccgacaaaaaccaaccgggtggggtacaaactattacaagcggaagctgacctatatgtgatgcgagtccggtggaaacacgtttccgaagaagcagtgcagcacagaacgcagcacgccatgcaggtcacacgcgtgcccgaactctcgagattctccaatctccaatcacagaggcggccgctgcgacgacggcggcgcagctgggacaactgccggactggtcgtctctcccgttggacatgctcgtgctcgtcctgggtcgagccacccgagcttcgtgtatgatcagtatcatccgtcgcatgcagatgcagtgcatcatcacacatcatctccgtcttggacatcaaaattgagtggaactgtagtgaaccggtgacctcctcctgaatcatgaatcatgcatctacgggctgtcgtcaggagccgtgccctcgtcatcagctaaacttagtcatcagctgagtgactaagtttgcatgtttccgctgacagagatcgattcagcgcggctaaggattcaagatgccgttcctatcaatcaaggcggcggcggcggcacagagagagcaagcgagcgacaagctacggcaggaaggagagaagaattctagcacccggtgttagtatgagtggaagagggaaggacatggcttaacgatgccaaggggcgccgtggcgagatgacggtcgttcggcctcggcgtgaaccaaggagtggcgccacgggcaccggggtcggagaagaggaaggcaaaagcggcgagcttgctctggtttggcggcaaaacggtcgcggcggacagaggggtgacgcgcgcgcgggggaaacggcgagcggcgcggcggtggagcgggagcgccgtccccgtccgcaccggcacatgcgcgacgcgtgcggttgctgggccgtgaccgagcgctgggctgggtcgacatagaaaggaaaaagtacaccgaaggtccctcaacttgtcatccagttacaaaatcatccaccaaccgaaaaaccagatataacacaccccctaacttataaaccagtaaaaactagatccgacgtggcgactgagtcagtgtgggccttatatgtcagaatgccacgtcagcaagccacatcagcaggccggcctgtcccttcctcctctctctctctctctctcactcactcttctctctggcaggccagccggtggtggggaggaggtcgccgaggcgaggaggtccgacagccggccggtgatgtggcggcggcggcgacgcggtggcggagacacgggagaaggggagggcgtcggtagggcgaggcggcgttggcgggcgagcgcgctggcggagaggcggtggcagctgcaacgtgggagaaggggagggcggcggcggagacacgcaagtgccgcttccccacgcgcgcgtgcaggagaccgtcgccgccagctacgacaaccttgtcgccgcggcgcacgggttcctcgcccgggagggccacatcaacttcagtgtctccgccgcgttccccgcctctccccatcaacttcgaagtcattagtcgccgcttcgagctcaaccaaagaaaatgatctgtatgctggaatgcccagagcttccaatttcactgtctgagatatgtaacctgtttggttgttccaggtaaatgcaacaagaagttagtatttcagataaagttccagaaaaaaaaatggcgctatcaagttagttactctaacactaggcaaagttccagagaaaatgacgccaaagtaaacgaatctaaaaaagagcaaaagagatacagaagtttcagtcaaagaatctgaaattcagcaaaagtttcagagattgtgccaagttggtgactctgaaattcagcaaaagtttcaatgaatgactgaaatttagcaaatgatccagctaatgactgaaattcaacaaattttcagttaataaatctgaaattctaggaccaagttacgctgacagggacaagtgaagcaccgagtggaagatcagcacaagaagataactctgaacagacaggactttttgcaagcttgcaaagtgcagatgccaatcctcatgacatctattcttctttggttagagaaggcctgtttgatactggtgatgagattctgtctatggatacaggggaatctgctgatactcctatttcaggcctagcgtcaggtttagcaaatcttggcactgctgatccagctgaaaggggctactcaataaacgagactacaaatgaggagggatacttgattgaaggggatgatccatcaccatcaaacaaagacgaacaagatgaccaaactgatgcacatggtgagtctacgccagaggcccagagccacaagatggctgctccatctcccccagctgccgcccatcttcgccaccgagcgccgccgccgcgcttctccccgtcctccccgtccgccgactccatcctcgctgccttcgtgacctgctgccgccgccgccgccgacatgcgcagcagtgggatggaggcgaagaggctagtcaaggcgcgattctcccgtgcgctccgggagagggccttcttcctcgccggcctccgaccgctccccgtcgcacgaaccctcctctccgccgcgctccgcccccccacccccccccccccccgggcgccggcgcgcccaccgggcgcggccctcctcccctgtcggctatgctcctcgacaggacgactagagaagagagaggaagagacgtggtgactgggaggctcttccccgtgtgcaattaagaaagatagtatgggcttgtttggtttgaaaccctaccaaaatattggtagtaccaaaccttaggcacattttggcactaacaaattttttatagtacagatttggctccactctattgatttggcaaaatttggctccaatccaaaatgctaacatgtactattcaaaactaccaaagaattggtagggcaagaattggcatcaaaccaaaatggccctatatgtccctgtgccactaaaatatttgagccctccctttataccattgtcgaattttatcgcgccctccacaccgttccgttgctattccgtttagatttaactatttggcagctctgacatatgggcccgggtagaaaaaatgtcgctcttgccctttcactcagtcttctccctcgattcccctcttctccctcaggcggtcaggccgccgcccagctggggcaccgcgccgccgtcgcctcggcccggtcgtcgtcgtcctgatcctcgtcgtcggtgcgctgttcctcaacctcggtccaaccggctcctccagcttcaccatgccgtggatccgcatggagttcaacgaaccagtccacgttgcggtggcggctccgcctccgccgctgacgcagatgcaagccggcgtcaacacgagcggcgaggacctccggccgacaacctccgcctccgccctgacggcgcgctcgtcgtgctccacgtccagccgccgccgagcatcgccgccgggctcaaccccggacccatccccttcggcggcccgagtaagcaatctctcgcactcgtcttcgcggaaattaggacggacacttggtcctgtggctgtgagctgtggttcttgcgaattttttcggtcgagctgggtgggtctgatggcttcctggatgtgccgcgcggctgatcaggcgaggtcgctggcatcactagtagcaagcatcaatagtcctcgccgccgtcggccgtcgttgtgctggtcctggcatcactagtagcaagcattactagtagcaagcatcaacagtcatgaacaccagtagcaagtatcaatagtcctcgcagccatagttgtgttggtcgtcgtcgttgttgtcgcagcgctgccgcccccgtcgtcgcgcagcactgccgccgccgctgtcgtcgcagcgccgcccccgtcttcgtcgtcgtcgtcgtcgcagcgttgttgccgccgtcttcgtcgcgcagcgatgccgccaccgtcgtcgtcgcagcaatgccgccgccgccgccgtcgcagcgctgcccccgtcgtcatcgtcgtcgtcgcagcgccccgtcgctgtcgcagtgccgccgtcttctcccctccgctccttggctgctgctgctgcatctgaggggagagaggagagtgctaggagagagcatattggaccaaagggcaactaagtcattttactgcgccattacccaccgttacaacaaaaacagacggaatagtgtggagggcacgataaagtttaacgatggcagagagggaggcttaaactttttagtggcacagaagcaggcaccatctttcttaatggcatataggaaaaaacctcgttgactggtgaggaagagacgtggcatccagaaatgtggggctcacgtgggtcccacgctgactcagccgccatgtcaaataaaaccagaacaaaactactaaaggatctaaaatgaacgattttgtaagttgaaggatgtcatatatctgattttacgggtgagggatgattttgtaactcgatgacaagtcgagggaccttcaatgtactttttccacatagaaaggagaggctagctaatcgagtggaacgatttgatcctcaggctagctaatataactctgtcaaatgaaaaggactgctttgtatggtcgctctataagaatggtcaattttccgtcaaatctatgtatgtcgcgatcatgaactgtaatgttcggatcaaaaagagaattctgtgggacttgaaaattccactggagatcaaggtctttatgtagtttcttcacaagaaagtatttctaacgaaagataacctgggtaaaagaaaattggagggggcggagacaaacattgttctttctgctatacacaagagacaatccaacatcttttctttgagtgtcatgttgctcagtttgtttttggagatgtgtgttttttgtttttaatatccccccaccccgtaacgccaaaaacattttcgataattggcttagaggggtatctaggtccattaagaagatgattctaattggagctagcgctgtatgttggtcaatttggcgttgtcgcaatgataaagtttttaatggtaaacaattatctaaccctatgcaggttatcttcatgtcttcctactggctccacttatggtctacaatgctaccacaagaggagcaggatactatgcgcaatggtgctacactcttggaatcggtagccaagggtctcttattccactatgggtggcgtagtttcataagaattgctagctaaaatattttatgtggtttaacattagtcaataataaaggggagttggggatttgtcccatcaccttatttctcattttgatttacttttatcttacatttttattactattaaatttatggctgtgtgtcttatgacagaagccggagatgcaatccatttccattatctaaaaagaaaggagaggcagcccaccagaggggaaaatgtttgaccattttccaggaaattatttgaagaaatttggggtctggtttgatttggacttgaattcaaattggatatttgaactcaagggttcaacaaggagtcaagaaggtaaactgaggtccccatcggttggcttttttcctacggcttattaggaaataaaaatgaatttatagataaaacttttatatacgtgtttttatgacttaaaaaccaatggtgaaaaagaaactacgttgaaaatatcttaaaattaagtttgaaaatttaacatttggctttttctttgactgattaggccatccgatgggagcgtgaatatgaattcgatatttttggaattgggagaagtagatggcaaggattcataggaagggatatttaattggaaacctgaattttgagattcaattttggaatcaaattcaacagtacccaatacatagaactccctcctgcatcgctgttgcctgttggtttcccgcacgatcaagcggacgggtgggcaagtgaacgcggggaacggaaatgctactgagcgatcgcccagggcgattagatttccccctcctctccctccctccctccacctaatttattttttttttcaccatattactttcctattttagtaaatttatacacctaaagtttatacacctcaagtttacatatctaaagttttttttgctaaaagtttatatatccgattcaaatttgaatttgaattcaaatatttttatatatagtatttctatacatctaaagtttatacacctaaagttcatagacctaaagttcatatatccgattcaaatttaaatttgaattagatctgatttaaatttgaatttaaattcaaatatttttcatatatagtatttctatacatctaaagtttatagacctaaagtttatatacccgattcaaatttgaatttgaattcaaatattttctatatatagtatttctatacatctaaactttatagatccaaagtttataagtcaaaagtttacatacctgattcaaatttgaatttgaattcaaattttttatacataattttttctaactttctgtttttttttaccccccgcgcggggaaggcggaagagagaggtcgcaaattcaggatatctcttgaaaaaaaggagagaaaattttcgtgccttaatcctagttacagattcccgagaaaagattttgagtatcacagtcacagagactagaagaatgaagaaaactttggtcaaaaggaaactgggaaaaatactactagtagttcataaaccactaccatgcacagagattcaaaatgaagatcaacaaaagcatcactagatcaatcaccttcagaactaaaaaggctagagatgattcgtaaacaattaattcaaggtgtctcagtctagcaaagtagcacaaccaaactactactatcaacgggtcggtgctattactcgtctaccactaacaggatcagaattcagaatatataagttcccaatcggaaagaccggaactggcagtggcgtcgaccttgacctcgtcgccggtgttgctgtcgtcagacccggcattggcagtgggatcaacctcctcgctggtgttaatgaagaagtagttgtccacaatggtgatggttgcagtcgacaacgacaccacggtggcttcgtcggcagccacggcggtggtactgctgctgccgacggcagtggcagtggcgtcgaccttgacctcatcgctggtgttgctgtcatcagacccggcattggcagtgggatcaacctcgttggcggggtcgttgttgtcgacatcatcgccggtgtggctgtcagtgtcagtgtcggtgtcgaccggcggaacagcagggtaggcgccgggcttgaacagaaccaggatgacggtcgtgttgtcgcccgatggcaagccaaactgaacaagctcctcacagatgacacgcgcttctgcaccctcctgcatagcgatattaattggtcacagcaagtcagcaatatttggccacagcaaaaggaacaacagttttaacaacgaaacaatcgagcatgcaagatatttttttgacgtaaacatgcaagatattagtcacagcaatattgatcaaggcaaaaggaacagcagttttaacaacaaaagaatcgaacaatcacaaagcagatgacagtgtacttattagcacttgtttttttcttttttaaaaaatcggatgctttatattgcctgagtgaagtcatttcctagaatttgacacaaaatatttttgctattacagtaggagatctcttgtcctgccaagaagacaaactgagcaaaagaaaaggactcaccaaaagacggtcatgtgtgtgatcaaccacattttgatttgtcatgttgcacctgcatggaaaaaacatagtacagtaggtatgcaactataaatgaaactatatatgcatcagcaggagaaagaaaacagcatcacaaagagtactagtgacatcaaaatgatcaaataataattattgtcagttattttttgttcaaaatttaccagaggccttcagttgctatcacaagaaactccatgtcatcagttatgtccatctgacacagaaagggggattttccatcagaccccacacagcagtacaaacttcatattcaaccaaatactaaacaaacatagtggcacttacagtcaggatgtccggattacatgtcagcatttgatcttcaggaggtaaacgttcgttcttcttgcaagcaaagtcccctgaaatgtaagtgggtaaaacacatcagcaaatcacaacataatatgtttttttttcggtgctattatctgcaataaacgaaaaacagatccaggcaagactataccaattgatcttgagattgatactcttcccttaaaatcagtaaagccccattgtttcttggttacccacctccccattattttacgataactatgcccaacagctactcctcctgcattctgaactctctctctttcagactcactgtctggtttatgatcgacggataatgcactggccttttgacacaacagaaacaagcacaaatgttaggcaccaaaataagagaacatgcaaattaggtaccaacaagaaattcgaaaaggaaatagtcactatacctgaccatttcttgagagtacacaacgagaatcaccagcatgtccaacaatcaattggttacctctgatgacaaccacacatgctgtgctcccttcatatgctggctcagtataagttgcctggaaaaagaagaaatgaattggaggacataatagggaatcccaacatagttagaaatacaagtcaagcaagaaatagctcaccaaagccaccagacaaagaaaaacatttctgaaagccaaaccagtgtatgaaagagattaccatagaagagatgccgcaaacaatacctcaatttagggtagtaccacagtatgataagaaccaaggtgcaatgtgaacttaagaacctgttggcctccaacgcagtaaaccagacaattgatatgtaactaactgaaccttttttaataggagcaattagtcaaggttagggttaaacatatctcttccaactccaaagtacatctcaagaaagaacaatagtctcgatatcacacacattcttccatttcctttttcatagatacaatatgcactgtccaacaaatacagttttgagtaccttcaatatatggatattaaaagacgttcagggtttaaaagataccttgcaaatgcttgtacaagctgcagccttgagaaaatacatccatccattattacgaggaataactaactccctccaagcatcggacagttgcaggtcctcatccatgctgcagaaattacacaggaacaatgaaattccaaatttgcaagtgcagcatcattcagtgcaacaaaatgatatagactaggcgaaaataacctgtaaaacgcactcctcatcgcattacttagattgctgtcgtagtcttcatgattgcaaagctcaatatgaaatcgttttgcacaatatgatgctacttcagctcctgagatagaaaataaacaactcagaatggtggctcaagattactcctatgtgcatatagaagcttataaagcaaaacaatgtgatgaacacagcagatcagcacttcataggtatcataagaaaaatagcaccacacataaattaaccaacatgttcatcagtggctatccttttaattatcatgactgttaatattaactcacacccatgcagtgttttatccctcgtaaattaatattctgtttacgcagttcatgttatcctagaaagcacaccgcacataggtgattagtactaattagcaaacttggttcattatccagaactgtagcttaatatttatttgaaaattcacaggtaaaagtttcagcataaacagtaaagttttcaaaacatgcacgcagataaacacatgacatacaaagacaaacaaagcatgatgtaaacagttatgccgacgatttggaggatttgaaaccaaaaaaaaaaaaaaaagagagagaatgaagatcaaacctccatggccatcataaacgccaaagaatgacgtcatggtatcatcaagatttagaatagctgcatgctagagaatatagagggcatatgtcagtcacagtattttacacaattacttacagatcagtaagaaatttttgcagaactatccttttttttgtcatacaaaaggctgcaagtttactcacagcatcttccattttctcaccccatccttgcatagacgacacaacatacttaattctgtcattctctttttcatcagtgaactttgattctacaggaaggctgttacccatagcagacctttgttttgctgaaaatttataacatgaatacaaatatacaataactttattgacaaatatggagaaagagtaaagtgaatacaattacaaaacactacagatcaattaaatacataagagctttcgtaaaaacacgaaaaggagtcaactagacataacatgatatgacactatttatcagggcccctaaatgcatttttgagacatataacatgagatcatcaatcttcagttgcaatgctgcagtaattatacacattaatcttatatcttatacaagaatcaagcaaggaagaattaaaataaaatattactgtgaacaaaatgcatacaaggttttgtaagaacgccatataagcttttctgacacaaatcataacaccaaattccaaagtgaaatgaagaggaaacaaacagaaaaggcgtattgtacaaggacaataaatttcctcccgatatggccacctctttggtgtattaaaacttcaataattcgaaacagagtatgaagtgaacagaagaagaaaaacagagacagcagcgtgcacttatagtagaattcagcaaggagaatacaacatgacagcgtcaccgagaagtaaaatataggtaacaaacatgaagaaattgtacaatctcgcagaaccaaaaccgttgggcttagaaggatcccaaatctaagattcaagagatgaaagcttctttgatatgcaaagagtcagaagatttctcatcgaaaagggaaaaaaacaacaagcagtttaaccaagctacacatgcagaaatcattgtatgaacagaacatggagttctttccaaacagaaactaaaccaagagaacacgtcagagagacacatagagaaaaagcatcctgcatcaggaacagccaaaagaacaagaaggccgatggcggcatctggttaataaattctcagaaactgaactcccgcaacacaccaaaattaacagaacaaactgaaaaatacaagcagagaagacaaacgaattcttcgcgcacgcactggtgtagtctttgagacacacacagcaagatcaagaccaacgtgttccaaggagagaagcgaacggagatcaccatgaagcttcggcgctcatcaaccttctcctccaactcgaagaaaaccacacccaacctcaaacttcaaaaccatcaaagcaacaaaagcacgggtacgggaaaccaagaacaagagggaaaaaaaaaagatcaaaccgctgtgaaccttgccccaagtttcgggtgccgaaacgcctcaagattcaaagagaggtcgagacgcggttgctgctcgatcaaatgccacacagcgaagacatgatcgaaccagagaaccgcgataccaaacacggccaagaaaaatcgtagaaaattcggattccgaaacgccttaagattcgagacgagaagagaacaaggcgcggtgctacttgatcagtcgtaaggaagacgggcgtataacgtattgcatcaggaacagcaaaaataatttggttgatacaaattcagaaagtgacacctccgcaacacaccaaaacagaagcgaaaaaaaaaagcagagaagagaaacgaattcatggcgtctaacttctcgcgcacgcactggtcgcgccaggaaccatcaagatcaacctccatgaagttccgatgggagagaggcgaacggagaccaccatgaagttccggtgctcgtcaacctcctcatccgactccaaaaaaaaccacgcctcaaatgcatcaagcaacaacatcacgggtacaggaagccaagaacacgaaaaaaaatagagaggatcagagggcggtaaagaggttcaagtttcggatgacgagacgcctccagattcaagcaagatttcggatgtcgctcgatcaatgccactcagcgaagataagaacgagagaaccgcgacacgaaacaccaagcaaacaaacaccaccaccaatggaaaaacgaattgatgtggtttaatttctcgagcttgcactggtagaaatagagaaacggaaggcaagatcaagaccaacgtgttctgaggagaggcgaacgagatcaccatgaagcttcggtgctcgtcaacctcctcatccaactctaagaaaaccacgcctcaaatgcatcaggcaacaacatgtcaacatcacgggtacaagaagccaagaacacgaaacgaaaaacaaaaggatcgacgaaacgcctccagattcaagcaagagttcgacgcgcggtgccgctcgatcaatgccactcagcgaagacaagaacgagaggaccgcgacacgaaacaccaagcaaacaaacatcaccaccaccaatggagcaagatcgaagaagagtagggagaagaatctcacggcgctttcggagaagtagggtttagggatggaggcggcggacgaaaccacagaagaggaggggaggatgaagtgagagagagatctcacctcccacctttcgccgctgcgctcttgacacccccgagagagagagagagaggagagatgcggaaaagtggttgtgctgcgaagcgcaaatagttgtgcttaaatacctggatcgtcgacggctgatccaacgtcgaggagtgcccccatcctgtggctggtggtccccacagatcgctccccctgcacggacgtatctcctccgtcggttcgtccctcgcggctgatccaacgctcgaggagtgcccccatcctgtggctggtggtccccacggatccctccccctgcatgatccatccacatgtaaattttcaactacccttaaaaaaaaaaccaatcccacctacaatatgtctagattcgtagctaggagtttattttttttctttcttttgacagagtagaagcttcgtataattttcacacacaagctggatcaggatgacttccatacaatttcaacacgatcatgttcttttgtatgactgacgaaaattctagtatttcaaatctcagattaaaaaaaaaatcctgtaatcaggggcggatccaacgtg

SEQ ID NO: 7014 - DNA, 17732 bp, Oryza sativa
gttgtccatgggatggtatggaaggacacatagccgatttgaggttagcttttgagaggatcgccggtatggtttgaagatgaacccacttaaatgtgcttttggtgtgtcggcggggaagttcttaggattcatggtgcatgagagaggagttgagattgatcctaagaagatagagaagagtcgtgatttcaaagcgccgacatgcaagaaggaggttcaaaagttgctaggtaaagtgaattatttgagaaggtttatttctaacctagcgggtaaaatcgatgcttttgttcctatacttcgcataaaaaaagaagccgattttatttggggggggcaaaacaacaggaggcgtttgaagagttgaagagatatttgtctactccacccgttgtgcgagcgcctaaagccggaaagccttttcggttatatattgcctccgaagacaaagtcattggtgccgttttgacacaagaggaggatggcaaggaatatatcattacatatttgagccgccgtcttttggatgccgaaacgaggtatgtttttatagagagactttgtctattcttatactatgcttgtaccaaattgaggcattatttgttatctagcacatgcgttcaaatacacattgcctgatgaggatttatatcgccgaaatatagatgatgtcttgttggagtgcttagataaagatcaatctaaagtggctatgggagagatacatgaaggaatttgtggaactcatcaatcggcccacaagatgaattggttgcttagaagagcggggttctattggtcgaagatgattgatgattgcttcaaatattatagaggatgcaaggcttgtcaacggttcggcaatgtttaattggcacctgccgccgtgttgaaccccataattaaaccatggccgttccgagggtgggctttggatttcattggtcaaatatatccttcgtcatcaaaggggtataggtttgtgctagttgctacggattacttcaccaagtgggccgaagcaatgcctttgaagaatatgactcatatggaggtaattgactttattttgaagcatattatccatagattcggtattccacaaacattaactacggatcaaggtgcttcttttatgtcgaaagaagtgaagaattttgccgaatcttatggtattaaattgttgagttcttctccttactacgctcaggctaatggacaagccgagtcgagtaataaaacattgttgaagttggtgaagaagaagattgaggaatacccaaagaggtggcatgaggtgctttttgaagcattgtgggcgcataggatatctaaacatggtgccactaaagtcaccccttttgagttggtttatggtcaagaagccgttttaccggtggaggtaaatcttggttctcttcgtaatgtcaagaaagatgatttgtcaagtgaagattacaagacgttgatgggagataatcttgatgaagtcatcgacaagcgcttgaaggcattggaagagatagagaaagagaagaagagggtggccaaggcgtacaacaagagggtgaaagcaaagttgtttcaagttggagacttggtttggaagacaattttccctttgggtactcgatccaaggagttcggtaagtggtctcctagttgggaaggtccttatcgagtgtgcggcattgttcgagggaacgcatactttttggagacacttcaaggggagcgttttcagcgagcgatcaacgggaaatacttgaagaaatacttcccgagcgtttggcaagacgcttaggaggtactatggccggtaattgagttattgtcctaagaccaaaaacatgttctatgcttttagattcacgttgttcataaaaaaggcagggggcatgtgtttacacccaaatttggcacttaggattaaaataggaaagattgccaaaatttggaagtctaccggtttcctccgagtgggccggtctgaccgccgggcggtcagaccggcagtgtgtggccggtctgactggcaggtccgagtccgactgtgttacgtcgggtttcgaggtttccttgctcgggaaggcatgtttcgggttttctttagtttctaccccgagttggacgtggaggaaggcctgtagagggcaggaccaacccctatataatggacatggccggttcattgtaaaaaaccaatctacaatccatcaatcgaatcgttctttttcatattgcttttagttttctcttagtttgtccatctttgttggtttgcgccgtaaaccgtccgccgccgctgcgagagtgtgacatctctttgtaggtttgtcctgaaaaccttccgttttgcccaggagacgcgtagttatctagaaatcggctccgctagccagtttagttatcaaaacccatctaggtttagctctttgctagatcgaggtggttggcgactctaggatcactgcaaggcttaaggtgctgcgatcgtgcttgtcaatttgtcaaaaaagttgccaacagtattgtcgccgttccgggagtttcaaccttcctctctaccagccaccaacctccccgagtgcgcgtcgaccgggaacacaatatgccaccgacgtcgccgcactttggccactggaagcccgacgccccgctcgcccttttctctccctctctctcggctcctaactgaagagaaggaggaggtgatgggaggaagaagaagaggaggagagagaaagaaaagaaaggctgacaggtgggccccactacagtactatttcacattttctagatttaattcaaattccaatttttagaagcccatatctcctaaaccgtagatccgattccaatgaaacttggacctaaatttatataaattcaaatcctaccttttggcactaaatttgctattgtaatatttatttgaattttcttatttattcaaatgccgtttgaatttatgtttgccttttcaaatatttctttttaacccaaaataccctttagccactaaaaagccgccggttggaactttacgcctttcatgggaacgttcgtgcggtctaccgaccccgacgtcggaccgtcggttgtaaagcccggcaaaaccaaacctaaggtcgaagtgctgctcctggcaccccacgcctcgatgcgtatagtggtcggagcttcactattccatcgacctccatagcacaccgcacagttagctctcgggctctgtgtgatcctagccgttccgtggccactcacggttatcggagtaacacttccaccccgctaaagcttcacaatcttcttatccctctagccattgtattgtctatcaatatcggctagacacctaacctagtcgtcatactatccaattctaatgacgactagcaaacacccaaatcccagtcgatattcatcctacctcgatatcggcttaatcaaatgaaaccccagccagcctgctatccaaaatccataccagccatttactctccaactacctagaacctacacataaaatatagagcctggccgatatattgccctactcctcaatcagcctaaatataaccaaaccctaggtataatcctaccttaaatcctagtcattcttctacctgtggtatttcgaggatcggataatcaggttgcctatctcggatttatttgtgttggagcaaggcaagttattattcctcccctttgatcataataatcctatattctatatctccagtatcttgtgcattagccatacataatttttaatgcataacctgaatatatagcaaaccagatatatgctagattttgcttagccatgcctagttagacggcataaaatataatgaacttagattggaacagtacggaagaaatggttgatttccgggtggctagtactgttccaaccgacataagactgccaagtacatgtgaagaacatacgagtacgaccgcaattctcgtatgggcatagacctagctgactacgttatctagcaaaggtggtacttctgtatagtggttcttcttaagtcctcgcgtaggaggcaaatttatgccgcgaagggcaattatgatatttaccgaggcgcaggtaaatatacttatattgatagtccaggggactatattatggccatgtgattttattaaccctgattgcgatgacatggtgtcatacaatcagttctctctaaatacctcgagaatgccagaactcctcttgctgctgataatgttatgttcagagcgcatgggaactagagttcatggaacaggtaccactgatgttagtaaccgaaaagctttgccatgataatggcacgtcatggattgcgggtaaagcatacatctactgcagtatgaatattctcaaaactattcgaatagccgtgctcgcggttatcgggcattgggactcacaatggcatcttggttagaaacttaattccaaacattattaaatattgtttgtcgcgtcccaaaacgactctaaaatatatcctttaaattatgcctagaataattaaaatctgtgtgcaagccttcaacaattaaaatgtgcaaagttaaaagtcaaataaggcttggaggatttttgtatatttcctaaaagcctaaaatgcgtaaataaattttagtggaattttcagagcacaaataataattattaagaaataaacaaagttaaaaaggttttataaaaagaaaaactctaaaaagtctttttaccccctccccttcttgggccggctcggcccatctctctccctctctctcctcttccccgcggcccattcggctcctccccgcgcgcgcgccgctgacgggcgggcccgcccacctccctcgctgacgggtggggcccacccgtcatccccttcctcccgccgctcccgccgccccgcccgcgccctagcgccgccgccgccgcgaatcccgccgcctcccgccgtccccgcgcgcaataaagagggggaaatcactccccgtgattccctctccctttccccccatttttccctctctctctcgttcaaacgggcggatttgccccccacaaatctcgccggcgccattgatggagcccgagagcgccgcgccggtttccttctcctccggccgccctctctcactaccaaccctatataaaccctccccgcacctcctccgtccgtttccgccactcgccgcccttcctcctcgccggaatcgagctcgcgccgtcgctctctctctccgccgtcaccgccgagctccggtccgccgccgtcgtcgccccggaccacctcccacctcggcgccgcctccttcggcttcgccgcattctcgccgacctcgtccacccctccgtttcggtcgccatccgccggaacgccgtcgaccccatcgacccgagccgcgccgccgccttccttcgctccggtcgccgtttccgtcgtcgccgtcgacccggggtgagccgtggaccgccgcttcgtttccccctttccctcccctctctcggccgccgctccgccgtgcctatggccgccgccggcgaccataggggcgcgggcgcgccacctcccgccgctgcgccggcgtggtcgccttcgggtgcaccgagcggctgccgcgtggggcctggctgccagccgcccgcgcccttaggtgcggctgacgcgtgggacacacggcgccggccggtgcgcgcccgggtgcgcccggttcaccgtggaccgtgaggctgacgcgtgggccccactcccgtggacccggtccgcgcgcccctcccctcggttgacgcaataaatccatttttgaattaaaatttaaatgaagaaattcgcaaatattcatttaaagagcatataaacttcaaatggccataacttgcccatttgaactcggaattggaccgttcaagtctctaatttttccttaagaagtcaagaacccatttttgtgctttgtttctgctgattatatggagtttattagagtaaaagccttttcttttccgttggtcgtgtagacgctgcagcttcggaagatccgctcttcgtggaagttgaagccgacgtttgggaaagcgagcaaggcaagtcacatcatcctataacatattgaatcccagtttataaaattattttgatttaaattattgcattatcgctttatttaaattcccgcgttatcactgttttatctagccatgcctatttacctttgttatgaccttattattgtgattgttattattaccttgttcaccctagaataaacaaaaccccaactagtggacactctactcatggtaccactagtatgattttaggtagatgcttcgctgtttaattaggtaacattaggtggttttacaactctagactttgggaatattctcatcacctggacacattggaattgttggattattgtggaattggattcacacctctccctctattcaaaatccccaaaatggttttaggctgggctcggggtgcatggttttgatagtagcaccacggccatataaggaccggtcttcgggcctctgttgcaaagcactaccgtacttccacatgtctagtgggtaaggcttagtttgtggctcagtctggttataaacaaaagtacacggagcaatgtacccaagttagtgttttcattcttaaaacctgcttaacaactaaaacgtggaacggttggccatggttggcttgggacgagctgggacccagggtcgggttgccagttcggtctgaatcatcgtaggccttgggttaaggcaggttcgtgtgggttcacggccttgataaataataatgtatagttctagaatcgtgtttacaaaatagctttgagcaactaaatgtctttaaatgctgtttactgcaaaccctaatcctttatattatgattcccttgtactcccttgcatttattctgcacttgtgggtgtgtcttgttgagtacggtggttgtactcagtcttgctcaatttttcccaaacccagaagaggagcccctagaagttgaaggctttggtgtctagctcgtgcctgccgtcaagcgcctgtggtcgtcgccctagtcttccgctgtttcccgtttgtctttgtgtgtgctgggccttcgtcgcccatgtaataaattaactatttacgcttccgcttgataaactctgaaatgtatcaactcttggtgtaccttgcctcctgggacaaggaataatacacgcacgtaaggaacgcccgttgggttaattccggtcgtgacaagttggtatcagagcccccttgaccctaggacgagccgtagatcccaagccttagcaatattttcaaaataaaaatcctgtcttatttgtgaaaattctctagtctctctctgtcctgctgcttcatttattgtcaaaatctgacctttaaaatgttgcttttctttttgtttttgtttgtagatggccggtagcatcaaccgtcgtggtctggacctgactggcttcgttttggagctgcggggcatgtgcgttgtcctggggtatccgcatggagtggactaccagggcaggcagctcccggagcaggagggtgacgatgcagagctccacgctgcttgggaggttactgcagtgatcctcactggctcacccgagaggacttcgttgacagtcaccgcgggtggagattctttcttcgctgcttgccagaacgccgcactcctcgccatcggcactcttcaccagcgctacccggacgagttgcagcactcgccctaccgctaccaccctcgtcgcggaggagcccgcgactacgccaccttccgggatgctagctcggaggatgacactaccatcatgcatctggcgcgcatggtggaggcgtacgacgcggctcgtatcgacttccatcagatggtgcgccgtgggatggtcgagaacaacatgaagatcctggagctgcgtcaggagaatctgcagctgaagaaggatctagacgcagtggaggcgcagctgcatcagctcaagatcgcccagggagaggtctgtcgccccaagcgtcgccgcgtctgccgcagccagaagatcaccacccgcaagagcacctccaggcccgagcttgttcgccagtccttggcatggacctgcttcgtggagacccctcgtgccgagcccgcgcccgtggttcctcaggagggggaagcctccggcgttggtagcacggaggatgcgctgctgctcaccttccgtcctggcccgtcgcagcggtagacgagcagttagtaggcttgcgcgtgtgttctttctcgtttgtcttcttgttggagtcgtgtggggcatggttatgccggtgtgtggtataactgtgtcggagcctgtctttattttatttgcctaagcaacttgaactttaatgaaccaatttaatagcagtaataaattcaagaattatggtaatcgtgggtggttagctttaattgtcagctctctctgtttgctggttctgtgtggggttttcagatggtgacgaccaggagaaatgctaatacaggtgatggcaaccaacccgaaggcagcaaccacaacaaccatggcagcccacctctacctcctcctccgcctccaccaccaccaccagacaccaacgccattctcacccaaatcctcgcccagcaggccaacatgatggctgctttcctccaccacatccaacatccgccacaacataatgctccaccaccacccccacaacactccaaactcgccgagttcctccgcatccgtccaccaaccttctctagctccaataaccccgtggatgcgttggattggttgcatgccgtggggaaaaagttagacaccgtgcagtgcagcgatgaggagaaagtcatcttcgccgcccaccaactgcaggggcccgcatctctatggtgggaccatttccaggctacgctgccagaggggcagcctattacttgggcccgcttcaccgccgctttccggaggacccatgtgcccgccggagtcatggcccttaagaaaagggaattccgagagttgaagcaaggcaaccgcttcgtgatggagtatttgcatgagtttaacaacctggcccggtacgccccggaggatgtacgggaagatgaggaaaagcaggagaagttcttggcaggaatggatcctgagctgtccgtccgtctagtctccggggactatccggatttccaacgtctggtggacaagagcatccgcttggaagccaagcacaaggaactggagtcgcacaagcgtcgcttggcgagtttccgcaaccaacagggggctaaccaaagggtccgctacaccaatccctatccagggggatcctcttcacagcagcagcaacctcgctccgcgccccgacctcaattcgtggtgcgcgtcccacagccgcagcaacagcagagtcagcaagggacttgtgcgccccgtcctccaacgccagccgcgcagcttggtcaaggccgcagggacgttcaaggtccgcagcgtctgtgcttcaactgcttcgagcctgggcactttgcggataaatacccaaagccgaggcgccagcaaggccaagcgcctccccgctccaacaacggtggtaaggatgtcattcggggtcgtgtgaaccacgtgacggccgaggacgtgctgacaactccagacgtcatcgttggtacgttcctcattcattccatccctgctaccattttgttcgactctggagcttctaactcgtttatatctgtgccattcgtggggagaaatcagttgggggtagaaaggcttaggaaccctctgctcatcaccacccctggaggggttatgacagcaaagtattatagccctgccgtccctatagaaattcaggggattccttttcctcggatctgattcttctagacaccaagaacttggatgtgatccttgggatgaattggttggctcaattccaaggagtagtggattgtgcaagacgcactgtcactctgtaccgagggccggaacaaccggttgttttctttgcacccccaacctctgtcagtagttctgtcacgtcctgataaattcatcccgaaataaaaatcattcgctaaaaggaataatagaattaattaaaattcgaaaagaaattggcaaacactaaaaatacgtacaagaaaaattcaaatgtggcccggagaatttttgttaaattctccttggtctaaaaggagccctcaaattttacttgaattttcagagcaccggaaataattattaagcaacaaaaacaattaacaaagtttattaaaaagaaaacctaaaaaataatcctcctcttcctttgggccaagtttggcccaaagtctcccctctctctctttcggcccgccgccgaagtctccctttcctccctctctttctctccctctccttctctccctccttctcttgggccccccttcccctcggcccagctccctcctccctctctctcccgggctgcctttcccccccctcccctcccggcctgcccggcccaagccgcctctccccccccctctcttcctgggccggccgcccgacccaagccgcccctgcccgagccgccccctccttccctcatgcacgcgcgccgcacgtgcgctgacgccgcgcgcctcccgcgtgggacccgcctgtcaggcgcgtccccgacctccagccgccggccttcttcctctccctcccgtgaaccctagcgccattcctcctctaaatccgctctattcaagccggctctttccaaattgattgggggcaattaatccccattgattcctcttcgatttcccccgttttcccccttgaatgccgcccccaatcgccgggaacgcccgcgtcttcctcggccgccctccattgccgccggccgtggttctcgccgccgttccgacctcccccgtggccggttccctctcctctcctataaaatagaaccccctctttgcgttctaccgttttggtctcttcccaagctctcccgtggtctctagccacctccccaccgtcgccctctctctcccacgttgccggccgcctccagccgcctgtgccgcctcgaccgtgcgccggccggccgcgccgtcgcctcctccagcgtcgccgccacctcctccaccccggcctgccctccgtttcgcgcggtgaccatcggaggcgcactcccgccgtcgcccttctcattcctccttgccggccacctccagccgcacctcccgcctcgcccgtgcaccctccggccgcgccgccacctctcccggcgtcgcagccgcctcctctttcccggcttcgcctccgtttcgcggggaaatcaccggagacgcgtcctcgccggcgtccagtggcgtcgccaccacttctccgcctccggccgcctctgccgcgtccccggtgcgccggccgacgtcgccgtctcctccgttgacgtcgcagtgccgtcctctctcccggccaggccacggcgtcgcccgaatttcgccggaacgccgtcgtctccgcgccggcctctccttcctcctcgtcggctcgccaccccgctgcaccaccaccttcaccaacatcgcagcggcgtgttccacgccgtcccctcctccgctcagccgctgctgcctgccatcatcgtttcatcgtcgtctccgatcgttctcgtcgtcgacgtcccatcggtcgcccggctcgtcgtctcgcggcgccgcctccgtcgtcggcatcgtagcggcgtgttcctcgccgtcctcgtccccgtgcagccgctgccggctgtcctcgtcgcctcctcgccggtcccggtcgtcgtcgtcgtcgtcgtcctctcgtcgttcccggtcatcgtggcgttcgtccctccgtcgagccgttctcgtccgtcgtccgcgtccgtcaagcaagccgcggcagccccgtcgtcgtcttcgtcctcggctccgcgtcgtcaagcctcgtgccggccgcgtctcgccttcgcccaaggatcgccaccgaagccgtcccctcgccgttcgtctccgttgtgcccgtctgtctccgccgcgcccgttcgtcgttgtcgttcccacgcctcgtcgcgtggtggtaaggttccctctccctcgctgctctgtcctcgtcctttcggtgtcgcccgtgcccgttgtgcggttgtcggccccggtacccgtgtatcggcgtcggcagtcgttcgcttgtgcgcgtggtgaccgtgttagtgtgtccgctcggtagccgcgtggtttccacgtgtgcagtccgtgtggtgtctagtggagtccgtttgtcggccactcgcctcggttgacacacgggatccgcttccgtcgacccgtggaccgactctgtgtactcggtctaccgcgatcctttaggttgacatgtggggtccgcatgttaacggcgcagccttcctgtcttttccaggctagcgcttacacctgttttatagttgcaaagcctaattataataatccgcaaatctccatataacagcattaaacttcggatgatcatatcttggtcatacgaactctgaatcgacccgttcaagtctcctaatgtttgttataacctaaagaaccctgtgctttctttttatgtgttgttattgcttctttataggcttgtagctttgcttgtgtgcttcgcgtagcttctgtcgttccggaggttcccgaagcgtggttcgtggtcgtcgccgtaggttcggaaggccgttctctctgagcaaggcaagtcacatcatccttgaacatattgaatcccagtttgtaaaattatgttgatttaaattattgcattatcgctttatttaaattcccgcgttatcactgttttatctagccatacctatttacctttgttatgaccttattattattgttattgttattattaccttgttcaccctaggttaaacaaaaccccaactagtgggtactctatttatggttccactagtatgaatttaggtagatgtttcgctgtttaataggacaacattaggtggttttataactttagactttgggaattctcatatcatttggacactatggaatggttggcttatgttggaattggatacacacctcccccgctattcaaaaccccccaaaacggttttaggctgggctcgaggtgcgtggttgggttttgttagtcgtacctcgggcactataaggattaagctcgggcctctgttgcaaagcactaccgtacttccacatgtctagtgggtaaggcttagtttgtggctcagtctggttataaacaaaagtacacggatggaggtggatgaagtcgggggtcgatggacattctccagggcaaatgaaggctacacgagctgcggcccggtagtcgagatgtcgtggcagagggttggtgccctgctgctagggggctcaatcctgcctacctgtcccggaggttccggccgtagggggattgggtcggtactcttgtttatggctaggatgggttgggaactatgtcacgtcttccgtccgtataccgtggtggtatgtggcacgtggtcgcacgtgaggaagatgtgtcttgtgggtaaagatgtacacctctgatcagagtataatctattcgaatagccgcgccctcggttatgggcaagccgagcaatgtacccaagtcagtgttctaattcttaaaatttgctcaacaactaaaatgtggaatggttggcctgggttggcttgggacgagctgggacccagggtcgggttgccagttcggtctgaatcatcgtaggccttgggttaaggcaggttcgtgagggttcacggccttgtttaataatactgtgtagctataggatcgtctttataaaatggctttggggcaactaagtgacttttaaaggctgtttactgcaaaacttaacctctatattattacccccttgtactcctttgcattaattgtgcatctccggtgtggcttgctgagtactgtggttgtactcattcttgctctatctttctccccccttcagtaagagaagctttggagaagaagtcttaggtggagtcctggcttataccccagttgagcgcctgtgaagatggagccgtaggcccgctagtccgctgctgtttatttttgattgtcaggcgtgaagcgcctttgtaataatgtaaatattatcgatataataaagatgtgtcttttatatcatgtttgtgtggtgtaccccggcttttcctgggacggggattaatacactagcgttcgggaaaaggcaattttcccggtcgcgacaagttcagaacttcatcagataggacagtcaaaaatccccatcgtcagagagttcggagacgtgtttccggaagaactacccggtatgccgcccaagcgagagattgagttccggatagatcttgctccaggaaccactcctctgtacaagcgaccctaccgtatggcagcaaatgaactggccgaagttaagaaatagttggaagagttgaaagaaaaggggtacatacgtccgagtacttctccctggggtgctcctgtgatttttgtggagaagaaagacaagacgaagaggatgtgcgttgactacagagctttcaatgaagtcaccatcaaaaacaagtaccctcttccccggatcgatgatctgttcgatcagcttaaaggtgccacggtattctccaagattgatcttcgttccggatatcaccagttgcgcatccgtgaagcaaatatcctgaagaccgcattcaccacgcgatacggactgtatgaattcacggtgatctcattcggtttaaccaatgctcctgccttcttcatgaacttaatgaacaaagtgttcatggaatacttggataagtttgttgtggttttcattgatgacattttggtatactcacaatcagaggaagaccatcagcaccatctccgtctggtgttgggaaagttgcgggaacatcaattgtatgccaaacttagcaagtgtgagttctggttgtccgaagtcaaattcttagggcacgtgatatctgctaaatgagttgctgtggaccccgaaacagtgaccgccgtcaccgattggaagcaacccaagacagtcactcaaattcgcagtttcttaggtttggcaggatactactggaggttcatcgagaacttctccaaaatcgctcgacccatgacacagttgttgaagaaagaagagaaatttgtgtggagcccgcaatgcgagaaggcgttccaaactctcaaggaaaagctggtttcctcgccggttttaatcttaccggatactcgcaaggacttcatggtgtattgtgacgcttcgcgccaaggattggggtgcgtgctcatgcaggaaggtcatgtggtggcctatgcctcacgccagctacggcctcatgaaggcaactaccctacccatgatttggagttagccgcgatggttcatgctctaaaaatctggcggcactatctcattgggaatcgctgtgaaatatatactgatcataagagtttgaaatacatcttcactcagtcggatctgaatcttcggcagagaagatggttagaactcatcaaggattatgatgtgggaattcactatcatcctggtaaggccaacgtggtcgccgatgctctaagtcgaaaaagccattgcaacactcttgaagtccgtggcattccacccaaacttaatcaacagataaaagccctgaacctaagcatagttagtcgtggattcttggctacgctggaagccaagcctaccttgctcgatcaaatccgcgaggctcagaagaacgatccggacatgcgtggactcctcaagaatatgaaacagggtaaagccgctggtttcacagaggatgaacacggaaccctatggaacggaaatcgggtatgcgttccagatgtcagggaacttaaacagctgatacttcaggaagctcacgagagtccttattccatccacccgggcagtacgaagatgtacttagacttgaaagagaaatactggtgggttagtatgaagcgggaaattgcagagttcgtggccctttgtgacgtgtgccagcgtgtcaaggcagagcaccaacgaccggccggacttctccaacctctccaagtaccagaatggaaatgggatgaaattgggatggatttcatcaccggacttccaaaaacccaaggtggatatgattctatatgggtagttgtggaccgattaaccaaggtagctcggtttattcctgtgaagaccacctatggagggaacaaactagccgagctctacttcgctaggatcgtgagtctccatggcgttcctaataaaattgtatctgataggggaagccaattcacctctcacttttggaagaagctccaagaagagctaggtacccgattaaatttcagcaccgcgtatcacccgcagacagatggacagaccgagcgtctaaatcagatcctagaagatatgctccgtgcatgtgtcctagatttcgggaagacctgggataagagtctcccctatgccgagttctcctacaataacagctaccaagccagcatacaaatggcaccttatgaagcgttgtatgggcgcaaatgccggacaccgctcttgtgggaccaagttggggaaagccaagtgttcgggactgatatactgagagaagctgaagcgaaggtcagaaccattcgggataatctaaaggtggcacagtcccggcagaaaagttatgcagataaccgtcgccgtaacctggaattcgcagtggacgattttgtgtaccttcgggtcaagccattgcgaggtgtacacaggtttcagacgaaagggaagctcgcacctcggttcgtgggtcctttccgtatcattgctcggcgcggagaagtcgcttaccagttggagctgcccgcctccttgggcaacgtgcatgatgtgttccatgtgtcgcaactcaagaaatgccttcgagtgccgtccgagcaggccgactcagagcagattgaagttcgcgaagacttgacctacgtggagaggccagtgaaaatcctggacactatggagcgaggagcaggaaccgggtaatccgtttttgcaaggtccaatggagcaaccacgccgaggaagaagctacttgggagcgtgaagacgagctgaaggcagcccatcctgatctcttcgccagttcctccgaatctcggggtcgagattccgtttaaggggggtatgtttgtcgcgtcccaaaacgactctaaaatatatcttttaaattatgcctagaataattaaaatctgtgtgcaagccttcaacaattaaaatgtgcaaagttaaaagtcaaataaggcttggaggatttttgtatatttcctaaaagcctaaaatgtgtaaataaattttagtggaattttcagagcaaaaataataattattaagaaataaacaaagttaaaatggttttataaaaagaaaaactctaaaaagtcttttccccccctccccctcttgggccggctcggcccatctctctccctctctctcctcttccccgcggcccattcggcctcctccccgcgcgcgcgccgctgacgggcgggcccgcccacctccctcgctgacgggtggggcccacccgtcatccccttcctcccgccgctcccgcc

SEQ ID NO: 7015 - DNA, 76770 bp, Oryza sativa
  unsure (1)..(76770): unsure at all n locations
ggcccaagtctctttttccctctcctgggcctgctcgcgccgggccgtttcagcccagtccaccgcgccctcctccctctttttctctcggtgccgttgacaggtgggacccagctgtcaggtcgtcttcttcctccagcctctaaccgccgcttgtagcaccgcaagccaccgccgatctccttccaaaatccggccaccactttcctcctctggccgaattgattgaggggaaataatctcctcgatctcctcttccttttctcttttggaatcctgggctaatttcgtttggaaaccggcagattcgagttcaattcggatcgatctctctcctctaaccctagactttccatctcgccgccggtcgccgtgggcctccctcgccgctcctagcccttataaaaggatccccgggacctcctctatccgccgccaccttcgccctagcctgtcgtcttctctagcgccgcctccgcgtggttctttccatagtcgccgccggcgagtgtctagtcggtcgctgctgtcacttcggtcgtcgccgtcggtcgccgttttcttcatcagcatcgtgaggtcgtcatcgtcctcgtcccgtcctccgtttccgccgtagcccgtcggagcgccgccgactccgtcaacccgaagctctccatcgccgccgtcagtccagccgcgtcgcgtcgccgttgcagccaccgccttcagttgtcgtcgccaccgtcgggatcgcgaggaggagcagcgcctcgtccaccccttcgttgccgccgtttcccgccggagcatcgccgtcaccgccgacccgaagaccgccgctgcttcaacctcgccgccatcgccgttcgttgccgtccgccgtcgttcgtgacctcggtgagttcgccgcgtcgcccgctacccgtaggtgtcctccgtttgcaccgccgcaccgtcgttcgccagcgagcacgtggtcccgagccgccgccggtgatgacgtcatcgctgaggtcagcgccacgtcacccgtagacccgcggtagatcaagttgatctcggccgtccgttttggtttagatcgatctcggccgatcgttccgtagatcgtcaccgtgcacccggtccaccatgagcctgagcctgctgacgctataaatcttttttccttttcaaaaataattctttattgcgtcataattcaattaaaatccatataaatgctttaatccggtttaatctttaaaaattcataactaatacattgtaactcggtttaatgtggttcaagttgcaaaagttgtataaaataaagatctacattttaaaattatccataaattgaattaaatttatttaatcttttttaaataggctttaattagattaaatcttgtaaaattcataattaattcatatgaagtcagaatgaggccgttcaagtctcataattcatctaaaattatgatttacatgattgtttactttatatctattgtttatttggtttttattagtctttttcctcgttttgcgtgttagcttgtcgtttccatcgttccgaaggttcgcgagtgcgccagaagtgttcaagaagattaattgaagaacgaatattgaaaggcaagtcacacagatcccaaacacaatcctttgagcatgttgatcctatatttaaattctttatttatttcaactatgcatttattttcgaatgtcaccgggtggtgtgaattattcctttgtatggccaatttgtattgattactctattccttgataccttgggttattataatttgactagttgagctttatatattggttcagctagatgttagacataattgcttagccatgcttagaaacattagcacacaattgggataactaatgtttcactattacttaatgatggatatttaatgatagctcacgatggtcaatcgtgattggttaattaattagtgtgccaactaaaacttgataatggtgggttgtgagcacatggttttgatggtcgtgctcatgacaattaaggactggttcacgagtttcgattgtgaaacattaaccgtgccgaccacaagccagcatgggcaacggctttaccttttgtatagcatggttcattgcggggcaccagactgagaagtggcggagataagccgacgggggtcgctggggagtccatgccttgtttataagggggtgattatgatccaggaacggtgcactgctttaagttgtgtcacgcccggaaattcattagtattttccgaactaatttgtgcataaaatcctcgtccaggaatcagccgaggtacacaaactgacaatttaatatacagattcatcaaaataactaaaacgataaatacttacataagaggcacttagtcctcaccatgaagaaaactgcagcggaaaataaaatctagcgaagcctcagctccactcctacaggcagctcaactgggatctaagccaaaggtcttctccttctggatcctttttcttcaactgaggtttgatgattattgcaagaatgagcatatgacatactcaacaagctacataacaaatatccaagtgcataaggataccaaaggatggcataatataggctaatttgcaaaagcatcatttagcaaagatttaagaatagtaaaacagtagagtaattaatcatccatattaatcaacactgaacagcaccccaatgctgcacaggcccaaccaaacctgaacaaccaaccccggtcgtacagatcaaacctccaaaacaggaattaaccattccaaaccaggagtcaaattaattatcacattactaccattaatgagtagtgtgggactaatcacgaaaacattgctcaaccctcccataaccgcgggcacggctattcgaatagtattactctggccagagatgtaccactgtacccacaagacacgattccacacatgtcgccatgccccgaagtaccaccacggcactgcaaagggggaaatcgtgacaatacccttcgcacaacacaactcaccacagtgcaccattcctggatcataatcaccccctcaaaaactagaggcatggactccccagcgacccccacggacttctcgccgcttctcagtctggtgccccgtaatgaatcatgctatacaaaaggtaaagctgttgcccacgctggcttgtggttggcactgttaatgtctcacaacagtagctcgcaaaccggtccttaattgtcacgagcacgaccttcaaaaccatgtgctcacaacccaccattgaaaagttttaattatcaattaattataaaaacacgattaaccatcgtgagctaccattaattataaccataaataataatgtagtataattcatcccatttgtgagctaatgttcctaagcatgactaagcaactataaataacatctagctgaaccaatccaatatataaggtccatgctagtcaaattataacccatagaaaaataaagtcatgtttggccataattaaatgggaaaggctcaccacccgatgacattctaaaataatgcataagttgaaataaaacaatagctttaaacgggttcaacatgcttaaagggttgctcgggatctgtgtgacttgccttgcaaacaagcgtcttcaattcgtcttgaggaacatctccaacgaacgaacgatcctccgaaacaacggaacgcaaaacgagaaaaacactaataaaaaccaaataaatagatagagcttgaatttagatgaattatgagacttgaacgacctcattccgagttcgtatgaattagatatgtattttacaagatttaattccaattaaacctatttaagaaaagactattccaaattgattaaacaatttacaaatgatttatagctgagacaaaagattaaaacattctccggtaaagaatagatcatatttggtaaatgacatatattaaaaaggaataatatgtcattaaaaagagatgataaatttatattaattttggatggccaagatggctctgatgtcagcgatgacatggctgtcatgcaggatcgacgccggcgagcatgggaacggcggttaccagagaaccacgatacaatgacgcagacggagggcaccgggagagagaggagatcaaggcgacccttaccaccatttacgcgacgacagacggcgagggagatggccggcgacgagctccaaagggtggcaaccttgggttgacaatggcgacggctttccggcgacgggcggcagcaacggaggggtggacgagcttctcctcacagctacgaatccaatggaagcaacggcgaccgaaggcgacgatagacgacgacgaacagcgtggccggagatagattagatcggcttcacggtgacgacgacgctccgatgacttgcggcttcgtggaggtggctgccgggcttgctgttatcgctgcgatgccaacggaggagacggcggggttcggcgaccacggagtcgacggcaaagcttcgccggagatcaaaacatggcgatggttcggccttcacggtgacggcgaattccggcggggtttggcgcaaaggaacgggtggccggggtagctctcacccttgcgaagccgagggaagcgacggcgcaggtcggggacgaccgaagaggcggcgcgacgtggctggagtggcagccggcaaaggagagagaagccgagcgtggcggcggcgctagggctagggaaaaattcgggaaaaaggaggaaacggaagaggagacccggggcatgctatttatagccaaaggaggaggagatcggctgggatacgaggggaaacggcggcggattagttagggttcgccggaaaaacggagctcgaaaccgcgtcgaattcacgcaatataccacgggattcaagggggtttcttggggataagatagaggagatcgaggggaatccgttcccacaactaatttgagaagaggagcaacggagaggatgaatttggtggggaggtggcgctgcacacgggcacggcagggaggagatcgacctgctggaggttaggggcgacactgtagcagaaggatgaaaacagacttcttaattaattcatacgaagtcagaatgaggccgttcaagtctcataattcatctaaaattatgatctatatgattgtttactttatatctattgtttattgggtttttattagtctttttcctcgttttgcgtgttagcttgtcgtttccatcgtttcgaaggttcgcgagtgcgccagaagtgttcaagaagattaattgaagaacaaatattgaaaagtaagtcacacagatcccaaacacaatcctttgagcatgttgatcctatatttaaattctttatttatttcaactatgcatttattttcgaatgtcaccgggtggtgtgaattattcctttgtatggccaatttgcattgattactctattccttgatacctcaggttattataatttgactagttgagctttatatattggttcagctagatgttagacataattgcttagccatgcttagaaatattagcacacaattgagataactaatgtttcactattacttaatgatggatatttaatgatagctcacgatggtcaatcgtgattggttaattaattaatgtgccaactaaaacttgataatggtggattgtgagcacatggttttgatggtcgtgctcatgacaattaaggactggttcacgagtttctattgtgaaacattaaccgtgccaaccacaagccagctgtcacgcccggaaattcactagtaatttccgaacttatttgtgcataaaatcctcgtccaggaatcagccgaggtacacaaactgacaatttaatatacaaatccatcgtaataataacgttacacacttacaaaagaaaagatcaagcgatggcttcagctccactgtcacgaccggaaataacccaacgggcgttccttacgtgcgtgcattaatccttgtcccaggaggcaaggtacaccaaaagttgatacaattcagagtataacaagcggaagcgtaaatagttaatttaatacatgggcagcgaaggcccagcacacacagagacaaacgagaaacagcggaagactagggcgacgaccacaggcacttgacggcaggcacgagctagacaccaaagccttcatcctccaggaactcctcttctgggtttgggaaaaattgagcaagactgagtacaaccaccgtactcaacaagacacacccacaagtgcagaataaatgcaagggagtacaaaggaattataatataaagggttagggttgcagtaaacagcgtttaaagatatttagttgctcagggctattttgcaaacacgaatctagtactatacaatgttaattatcaaggccgtgaacccacacgaacctgccttaacccaaggcctacgatgattcagaccgaactggcaacccgaccctgggtcccagctcgtcccaagccaacccaggccaaccattccatattttagttgttaagcaggttttaagaattaaaacactaacttgggtacattgctcggcttgcccataaccgagggcgcggctattcgaatagattatactctgatcagaggtgtacatctttacccacaagacacatcttcctcacgtgtaaccacgtgccacataccaccacggtatacagacggaagacgtgacatagtttccaacccatcctggccatagacaagagtaccgacccaatcccacctacggccggaacccccgggacaggcaggcaggactgagcccctagcagcaggacaccggccctgtgccatgacatctcgactaccgaaccgcagcccgtgtagccttcatttgccctggagaatgtccatcgacccccgacttcatccacctccatccgtgtacttttgtttataaccagactgagccacaaactaagccttacccactagacatgtggaagtacggtagtgctttgcaacagaggcccgaagaccggtccttatatggccgaggtgctactatcaaaaccatgcaccccgagcccagccgaaaccatttttggggattttgaatagaaggagcggtgtgaagccaattccacaatagaccaacaattccaaagtgtccaggtgatatgaatatcccaaagtctagagttgtaaaaccgcctaatgttacctaattaaatagcgaagcatctacctaaaatcatactagtggtaccatgagtagagtgtccactagttggggttttgtttattctagggtgaacaaggtaataataacaataacaataataaggtcataacaaaggtaaataggcatggctaaataaaacagtgataatgcgggaatttaaataaagcgataatgcaataatttaaatcataattttacaaactgggattcaatatgttcaaagatgatgtgacttgccttgctcgctttcccaaacgccggcttcaacttccacgaagagcggatcttccggagctgcagcgtctacacgaccaacgaaaaggaaaaggcttttactctactaaactccatataacaagcagaaacaaagcacaaaaatgggttcttgacttcttaaggaaaaattagagacttgaacggtccaattccgagttcaaatggccaagatatggccatttgaagtttatatgctctttaaatggatatttacgaatttcttcatttaaattttaatttaaaatcggatttattgcgtcagccgaggggaggggcgcgcggaccgggtccacgggagtggggcccacgcggcagcctcacggtccacggtggaccgggtgcacacggcttacgccggctggcgccgtgggtcccacgcgtcagccgcacccgaggacgcgggcggctgacggccgggccccacatggcagccgcggggcgcgcccgaaggcggcctcgccggcacagccgacgggaggcggcgcacccgcgccccgatggtcgccggcggcgacctccggcgcgacggagcggcgcccgagagaggggagtgaagggggaaacgaaatgggcggtccacggctcaccccgggtcgacgacgacgacggaaacggcgaccggagtggaggaaggcggcggcgcggctcgggtagacgaggacggcggcgttccggcgatcggcgaccgaaacggaggggtggacgaggtcggcgaggacacggcgaagccgaaggaggcgatgccgaagcgggaggaggtccggggcgacgacggcagcggaccggagctcggcggcgacggcggagatagagagcgacggcgcgagctcgattccgacggggagagagagcggcgagcggcggaaacggaggagggaagcacggggagcgtttatatagcgttgggagggggagagggcggccggaggggaaggaaaccggcgcggcgatctcgggctccatcaatgacgccggcgaggtttgcgggagggtttccaaacgaatccgagggagagagagagggaaaagtgggggggaaagggagagggaatcacggggagtgatttccccctctttattgcgcgcggggacggcgggatgcggcggaatccgcggcggcggcggcgctagggcacgggcgaggcggcgggtgcggcgcgaggtaggggatgacgggtgggccccacccgtcagcgagggtggcgggcgggcccgcccgtcagcggcgctcgcgcgggggaaggccgatgggccgcgggggagaggagagagagggagggagctgggccgagccggcccaagaggggaagggggggaaaaaggacttttagggtttttctttttataaaaccattttaactttgtttatttcttaacaattattatttgtgctctgaaaattccactaaaatttatttacgcattttaggcttttaggaaatatacaaaaatcctccaagccttatttgacttttatctttgcaccttttaattgttggaggctttcacacggattttacttattctatgcacaatttcgaggatgtattttagagtcgatttgggacgcgacatccactcccacaggcagctcaactggggtataagccaaacgtcttctccttctggatcctttttcttcaactgaggttgattgattattgcaagaatgagcatatgacatactcaacaagccacacagcaaatatgcaagtgcacaaggataccaaaggatgtcataatataggctcatttgcaaaagcagcatttagcaaaacatttaagagaagtaaaacagtggagtaattaatcagaaattttaatcaacaccgaacaacacacccatgcagcacaggcccaaccatcctgaacaaccatacccggctgtacagatctaactccaaaccaggagctaaacaaattattaccagttatagcatccataattattgtgagaggtgtgagactaatcacgaaaaacattgctcaacccgcccataaccgcgggcacggctattcgaatagttttactctggccagagttgtaccactgtacccacaagacacagcctcaacatcatgtctaccatgcgtcgcgatactggaaagtacccgaatagaggctgtgacaataccctctgcacaacacaactcaccacagtgcaccattcctggatcataatcacccccttataaaacaaggcatggacttcccagcgatccccgtgggcttatctccgccacttctcagtctggtgctccgcaatgaatcatgttatacaaaaggtaaagccgttgcccacgctggcttatggttggcacggttaatgtttcacaacagtagctcgcgaaccggtccttaattatcatgagcacgactctcaaaaccatgtgctcacaacccaccattatcaagttttagttggcaagtaattaattaaccaatcacgattaaccatcgtgaactatcattaagccatcattaaataataatgagtcataagttatcccaatagtgtgctaatgtttctaagcatggctaagcaatcatatctaataataattttgaatttaaatataggatcaacatgctcaaaggaattgtgtttaggatctgtgtgacttgccttgcaataatcggtcttcaattaatcttcttgaatacttccggcgcactcgcgaaccttcgcaacgacggaaacgacaagctaacacgcaaaacgaagaaaaagactaataaaaaccaaataaacaatacatataaagtaaacaaacatgtagatcataattttagatgaattatgagacttgaacggcctcattctgacttcaaatgaatttataacgaattttacaagattaaatctaattaaagcccatttaaaaagaattaaataaatttaattctatttatggataattttaatatgtagatctttattttacacaacttttgcaacttgaaccacattaaactgagttacaatgaattagttatgaatttttaaagattaaatcggattaaaacacttatatagattttaattgaattatgacgcaataatgaattatttttgaaaaggaaaagaggattattgcgtcagcgggctcgggttcatggtggaccgggtgcacggctgcggtctacggaaacgaacggccgagatctaccctatccacaacgaacggccgagatctaaacggtctacgaccggtctatggcggacggcaacgatgacgtcagcgatgacgtcatcaccggcgacggctcgagcggcgcatgctcgccggcgaacgacggcgcgacgacgcaaacggaggacaccaacgggtagagggcgacgtggcgaactcaccggcgaccaaaacaacggcggaagagcaacagacggcgccggcgacgaggaagaagcggcgacggtcttcggatcgacggtgacggcagtgctccggcggtcttcggcggcggcgaagcggtggacggggacggcgacgacctcgcgatcccgatggtggcgacggcgaccgacgacggcggctgcaacggcggcccggcgcggctgaaccgacggcaacgacggcgacggctagggctacgcggaggcagcgctagacgcgacggcgggctaaggcaaaggtggcggcggatagaggagagctcgggggtgcttataaaggggctagctagcagcgacggaggcccacggcgaccggcggcgagaaggaaagctagggttcggaggagagaagtcgatccgaatcaaactcgaatccacggatttccaaatgaaattagccgacgattccaaaagagaaaaggaagaggagatcgagaagatcatttcccctctattgatttcaccggatcgggaaaaagacggtcggacttggaaggagacgacggcggtgcggcgctagggttcgagcggcagccggcgcgaggaggaagacaggcctgacaggtggggcccacctgtcagcgggagagagagaggagagcggcggctcggatgcgggccagcttgggccggggaggagagagggagcggttttgggccgactgggccggggagggagagagaaagagagaggttttgggccggctttcggcccaaagccaaaagagacttttaaaaacctttttcaatttaaattattcatgaaatgatattccattgattaaaaatacttccttggctcaaataaatcccagaaaaatctaggaactatataatcaagtaaagtatttaatgaaattttatctggccctattttatattggaatttattaattaaaattagatcttctcttttaggcttttaagatcatttctaataattccttttaaacaacaatttataatttaaggatttttaaacaagaaaagctcttaacataattataattagatcattaatgatcaaataattactgaactgttctttgtatcatttaggaattgagctccgaaaaatccgagaaaatttcagagagtatacttaatcatggagaatttaataaaaattaaatccatccatgctttatatttaagaaattttatttcccacatttaacttcacttgtaaattaaagaacatttaatataaattctaataataatttattaaataatttataaatcctgaaacaaaaatcaggatgtgacaccagcgtgggcaacggctttaccttttgtatagcatggttcattgcggggcaccagactgagaagtggcggagataagcccacgggggtcgctcgggagtccatgccttgtttataagggggtgattatgatccaggaacggtgcactgctttgagttgtgttgtaattaataatgatgtggtaattgatggtaattaattagctcctggtttggaatggtacattcctggtttggagatagatctgtgcagccgggtatggttgttcaggatggttgggcctgagcagcatgggtgtgctgttcagtgttgattaatattgatgattaattactctactgttttacaattctcaattgtttgctaaatgctgcttttgcaaatgagccctatattatgccatcctttggtatccttgtgcacttgcatatttactgtgtggcttgctgagtatgtcatatgctcaccttgcaataatcaatcaaaccttagttgaagacaagttgcgaaggagaagacgtttggcttataccccagttgagctgcctgtgggagtggagccggagcttcgctagaccataattccgctgctgttttctcttttcttttataagtatgtaacgttgtattattgatgaatctgtatattaaattgtcagtttgtgtacctcggctgattcctggacgaggatttaatgcacaaataagttcggaaattactagtgaatttctgggcgtgacattacacaaatgcagcggaaaattaaaagataactggagctaagccttgacttggactgcaatgggaacaccactccacaggcatcctcgacggctcggatgaagcctaatcctcggaaaagccaccatctgacgcatactcaaactctggggtttgggaaaaatagagcaagactgagtactacccactgtactcagcaagtcataccggaataggggtatgatgcagggaaatatcaaaggagagctagagaggtttatttgcataaagcaagcatttataaatagtagttgaaagcagtaaaacagttgtgataattaatcaatattaaccttccactgtccaacgctacaccacgttgcaacaggcccaaccatacacctagactattcaattccattaggctagactagggtgagactaatcacggtgaatctggttgaccgcccataaccgcgggcacggctattcgaatagttttactctgattagaggtgtacaactgtacccataagacacagccccacgacacgtttccttgtgccgacatgccaccacgacataccggatagaggccgtgacaggacccttcgcataaccccttctaaccaagcacaccacacctcaggtttcaccccaacgcctcgcaaggcagcgcgcagtctcctctcgtgcctacgtgaatccggaagtcgcataggccgttacagggcccatccaaactccatcacgcccacccttgcctggatgcgtcagctagaggaaagtgacactacaagcccagccgttgcccacgctggcatgtggtaactacgaggaattcttctagggtttcccgcgaaccggttcttaagtgccatgggcgcgaccaacaaaaccatgcacccacaacccaccatatgatttattttaattaagaaacgccgggacggtggctctaatccaacatcaacactagaacctgaagtctatacattaatatgatttcccccattgtgtgctagttgaactaagcatggctaagcaatccctagtccagtatctagtcatgttatatcccaagctaacaaaggaacatggtacacaaataacatggctatagcagtaggtaaacatcccatggtattaatgtaaaacaatgcaatatttgaaggaaaacaatagaacctttgcaatataggatcaacatgttcaagtgacaagcatgacttgccttgctctgctgctggaggaacctcagcgactatttcaaagtacaccggagcgtcgggagggccggaatctaagcgacatagaaagcaaacaatacaaacaggctataagactactgaaaaagagaacaaaaccatttttaatggattctatgaatttttgttgatttattgagacttgaatgggcttaaacggagctcggatgaattagatatgaattttataagattcactgtgtttttactataaatagaaaaatccttaattgaattattgcgcaataaataaatcacgggagagagaggggcagcgctgacatgcgggccccacaaggcagcgactcggggagggcggtccggggaggagcggcgcaccacgtggtgcacacgtggcgccgacgcggcgcacacgcggcggccacgtggcagccacgcgggcagccggaccgacggccccgatctaccgccaggtagattggacggcggatgcggctcgcggccggcgcgcacgggcacggctcaagccgatccgcggccatggcgcgaggcagcgaccggccagcggcggagggcggcggcgtcgcggtgacgcgggcggcgatagcggcggctaagcggttaggcagcggcgcggcggctaagcggcgcgggagtgagggagaaaggggaggaggggcctcaccgacgacaatcgactacggcgagcgacggagggcgatggcgacggcgggacgagcaccgggaccacctaaggcatcaaaagggatgagttagagagggagagtgaaaccatggatggctagggcggcgaccgaaggcgccggccatggcgaagctcaccggcgcgcggcgcggacggggttccggcgttgaatcccgacggaggaggggtggacgggacggcccgcacgacggcgcagacgacgacgtcgatggcgcggctcggcacggcggctagcagcggcggcggtagcggagacgagggcgacggcgctagggcgatagagggcacgggagctggcgattgcaaaacgaaaaagtgagaggagggaacgggggtgctttatatagacccacgagggtcgatcatggccggggagaccacgatttcgccgccggagtggggagaggtggggagaagagaaaggcgggattcaaatgttgaatccccgccgtcttgagcgcgggcacgggcggttgagagggggaagggggcgcgggggacgcgggcgcgagcgcgacgtgggcgacgtggcccggaagacgcgggagcagggtgcggcggcggttgcggggcgacggcggcgccggctggaggtgggagacgggcctgacaggtgggccccacctgtcggcgacccggggagagaggaggggtctcgggcgactggctgggccgtagccttcggccggcccagcggggaggggagagaagagagaatgggccggcggcccattcgaaagagaaaaaagggaaaaaggaaaagaaaaagaaggaaatgaattttcctaggattaaataatgcttgtgctcaattttaattggttaaaattatttctagagctctgaaaattccactaaaaatcttgttagcgtatttcgacatgtagaactcaagaaaaattccacatgccaattccgattattatttacattaattcctttagggtttctctcttgcttttacaccgatattttcttgagaccatttataaaatcaatttaggcttaggagaagaacttcagggtgtgacaacatgttactgcaccgtcctgggatgagagctgagaagaggtgggtggtggggggagttagtaggcgggtttgaccggtgggagggccctttgaccgaaatggaaggtgggttttgggccttggtaaggagggggaggtgggtgtgatccttgggagggaggagggtatagaatagctatattatacccggctgtagaatagtttttctatatatacatatacatatatgtatatattatagatatgtatatatatatatatatgtatatgtatatatatatgtatataagtatatatatgtatatatatacatatacatatacatatatatatatatatatgtatatatatgtatatatatatatatatgtatatgtatatgtatatatatatatatacatatgtatatatatatatatacacatatatatatgtatatatatatagcatcagttaatttacctatataggatacccatatgggactgcatggtgcccgggctccgaggtataaaacatacaaattctctcaaatttttaaaaatattcaaattgtgagtatatacctaggtatatgaatttgattcatacatataactaacaacaaaacaactcaaactcaactttatttcacaattcattattacatacctaacgaattatatgtttgaatgttatatacctagaaccaaaatctaacaaaaaaaagttcaaactcagttcaaacttgtttgaacttcttagtaaagaagttaatgttcatatctaaacatttaaaaaaatttcatactcattcaaattgggtatatactcaatttgaatcttggagcccatactccatgtagcaccagttaatttacctaacatcctgaaaatgtgtcaatttctaatcctgcgtcatgccgcttctcatgttcttaataacttcctaaacttaggacaatataattagatagacctcctagtactaactcacacaaaacctttctggtatttaagttcttttgtgattttcatttaaaatacatgtggttgaatcgagatatttcttgatttggtctaaaaccttgttttgactaaaatcgtttattcaaatttagtttgaaaactccttttattttcatgaattatggtccaagaaaccctccaactttacccttgaacctaaaccaaatccttgcaattccaattttattggaattaattgtcgacccatcccttacctatccttcgattccaaacctatccttagtcccctttccaaattcttccttttgatctagccactgatttaattcatgtggcttgatttccttctcggtacaaaaataatattacaaatattgtgaataattgctcttgtgctaagagaatagactttatccctccaccctaaattcaaaacctcatttagcccatatctaaatctctaaatttcataccaaatattttgggctaaaattctatttactctactccctccatattccctccacatactcaaaaatattcaaatctagagccatattatttatggtgttgaatattttgaatttctatttgagtgcattaaataaactccatctttaaaatattgcactcaaaccaactagaggaatatttcttttggaaattatatccaaatataatttccttctgaaactctctcattcaattttccttcaaattcaaactatgcaaatcctattccaaaatttagaaatcagttgtcttagtttgggccgaaaattcctcttttctccctttggtccatctccctccttggcccatgtcggcccagctgagcagaggcagccgccaattcctcctttgtgggcgcgcgctcgacgccgccgcaactgccgtaagcagctttgtcaccgccgcccacaatcttgccaccgccgctgccgccttgccgaccacgccaagccgacgccgtgccgtgcacctcttttgtcacgcccagaaattcacgaaccagaatttctaagttgaatgtgcattaaatccctgtgcaggaccagccagggtacacaaacgacaattgttgacatacagatccacgtcttacaaaaatagaaaagattacaaatgcagcggaaaagataaaagcgagctaaaccgggaagcttgacttcagcagcggggcgactccactccacaggcaatccttgacggcagcgacaaaaccaacttcaacaagacagctccaactagaaagatcttcagctctggtgtgggggaaaagagagcaagactgagtactacccactgtactcagcaagtcatactggaagaggaggtatgatgcaggatataaccgaaggaggctaggggttcttttgcataaagctagcatttaaaagcagtagttgaaagcagtaaaacagctgtagtaattaatcaatattaaccaatcactgtccaacgctacaccacattgcaacaagcccaaccaaccacctgaactacaccagttcattaagctaaactaggggtgagactaatcacggtgaatctggttgatcgcccataaccgggggcacagctattcgaatagttttactctggccagaggtgtacaactgtacccacaagacatgattccacacatgtcgccatgccccaaagtatcaccatgatactgcaaagggggaaatcgtgacaagaccctccacataaccctcccctaaccatccacaccacgctaaggtttcacccccacccctcaaaaggcagtgggcggtcccctcttgcgccgcggtgaatccggcagctggacaaccggacaccccagccgacccaactccatcacgcccaccctcgccatcggtgtctaggaaagggtcgagctatacttcagatcaagcagttacccactcccgcttgtggtaagcacggtaggtctcccagggtttcccgtgaaccggtccttaattgccatgggtgcgaccagcaaaaccatgcacccacagcccaccattcagtgtattttaattaattaacaccattgcggtggcaccaatccaaaactatgctcatagtcaaagtctgtgtaataatgtgatccccatttgtgtactagttgagctaagcatggctaagcatttcctaaaccaacatctaataattttgatacccaagttatcaatggcatatggtaaacaatatgtggctgagtaataggacccatcccacatgacattgtaaaagaatgcaagctttagtagaaatgcgggatatttgtaaattgggtacaatatgatcaattgtaatgcatgacttgccttgctctcgcactgatgagaccacaacaacgtcttcgagaaaccgcggatcgacgaaacggcccaaatctacgcgacaaacaaagcacacaagcaaaacatgctataagactactgaaacaggaaacaaaaacatttttaatggattctttgcatttttatgaatttactgagacttgaatggacttaaacggagctcggatgaattacttatgaattttagaagataaactgtgtttttactaataaagaaaagtccttaatcaatttattgcgcaataatacccagggctgacgtcagcgaaggggggggcagcgccggcaagtgggccccgcttgtcagcggctcaagagaggggagggggcgccggcatgtggaccccacggcagtggctcaagggggaagaggaggtggcgcccggttggctcggctcggcttcaaagccgaccggcgaccagggcgaccggcggcggcgcgcgagcgccggcaacggcaagcgacggcgcgggagacggtggcggacggcgcacaggccggcggcggcggccgaaggcgatggcgagcgcagggagcggcagcgcgtgcgggacagaggaaaggatggaggagaggagctcctcaccgtgagcacggcggccggcgcgaaggatgaagacggcggcgatgaccggcgatgcggaggcacggacgggcggcggcgacaccctaggagaagatggggaggcgttaggagaggagatgatgaccacggcggcttgaattgccggccggagatggaggggagggaaaaactcaccggctcgcgaggggagaggcgctccggtgggattctggcaacgagaggcggtggccaggaaagctcttgcggcggcgaagctaacggcggtggtgggttggcgcggcggcgactctagcagcggcggcgcacggccgaaggcggcggctagcggcgcgagcgcgaaaggaggcacgggagagcgcggcgaatgagggaaatgggagaggaggtttgggggatcgtttttatgggcaagagaggggcggaaacggccggcgatgtggggagtggagggagagagagagaggtggattcgaatgcgaatcccgcccatttttaggcgggcgcgagagcgggaagaggttgtggaggggcgacgacgtgggcgcagggtgcgggaaaggcgcagaaggcggggaaggcgtgaggaccggcggtttcggtggtggttggcgccggggcgtgggcggctagaggtaggggccgactgacaggtgggccccacctgtcggcacccgaaagagaaagggagggagggaggacttcggggaggggaaaggaggagcgggccggcccagaaaggggcgccgagcgcggggagagagatgggccgatggccaatctagagaaaaaggaaggaaaagaaaagaaaaagagaaaaaggattttcctgggatttaaaattgcactttggtgatttttaattggttaaaaatcctgttaatcgattgcgacatgtggaacccaagaaaaatcccacaatgccatttccaattattaattgcatttattaatttgggattcaactctaggttaattagaacaatttctccggacgatttacttaacaaatttttaaagcaaggaaaagggagaaacttcagggcgtgaaatctttcctcgccgcctaactcctctgcggccaccacgtgcatgcgacgctgtcgccgaccaatgggacatctctttgtaggtttgtcctgaaaaccttccgttttgcccatgagacgggtagttatctagaaatcggctccgctagccggtttagttatcaaaacccatctaggtttagctccttgctagatcgaggtggttggcgactctaggatcaccgcaaggcttaaggtgctgcgatcgtgcttgtcaacttgtcaaaaaagttgcgaacacgattttttgcgactccactggggaagagatccgttcatcatcaactcgacttcgactttgccatgacgaagccgccatccaagacggaggtggagccatccaatgtgataccggtcacattggatgacttcgaaggaaaagatcgtcaagctatggaggagtacatcaacgagctcacacgtgaggcgttgatgagagcaagtactaggactcgtcaaggcgtgatcatcaagcccgggccacgtcccaagctcactcctgacgtggtaagcaatgatgaggtatcacaatctatccaacaacaaattgcatctacaatagattcatctatggttgcttttaaagatcggttagatgtaatgtttaagggtaaatttgatgagtttttaaggatgaagttcgattctcttatggacgattacacattaaaggataaagcctctaccactgctaaccaacctcctatagatcaaacgggtagtaaaaccgacggaacggcgttcacggccggtcagaccgggtattaccccggtggtcagaccgggtctcaagctggtccgaccgcacatcttgacactggtcagaccgggccctgggccggtcagaccggcgcaattgttccaatacagggaatagatccgatgactaatgctagttatttatatcactttagaacatttaatcctcctgtatctattgctacaagtagtccccaagttcccccacatgttcctaatgcttataatgatgtttctagggggtatcctcccgatactagacaaggccaatataatcatattgcgccacaaacacaacctattaggccaccaaatccaccaccaaatcaacatgggcctaataatatggaggatataattagtgatattattaagaatagattcgggattgaaactaggaatcgtgctagaacttacaaaaagccatatcctgattattatgataatgtgccgtttcctcgcaattatagagttcccgaatttgccaagtttagtggtgaggatggtaagaccacatgggagcatgtaggtcaatttttggcgcaatgtggtgaggctaatagtgatacttttaaattgcgcttgttttctctatctttatccggtaatgctttcacatggtttacttctttaccggcaaattctattcatacttgggttcaattagaagaacaatttcatgattatttctatactggagaaactgagcttaggttatgtgatttgacatcggttaagcaaaagtataatgaatttgtcattgattatattaagagatttagagatgttagaaaccgatgttatactttgaatatagctgatagagatttggctggtcttgcttttaatggtttagttgctcctcttagagaaagactagatggccaacaatttcttgatgttagtcaactcatgcaaagggctctggctcaagaaagccgggttaaggataatagaaaacttgctagaccatttgacaaaaagcctaatgttaatgtggttgattaccctgaggctagtgatagtgaggaggagggtgatcatgatatttatgttgccgaatggtcatggactaataaaaataagccttttgtttgctctaacctaatgccgactccttgcaaagatcggcaaagtgaggttaaatatagttttgatgtggccaagtttgataagatttttgattatcttttgcaagagaaacaaattaaattacctaaaggccatgtcataccttctcaagaagagttaaaacatcgagcatattgtaagtggcatgattctcattctcattctactaatgattgtaatgtgtttcgacgacaggttcaatcggccatagatgaaggacgattgaagttcattgatggctccaagatgaagcttgatcatgatccttttccggtgaatgcaattaatttcaatgataagaaggtgttgattcggccagagcaagccaaatctactaagggaaagaaagtggtcattggtgaaccaaggtccaagatgatagtgccaaagaagccggaggttggtgtttgaaaggggaataggagtggagcttcaacttctaaagcccctaggaagaccaaggtgacttttgatatgcttttggagaaatatgagaagcaaggtggtgacaaaattcgcaacaaagggaaaagaccaagatcacctcctatggagcgatttggtcattcaccaagacggtcgcattcaccttcatatcattatccacaagacatgtcatggggttcctatccaatgccgctgccgggttatccttatccttacttcatgccatggggagcaacgccgccaatgttcaatcatatgcctccaatgcaattcaaccaagggtggggaggaccacggaggccaattcttgagcgtttgtcttcaccaaacggtagccgattttatggtaagaattgggctaatgaagaaaaaagggaagggaagcgcgtcaaggtggaggagaggacttcagaagtgaatactatcaaagtagggtcttatgatgtgccaatacctatcggagatggagttgaagtgtccccgaacaaaaaatctgaagccggtaccagctcctcgcaataagccggtctgaccaggccttatggccggtctgaccgcagtcatgtgaccggtctgaccgttccatcaggccggtctgaccgccggccctatagcagtctgaccgacgccttaggccggtctgaccgtgctccggatgtcggtctgaccggtgcatctggctggtctgactggtggtctacggccggtctaaccgggctccagcgccggtttgacaggaggattgcaaagggcaatgtggaagcttcatcgtcttcaaataaagttaatagagggcattatttacctcctggaacagagccgaatcctaagtggatgcctaaggatttgacggctactcaaaagagaaggttgcaacgtcttcgggcccaagagctaagagagaaaagggccaaagagcaaagggataaaatgtttaatgagttgcgaccaccaccggtatggatgcctaaatccatagagaaggcataacccattgatgtagaagagaaggaagaacaatcggttgataaaggtgaattgtctccaaaagaagacatggatatcaacatggtatgtatgttgcttatggagttttgtgctatggatgaagccgaggttgctcaattctcattaggtcctaaagacgcggtttttgagaagcccgatgagtcgaatcgttacatgaagcctctctatctcaaaggccatgttgatgggaaaccggtctctaggatgctagtggatggagatgccgccgtgaacttgatgccgtattcattattcaagatgttggggcgtgaggatgatgagttgaaaaagaccaacatgattctcaatggcttcaatggtgaaccaacggaggcgaagggtatcttttcggcggagctcaccgtgggaaacaagacgctaccaaccgctttcttcattgtcaatgtgcaaggtaactacaatgttattttgggtcgttgttggatccatgccaattgttgtgtgccttctaccttgcatcaatgtttaattcaatgggacggtgatgatgttgagattgttcaagcggatacatcggccgaggttgcaatggccgatgctacttttgagtggcgtcatgggaatatccaatgcttatcggggagggatctttctagttatgattttattagtatctccgatggcaaatttgtacttatctctgtaaagccagctagtgtagcatggctaagccatgtaaatttgtataatgagtaaagaggctaatttagagtggttacaaaagagggtgcaagaatatcggtctacaaagaacgatattggtgaaaccgttgaagattttgatgaagtaaaaaagcttgggaaagggtttacatcggccgatcctttggaagaagtagatataggtgatgaaactaaaccaaggccgacttttgtaaacaaaaatatgaaagccgattataaggttaagataatcgagctacttaaagagtatgttgattgctttgcatgggagtatcatgagatgccgggtcttagccgtgagcttgttgagcatcggcttccaattaaaccgggttttaggccttataagcaaccatctcgtcgttttaatcctttgctatatgaccgagtcaaagagaagattgatcggttgttgaaggcggggtttattaggccatgtcgttatgcggagtaggtatctagcatagtcccggtggagaagaaggggagtggtaagattagagtttgcatagattttagagatttaaataaaactactcccaaagatgaatatcctatgcctatagccgacatgatgattaatgatgcctcgggtcataaagtgattagttttctagatggtaatgccagctacaatcaaatttttatggcagaagaggatatgtacaagacggcttttaggtgcccgggatttattggtttatttgagtgggttgtcatgactatttggttgaagaatgccggtgcaacgtatcaaagggcaatgaatttgatctttcatgatttgttaggtattatcctagagatctgtattgatgatattgttgtccaatcggatggtatggaaggacacatagccgatttgaggttagcttttgagaggatgcgccggtatggtttgaagatgaacccacttaaatgtgcttttggtgtgtcggcggggaagttcttaggattcatggtgcatgagagaggagttgagattgatcctaagaagatagagaagagtcgtgatttcaaagcgccgacatgcaagaaggaggttcaaaagttgctaggtaaagtgaattatttgagaaggtttatttctaacctagcgggtaaaatcgatgcttttgttcctatacttcgcataaaaaaagaagccgattttatttggggggggcaaaacaacaggaggcgtttgaagagttgaagagatatttgtctactccacccgttgtgcgagcgcctaaagccggaaagccttttcggttatatattgcctccgaagacaaagtcattggtgccgttttgacacaagaggaggatggcaaggaatatatcattacatatttgagccgccgtcttttggatgccgaaacgaggtatgtttttatagagagactttgtctattcttatactatgcttgtaccaaattgaggcattatttgttatctagcacatgcgttcaaatacacattgcctgatgaggatttatatcgccgaaatatagatgatgtcttgttggagtgcttagataaagatcaatctaaagtggctatgggagagatacatgaaggaatttgtggaactcatcaatcggcccacaagatgaattggttgcttagaagagcggggttctattggtcgaagatgattgatgattgcttcaaatattatagaggatgcaaggcttgtcaacggttcggcaatgtttaattggcacctgccgccgtgttgaaccccataattaaaccatggccgttccgagggtgggctttggatttcattggtcaaatatatccttcgtcatcaaaggggtataggtttgtgctagttgctacggattacttcaccaagtgggccgaagcaatgcctttgaagaatatgactcatatggaggtaattgactttattttgaagcatattatccatagattcggtattccacaaacattaactacggatcaaggtgcttcttttatgtcgaaagaagtgaagaattttgccgaatcttatggtattaaattgttgagttcttctccttactacgctcaggctaatggacaagccgagtcgagtaataaaacattgttgaagttggtgaagaagaagattgaggaatacccaaagaggtggcatgaggtgctttttgaagcattgtgggcgcataggatatctaaacatggtgccactaaagtcaccccttttgagttggtttatggtcaagaagccgttttaccggtggaggtaaatcttggttctcttcgtaatgtcaagaaagatgatttgtcaagtgaagattacaagacgttgatgggagataatcttgatgaagtcatcgacaagcgcttgaaggcattggaagagatagagaaagagaagaagagggtggccaaggcgtacaacaagagggtgaaagcaaagttgtttcaagttggagacttggtttggaagacaattttccctttgggtactcgatccaaggagttcggtaagtggtctcctagttgggaaggtccttatcgagtgtgcggcattgttcgagggaacgcatactttttggagacacttcaaggggagcgttttcagcgagcgatcaacgggaaatacttgaagaaatacttcccgagcgtttggcaagacgcttaggaggtactatggccggtaattgagttattgtcctaagaccaaaaacatgttctatgcttttagattcacgttgttcataaaaaaggcagggggcatgtgtttacacccaaatttggcacttaggattaaaataggaaagattgccaaaatttggaagtctaccggtttcctccgagtgggccggtctgaccgccgggcggtcagaccggcagtgtgtggccggtctgactggcaggtccgagtccgactgtgttacgtcgggtttcgaggtttccttgctcgggaaggcatgtttcgggttttctttagtttctaccccgagttggacgtggaggaaggcctgtagagggcaggaccaacccctatataatggacatggccggttcattgtaaaaaaccaatctacaatccatcaatcgaatcgttctttttcatattgcttttagttttctcttagtttgtccatctttgttggtttgcgccgtaaaccgtccgccgccgctgcgagagtgtgacatctctttgtaggtttgtcctgaaaaccttccgttttgcccaggagacgcgtagttatctagaaatcggctccgctagccagtttagttatcaaaacccatctaggtttagctctttgctagatcgaggtggttggcgactctaggatcactgcaaggcttaaggtgctgcgatcgtgcttgtcaatttgtcaaaaaagttgccaacagtattgtcgccgttccgggagtttcaaccttcctctctaccagccaccaacctccccgagtgcgcgtcgaccgggaacacaatatgccaccgacgtcgccgcactttggccactggaagcccgacgccccgctcgcccttttctctccctctctctcggctcctaactgaagagaaggaggaggtgatgggaggaagaagaagaggaggagagagaaagaaaagaaaggctgacaggtgggccccactacagtactatttcacattttctagatttaattcaaattccaatttttagaagcccatatctcctaaaccgtagatccgattccaatgaaacttggacctaaatttatataaattcaaatcctaccttttggcactaaatttgctattgtaatatttatttgaattttcttaatttattcaaatgccgtttgaatttatgtttgccttttcaaatatttctttttaacccaaaataccctttagccactaaaaagccgccggttggaactttacgcctttcatgggaacgttcgtgcggtctaccgaccccgacgtcggaccgtcggttgtaaagcccggcaaaaccaaacctaaggtcgaagtgctgctcctggcaccccacgcctcgatgcgtatagtggtcggagcttcactattccatcgacctccatagcacaccgcacagttagctctcgggctctgtgtgatcctagccgttccgtggccactcacggttatcggagtaacacttccaccccgctaaagcttcacaatcttcttatccctctagccattgtattgtctatcaatatcggctagacacctaacctagtcgtcatactatccaattctaatgacgactagcaaacacccaaatcccagtcgatattcatcctacctcgatatcggcttaatcaaatgaaaccccagccagcctgctatccaaaatccataccagccatttactctccaactacctagaacctacacataaaatatagagcctggccgatatattgccctactcctcaatcagcctaaatataaccaaaccctaggtataatcctaccttaaatcctagtcattcttctacctgtggtatttcgaggatcggataatcaggttgcctatctcggatttatttgtgttggagcaaggcaagttattattcctcccctttgatcataataatcctatattctatatctccagtatcttgtgcattagccatacataatttttaatgcataacctgaatatatagcaaaccagatatatgctagattttgcttagccatgcctagttagacggcataaaatataatgaacttagattggaacagtacggaagaaatggttgatttccgggtggctagtactgttccaaccgacataagactgccaagtacatgtgaagaacatacgagtacgaccgcaattctcgtatgggcatagacctagctgactacgttatctagcaaaggtggtacttctgtatagtggttcttcttaagtcctcgcgtaggaggcaaatttatgccgcgaagggcaattatgatatttaccgaggcgcaggtaaatatacttatattgatagtccaggggactatattatggccatgtgattttattaaccctgattgcgatgacatggtgtcatacaatcagttctctctaaatacctcgagaatgccagaactcctcttgctgctgataatgttatgttcagagcgcatgggaactagagttcatggaacaggtaccactgatgttagtaaccgaaaagctttgccatgataatggcacgtcatggattgcgggtaaagcatacatctactgcagtatgaatattctcaaaactattcgaatagccgtgctcgcggttatcgggcattgggactcacaatggcatcttggttagaaacttaattccaaacattattaaatattgtttgtcgcgtcccaaaacgactctaaaatatatcctttaaattatgcctagaataattaaaatctgtgtgcaagccttcaacaattaaaatgtgcaaagttaaaagtcaaataaggcttggaggatttttgtatatttcctaaaagcctaaaatgcgtaaataaattttagtggaattttcagagcacaaataataattattaagaaataaacaaagttaaaaaggttttataaaaagaaaaactctaaaaagtctttttcccccctccccctcttgggccggctcggcccatctctctccctctctctcctcttccccgcggcccattcggcctcctccccgcgcgcgcgccgctgacgggcgggcccgcccacctccctcgctgacgggtggggcccacccgtcatccccttcctcccgccgctcccgccgccccgcccgcgccctagcgccgccgccgccgcgaatcccgccgcctcccgccgtccccgcgcgcaataaagagggggaaatcactccccgtgattccctctccctttccccccatttttccctctctctctcgttcaaacgggcggatttgccccccacaaatctcgccggcgccattgatggagcccgagagcgccgcgccggtttccttctcctccggccgccctctctcactaccaaccctatataaaccctccccgcacctcctccgtccgtttccgccactcgccgcccttcctcctcgccggaatcgagctcgcgccgtcgctctctctctccgccgtcaccgccgagctccggtccgccgccgtcgtcgccccggaccacctcccacctcggcgccgcctccttcggcttcgccgcattctcgccgacctcgtccacccctccgtttcggtcgccatccgccggaacgccgtcgaccccatcgacccgagccgcgccgccgccttccttcgctccggtcgccgtttccgtcgtcgccgtcgacccggggtgagccgtggaccgccgcttcgtttccccctttccctcccctctctcggccgccgctccgccgtgcctatggccgccgccggcgaccataggggcgcgggcgcgccacctcccgccgctgcgccggcgtggtcgccttcgggtgcaccgagcggctgccgcgtggggcctggctgtcagccgcccgcgcccttaggtgcggctaacgcgtgggacacacggcgccggccggtgcgcgcccgggtgcgcccggttcaccgtggaccgtgaggctgacgcgtgggccccacccccgtggacccggtccgcgcgcccctcccctcggttgacgcaataaatccatttttgaattaaaatttaaatgaagaaattcgcaaatattcatttaaagagcatataaaattcaaatggccataacttgcccatttgaactcggaattggaccgttcaagtctctaatttttccttaagaagtcaagaacccatttttgtgctttgtttctgctgattatatggagtttattagagtaaaagccttttcttttccgttggtcgtgtagacgctgcagcttcggaagatccgctcttcgtggaagttgaagccgacgtttgggaaagcgagcaaggcaagtcacatcatccttgaacatattgaatcccagtttataaaattattttgatttaaattattgcattatcgctttatttaaattcccgcgttatcactgttttatctagccatgcctatttacctttgttatgaccttattattgtgattgttattattaccttgttcaccctagaataaacaaaaccccaactagtggacactctactcattgtaccactagtatgattttaggtagatgcttcgctgtttaattaggtaacattaggtggttttacaactctagactttgggaatattctcatcacctggacacattggaattgttggattattgtggaattggattcacacctctccctctattcaaaatccccaaaatggttttaggctgggctcggggtgcatggttttgatagtagcacctcggccatataaggaccggtcttcgggcctctgttgcaaatcactaccgtacttccacatgtctaatgggtaaggcttagtttgtggctcagtctggttataaacaaaagtacacggatggagatggacgaagtcgggggtcgatggacatctctaggacaaatgaaggctacacgagctgcggcccggtagtcgagatgtcatggcacactgtcacgtcctgataaattcatcccgaaataaaattcattttctaaaaggaataatagaattaattaaaattctaaaagaaattggcaaacactaaaatacgcacaagaaaaattcaaatgtggcccggagaatttttgttaaattctccttggtctaaaaggagccctcaaattttacttgaattttcagagcgccggaaatatttattaagcaacaaaaacaattatcaaagtttattaaaaagaaaaacctaaaaataatctctcttcctcctttgggccaagcccagcccgaagtctccctttcctccctctctttctctccctctccttctctccctccttctcttgggcccctcttcccctcccggcccactgcctccccctcctctctctcccgggccgtttcctcccccctcctctcctcctgggccgtgtcccggcccaagccgcacccccccctccaggccgatccgcgcccccgcccgtgctgcgcacgtgcgcgcgctgacgacgcgcgcccgaccgcgtggggcccacgcgtcaggccgccgtcgccttcttcctccagccgccgcccggcttctctctctcccgtgaaccctaatccttccctccctcaaatccgtgtgattcgctcttgggattccaaaattaaataggggaaattaatccccattgaatcctcttcaatcccccccaatttcccccttgaatggcgcccccaatcgccgggaacgcccgcgtcttcctcggccgccctccattgccgccggccgtggttcccgccgccgttcccgctcctcccgtggccggctctctcccccatcctataaaatgggatcctcatcccccgttctctcgttttagccccctcccgagcctccccgtggtccctatccacctccccgtcgccctcctctctctcccacgctgccggccgcctccagccgcctgtgccgcctcgaccgtgcgccggccggccgcgccgtcgcctcctccagcgtcgccgccacctcctccaccccggcttgccctccgtttcccgcggagacccccggagctgcctccccgccgtcgcccttctcgtttctccgcgccggccggctccagtcgcctctcccgcctcgcccgtgcgccgtccggtcgcgccgtcttctccctcggcctcgcagccacctcctctccctcggtcagccctccgtttcgcggggaaagcaccggagacgcgtcctcgccggtgtccagtggcgtcgccaccacctctccgtctccggccggctgctgttcgtcgccggtacgccgaccgacgtcgccgtctcctccgttgacgtcgcagcgtcgccctccaccccggctgctcctcggtttcgccggaacgccgtcgccgcgccggcctctccatcctctttgtcgccggcgtcctttcggcctctccttcctcctcgtcggctcgtcgccccgctgcaccaccaccttcaccaacatcgtagcggcgtgttccacgtcatcctcgtccccgtgcagccgctgccggctgtcctcgtcgcctcctcgccggtcccggtcgtcgtcgtcgtcgtcgtcctctcgccgttcccggtcgtcgtggcgttcgtccctccgtcgagccgttctcgtccgtcgtccgcgttcgtcaagcgagccgctgcaaccccgtcctcgtcttcgtcctcggctccgcgtcgtcaagccccgtgccggccgcgtctcgccttcgtccaaagatcgccgccgaagccgtcccctcgccgttcatctccgttgtgcccgtctgtctccgccgcgcccgttcgtcgttgtcgctcccacgcctcgtcgcgtggtggtaaggttccctctccctcgctgccccgtcctcgtcctttcggtgtcgccccgaacccgttgtgcggtcgtcgaccccggtacccgtgtaccggtgtcggtagtcgttcacgtgtgcgggtggtgaccgtgtagtgtccgtgttagtgtgcccgctcggtagccgcgtggtttccacgtgtgcaacccgtgtggtgcctagtggagtccgtttgtcggccactcgcctcggttgacacacgggatccgcttccatcgacccgtggaccgtctctgtgtactcggtctaccgcggtcctttttgttgacatgtggggtccgcatgtcaacggcgcagccttcctgtcttttccaggctagcgcttacacatgttttataattgcaaagcttaattataataatccgcaaatctccatataacagcattaaacttcggatgatcatatcttggtcattcgagctccgaatcgacccgttcaagtctcttaatgtttgatataacctaaagaaccctgtgctctctttttatgtattgttattgcttctttataggcttgtagctttgcttgtgtgcttcgcgtagctttcgtcgttccggaggttcccgaagcgtggtttgcggtcgttgccgaaggttcggaaggccgttctctctgagcaaggcaagtcacatcatctttgaacatattgaatcccagtttgtaaaattatgttgatttaaattattgcattatcgctttatttaaattcccgcgttatcactgttttatttagccatgcctatttacctttgttatgaccatattattcttgttattgttattattattaccttgttcaccctagattaaacaaaacctcaactagtggacactctactcatgacaccactagtttaattctaggtagatgcttcgcaatttaataggacaaccttaggaggttttataattttagactttgggaatattcatatcacctggacactatggaatggttggcttatggtggaattggacatacacctctcttcctctttcaaaacccctaaaacctgttttcggtggggtttgggtgcatgccagttgtgggaagtagcaccccggccactataaggattaagctcgggcctctgttgcaaagcactaccgtacttccacatgtctagtgggtaaggcttagtttgtggctcagtccggttataaacaaaagtacacggatggaggtggatgaagtcggggtcgatggacattctccagggcaaatgaaggctacacgagctgcggcccggtagtcgagatgtcatggcagagggttggtgccctgctgctagggggctcagtcctgcctgcctgtcccgggtgtcccggccgtagggggattgggtcggtactcttgtttatggctaggatgggttgggaactatgtcacgtcttccgtccgtataccgtggtggtatgtggcacgtggttgcacgtgaggaagatgtgtcttgtgggtaaagatgtacacctctgatcagagtataatctattcgaatagccgcgccctcggttatgggcaagccgagcaatgtacccaagtcagtgtttcaattcttaaaatttgctcaacaactaaaatgtggaatggttggcctgggttggcttgggacgagctgggacccagggtcgggttgccagttcggtctgaatcatcgtaggccttgggttaaggcaggttcgtgagggttcacggccttgtttaataatactgtgtagctctagggtcgtctttataaaatagctttgggcaactaagtgacttttaaatgctgtttactgcaaaacttaacccctatattattatccccttgtactcctttgcattaattgtgcatccccggtgtggcttgctgagtactgtggttgtactcattcttgctcaatcttttcccccttcagtaagagaagctttggagaagaagtcttaggtggagtcttggcttataccccagttgagcgcctgtgaagatggagccgtaggcccgctagtccgctgctgtttatttttgattgtcaggcctgaagcgcctttgtaataatgtaaatattatcgatataataaagatgtgtcttttatatcatgtttgtgtggtgtaccccggcttttcctgggacggggattaatacactagcgttcgggaaaaggcaattttcccggtcgcgacacacagggccggtgtcctgctgctaggggctcagtcctgcctacctgtcccgggggttccggccgtaggtgggattgggtcggtactcttgtctatggctaggatgggttggaaactatgtcacgtcttccgtctgtataccgtggtggtatgtggcacgtggttacacgtgaggaagatgtgtcttgtgggtaaagatgtacacctctgatcagagtataacctattcgaatagccgcgccctcggttatgggcaagccgagcaatgtacccaagttagtgttttcagtcttaaaacctgcttaacaactaaaacatggaacggttggcctgggttggcttgggacgagctgggacccagggtcgggttgccagttcggtctgaatcatcgtaggccttgggttaaggcaggttcgtgtgggttcacggccttgataaataataatgtatagttctagaatcgtgtttacaaaatagctttgagcaactaaatgtctttaaatgctgtttactgcaaaccctaatcctttatattatgattcccttgtactcccttgcatttattctgcacttgtgggtgtgtcttgttgagtacggtggttgtactcagtcttgctcaatttttcccaaacccagaagaggagcccctggaagttgaaggctttggtgtctagctcgtgcctgccgtcaagcgcctgtggtcgtcgccctagtcttccgctgtttcccgtttgtctttgtgtgtgctgggccttcgtcgcccatgtaataaattaactatttacgcttccgcttgataaactctgaaatgtatcaactcttggtgtaccttgcctcctgggacaaggaataatacacgcacgtaaggaacgcccgttgggttaattccggtcgtgacactgttgcatttaaaacattataggctttcttcctttatattctttgctttctgcaagtaaacctagctctacaaaaatattaccatttcatgtatttattgttgatcaatataatagcttgctgagtacgttgtactcacccttgcttcaaccccctttttcagagtcaatttggagttcttatcgaagccgggagtttaatcatataagttagtctcattctaacttaattctcaagtataaattagataaatggtttaagtctataacaaaacactagaatttagtcattctatagcttctgctgtaatagttagccacaatcttgtaaataccctattattttttgtaagagaatccccttggaagccttgctcaaatgtatgcaatgaagatccagattgttgaacctgtatcaatctactgatccagggcttgatacagttaaacatgtcggtttccgaatcattagttttgggacccgacaatatgtatgtgtgtgtgtgtatatatatatatatatatatatatatatatatatatatatatctgtgtgtgtgtgtgtatatatgtatatatatatagaaaaactattctatacccctctctctccaacccacctcctctccttctaagggcccaaaacccacctcccaccttagtcaaaggctagtcaaaggtaccccacgtcagtcaaacccgctagcagtgacttcccccaccaccccctctcttcttagctctcgtcccggaacgacgtagtaatgtcttcttcatcgtacagtgtcacgtcctgataaattcatcccaaaataaaaatcattttctaaaaggaataatagaattaattaaaattcgaaaagaaattggcaaacactaaaatacgtacaagaaaaattcgaatgtggtccggagaatttttgttaaattctccttggtctaaaaagagccctcaaattatttattaaacaacaacaacaattaacaaagtttattaaaaagaaaaaagctaaaattaatccccctcctccctttggaccaagtttggcccaaagtcctccctctctctctcggcccgcggccaaagtcctctcttcctccctctctttctctccctctcctcctctccctccttctcttgggcctcctctccttcccctcggcccagccccctcctcctccctctctcccccaggtcgcctctccctcctctcctcctgggccggccgccaggcccaaaccgcgcccccctgcctgagccgctccccttccgcgtgcgcacgtgcgttgcacgcgcgctgactgcgtgcccgaccggtgggtcccacccacccgatcatctccttcctcccgcccggcatcctctctctcttctctctcccgtgaaacctagcgtcgattcctcccctaaatccgcgcgattcaaaccgggaattccaaaattgattagggggaattaatcccctttccttcctcttcaattccccctaatttcccccttgattcgtgcccccaatcgccgggaacgcccgcgccaaccccggccaccttccatggccgccggccggcttttccgccaccgttccccgctcctcccgtggccggctccctccccacgcctataaaacgaatcccctcgctccgttctatcgttttagccccctcccgcgatctcccgtggtccctagccacctccccgccgtcgtcccctctctcccgtgccgccggccgtcttcagctgcccctgccgccgcgttagcacgctggccggctgtgccgtcgcctcctccagcgtcgcagccacctcctcttcgccggcctgccctctgtttcccgcgaagacctccggaagtgcatccccgccggcaacagtggcgttgccgccactgttccgcctccggccacctctgccgcgtcccctgtgcgccggccgacgttgccaccacctctcccggcaccggaatgccatcctcttccccggccaagccacggcatcgctcgtatttcgccggaatgccgtcgcgcgcgccgcctcttcctcggtctcatcggcacccactccggcagcccctttcgccgtgccagtgcgccggccgacgtcgccgtctccacctccggcgtcgcagcggcaagatcgccctcggcctcgcctccccttcgaccgaacccctctgcggtccatcgtcgtcgtctccgttcgttctcgtcgtcgacgtcccgtcggtcgcccagctcgtcgtctcgcggcgccgcctccgtcgtcggcatcgcagcggtgtgttccacgccatcctcgtcttcgtgcagccgctgtaggctgcccacgtcgcctcctcgccggccccggtcgtcgtcgtcgtcgccctctcgtcgttcccggtcgtcgtggcgttcgtccctccgtcaagccgttctcgtttgtcgtcctcgcttcgtcaagtgctgcagcctcgtcgtcgtcttcgtcctcggctccgcgtcgtcaagccttgtgccggccgcgtctcgccttcgtccaaggatcgccgccgaagtcgttccctcgccgtccgtctccgccgcacccgttcgtcattgtcgttcccatgcctcgtcgcgtggtggtaaggatctctcctctcgctgccccgtcctcgtcctttcggtgtcgccccgtacccgttgtgcggttgtcgaccccggtacccgtgtaccggtgttggtagtcgttcacgtgtgcgggtggtgaccgtgtagtgtccgtgttagtgtgcccgctcggtagccgcgtggtttccacgtgtgcagcccgtgtggtgtctagtggagtccgtttgtcggccactcgcctcggttgacacacggggttcgcttccgtcgacccgtggaccgtctctgtgtactcggtctaccacggtcctttaggttgacatgtggggtccgaatgtcaacagggcagccttcttgtcttttccaggctagcgcttacacatgtcttatagttgcaaaacctaattataataatccgcaaatctccatataacagcattaaacttcggatgaccatgtcatggtcatacgagctccgaatcgatccgttcaagtctcctaatgtttgttataacctaaagaaccctgtgctttctttttatgtattgttattgcttctttataggcttgtagctttgcttgtgtgcttcgcgtagcttctgtcgttccggaggttcccgaagcgtggttcgtggtcgtcgccgaaggttcggaaggccgttctctctgagcaaggcaagtcacatcatccttgaacatattgaatcccagtttataaaattattttgatttaaattattgcattatcgctttatataaattcccgcgttatcactgttttatctagccatgcctatttacctttgttatgaccttattattgctattgttattattatcttgttctccctaggataaacaaaaccccaactagtgggtaccctattcatggttccactagtatgaatttaggtagatgcttcgctgattaattaggcaacattaggtggttttataactttagactttgggaattctcatatcatttggacactatggaatggttggcttatgttggaattggacacacacctccccctctattcaaaacccccaaaatggttttaggctgggctcgaggtgcgtggttgggttttgtttgtcgtacctcgggtactataaggattaagctcgggcctctgttgcaaagcactaccgtacttccacatgtctagtgggtaaggcttagtttgtggctcagtctagttaaacagaagtacacggatggagatggacgaagtcgggggtcgatggacatctctaggacaaatgaaggctacacgagctgcggctcggtagtcgagatgttatggcacagggctggtgtcctgctgctaggggctcaatcctgcctgcctgtcccgggggttccggccgtaggtggggttgggtcggtactcttttttatggctaggatgggttgggaactatgccacgtcttccgtccgtataccgtggtggtatgtggcacgtggttacacgtgaggaagatgtgtcttgtgggtaaagatgtacacctctgatcagagtataatctattcgaatagccgcgccctcggttatgggcaagcctagcaatgtacccaagttagtgttttaattctaaaaatttgcttaacaactaaaatgtggaatggttggcctgggttggcttgggatgagctgggacacagggtcgggttgccagttcggtctgaatcatcgtaggccttgggttaaggcaggttcgtgagggtgcacggccttgattaataatattgtgtagctctaggattgtctttataaaatggctttgggcaactaagtgacttttaaatgctgttcgctgcaaaacttaacccctatattattaccccttgtacccccttgcattaatcatgcatctgccggtgtggcttgctgagtactgtggttgtactcattcttgctcaatctttcccccccttcagtaagagaagctttggagaagaagtcttaggtggagtcctggcttataccccagttgagtgcctttgtaataatgtaaatattatcgatataataaagatgtgccttttgtatcatgtttgtgtggtgtaccccggcttttcctgggacggggattaatacactagcgttcgggaaaatgcaaattttctcggtcgcgacatgcagtaacaccgtgttttacttgtagtaacagaattgaaattcagtcatagtatagtcatgatggatctacttttgataagcactttttttcgaacatcatagtgcaaacggtttttaaaagtagtacatgatatgagagatattgcccttgaaagatttgtttttaaaaatttaactctccacaagtagtaatagtatatcaaaagtgttactagtgcatgttttgcgttaatgcaatcacatcatgtcgttactacaagatgtagtaacgattataagttttatattaacatagtgtgttactgcaattacttgataacattactacaagaatatggggaattggctcggtttactcgtgtgttttaatccatgttttttttatttcaggtttaccacaatttcaccacgatgttactgccaaatatgcagtaacgttctatacgttctacagtaacaaagtgttttactgcagttcttggatagtgttactgcataaacatgcggtaatgtataactggcaggtggtaatgtgtatatgccgtgcagtaacacttttacttttgtgcagtaacaagtatatagttagcatatgagactttgaacccatatattttttgtttcaattcctgatttattgtcaaaagtgcagtaacgtcatatacatgcatgcagtaacactatattagagggagaagaccggttttcttaagaagagagaggaagaacgatttcttgaggggagtatgtagatgcattttgaagttctattctccacatgcagtaaccctatagcatcattgtgaaaacaattttaaaaaataatacatatcttgtgagatattgcttttcaaatattggcgttttgaactttaacactccatatgcagcaacagaatatgtaatttgcagtaacatgggtatatatatgcagtaacatagttttaccaaatgtataaaattgttgaaaacactcctacatcaatcagaccttactcaaaaccacctacagactttacctatagcccacctattcgaccttcatctcgtaaaacagacatagtaaaactatgattatcgtgcagtaacataactacttggaagtggtaacatgcacatattatgtagtaacacttctacttttgtgctgtaacaagtatatggttagcatgtgaggttttaacccatatatttttgttttgattcctggtctactaaaattttactatgacattactgccaaaagtgcagtaatgccctatgtgttctacagtaacgtcacgtgttactgtacttttaccacaatattactactggagcataataacatgttatgagtttcggtagtgaaagatattagaattgataatcatattactttctcacaaaattcttgaaacaaataaaatcattagataaattggttagaagaatgtgctttgaactatgaggtcatgggttcaagtcttgaatttagcaatttattttttatttttctagaaaagagaaaaaatgtttcaggaagaaaaaacagaaaaaaaggaaaaaggaaagagagagatcgggaggaggaagggggagcgaaaaagaaggcgggagggggaagcgacgggaaggggggatcgggagggcgggagggatacgggataaaaagggtaagggggtgtagaatagttattctataccctgggtgtagaatagtctcaccctataatacacacacaatctacaccgttgatgtgttccaagattcgtgctgcaaaatatacctaaccttaaccaaatgaatgcttactatagggagaaaagattaggattgggttggttcacaatatatataacatgtgtgttgcattttttaccaaataaattttttcaataacaatcatatatgacatttatatatctagtgcattgtatttctctaacccttattttgtttagtcaaaatgagaaaacaatatatctattatatcaccaaattgtcatcttgcaaaaatgatacttccaaaatgatatatatcctaccatcaaaaactacataaacaaggtaatttatataaacaaggtaaactaaataaacaagttttgcatactagaaatacaaaaattacaataaacaaggtattttacacttgtaaaaaatatagtataacgtaaacatcatgcatggtacattttattagcacctaatatactcaccctaagattcgtgcaagctatatatagggtgtatattgtgggtacatgtgaactcgcgtgcaaaaaaatccaactcatatatatatatatccataagagacaccatagtgcccgggcaccatggtatcaaatacacaaattcactcaaaattttcaaaattttcaaattgtgagtatatacctagttataagaattcgattcatacctatacctatcaaaaaaaaacaactcaaatttaactttatttaacaatccatgattacatacctaactaattatatgtttggatgctatatacctagaaccaaaatctaacaaaaacaagttcaaattcaattcaaacaagttcaaaatctaataaagtagttaatgttaatacctaaatatttgaaaaagtttcatactcatttgaattggatatatactcaatttcaatcatggtgccgggcaccatggagtcccatatgggtaccctatatatatatatatatatatatatatatatatatatatatatatatatatatatataaatatatggattgtggttcatatgcacctcaatccgcttgttgacacgtgtacacatggctccggtgcaaccgtgtgttggaaactttttgtgacaagttgacaagcacaatcgcagcacataaacaccttgcggtgatcctagagtcgccaaccacctcgatctagcaaaagctaaactaagattggtttttataactaaaccggctagcggagcctattatagataactacccgtctcgtgggcaaaacggaaggttttcaggacaaacctaaaaagaggtgtcacactctcgcagtggcggcggacgatttacggcgcaaatcgacaaagatggacaaactaagagaaaactaaaagcaatatgaaaaatgattcgattgattgattgtagattggttgttacaataaaccggccttacccccttatataggggttggtcttgccctctacagaccctcctccacgtccaactcgggatagaatccaaaaaaaacccaaaacatgccttcccgagcaagtaaactttgagacccggcgaaactgacccggactcggactctgccggtcagaccggccacacaccgccggtttgacaggccctcaccaggcggtctgaccggccaacacacggcggtcagaccggcctaatcagaggaaaccggcagacttccaaactttggcgatataaatcttcatgcacttctcccatagccactttagattgatcattatctaaacacttcaatagaactccatctatattttggcgatataaatcttcatcaagcaatgtatatttgaatgcttgccgccgaattttccgatcaaccttaagtttaggatctttcaaatatctaatcaaaggaattctccaatccacttctgtttcctgggcacaaatgtccgaatttacaattaattcggtctttgaatcaattgcggcgtgccaccagcgctctgtccagagccggtcagacccgccgtgcaaggccagtcagaccacccggggtggccggtcagaccagcggtatgtggccggtcagaccgcccctggtcaccgatcagactggccgtgcaacgccggtcagaccgcccctggtcagaccgcttagcaagtgtgagttctggttgtccgaagtcaaattcttagggcacgtgatatctgctaaaggagttgctgtggaccccgaaacagtgaccgccgtcactgattggaagcaacccaagacagttactcaggttcgcagctttttgggtttggcaggatactaccggaggttcatcgagaacttctccaaaatcgctcgacccatgacacagttgttgaagaaagaagaaaaatttgtgtggagcccgcaatgcgagaaggcgttccaaactctcaaggaaaagctggtttcctcgccagttttaatcttaccggatactcgcaaggacttcatggtgtactgtgacgcttcgcgccaaggattggggtgcgtgctatgcaggaaggtcatgtggtagcctatgcctcacgccagctacggcctcatgaaggcaactaccctacccatgatttcgagttggccgctgtggttcatgctctaaaaatctggcggcattatctcattgggaattgctgtgaaatatataccgatcataagagtttgaaatacatcttcacccagtcggatctgaatcttcggcagagaagatggttagagctcatcaaggattatgatgtgcgaatccactatcaccctggtaaggccaacgtggtcgcagacgcgctgagtcgaaaaagccgttgcaacactcttggcgtccgtggcattccaccggaacttcatcaacagatggaagccctgaacctaagcatggttggtcgtggattcttggctacgctggaagccaagcctaccttactcgatcaaatccgcgaggctcagaagaatgatccagatatgcatgggatcctcaagaatatgaaacaaggtaaagccgctggtttcacagaagatgaacatggaaccctatggaacttaaacagctgatacttcaggaagctcacgaaagtccttattccatccaccctggcagtacgaagatgtacttagacttgaaagggaaatactggtgggttagtatgaagcgggaaattgcagagttcgtggccctttgtgatgtgtgccagcgtgtcaaggcagagcatcaacgaccggccggacttctccaacctctacaagtaccagaatggaaatgggatgaaattgggatggatttcatcaccggacttccaaaaacccaagacggttatgactctatatgggtagtcgtggaccgactaaccaaggtagctcggttcattcccgtgaagaccacctatggagggaacaaactagctgaactctacttcgctaggatcgtgagtctccatggcgttcctaagaaaattgtatctgatcggggaagccagttcacctctcatttctggaagaagctccaagaagagttgggtacccgcttaaatttcagcaccgcgtatcacccgcagacagatggacagaccgagcgtctaaatcagatcctagaagatatgcttcgcgcatgtgtcctagattttgggaaggcatgggataagagtctcccctacgccgagttctcctacaataacagctaccaagccagcatacaaatggcaccctatgaagcgttgtatggccgcaaatgccggacaccgctattgtgggaccaagttggggaaagccaagtgttcgggactgatatcatgagagaagctgaagcgaaggtcagaaccattcgggataatctaaaggtggcacggtcccggcagaagagttatgcagataaccgatgccgtaacctggaattcgcagtggacgattttgtgtaccttcgagtcacgccattgtggggcgtacacaggtttcagatgaaagggaagctcgcagctcggttcgtgggtcctttccgcatcatttctcgacgcgaagaagtagcttaccagttggagctgcccgcctcattgggcaacgtgcatgatgtgttccatgtgtcgcaactcaagaaatgtcttcgagtgccatccgagcaggccgactcagagcatattgaagttcgcgaagacttgacctacgtagagagaccagtgacaatcctggacaccatggagcgcaggaccaggaaccgggtaatccatttttgcaaggtccaatggagcaaccacgccgaggaagaagccacttgggagcgtgaagacgagctgaaggcagcccatcccgatctcttcgctagttcttccgaatatcggggtcgagattccgtttaaggggggtaggtttgtcacgtcccaaaacgactctaaaatatatcccttaaatgatacctagaataattaaaatccgtgtgaaagcctccaacaattaaaatgtgcaaagttaaaagccaaataaggcttagaggatttttgtaactttcctaaaagcctaaaatgcgtaaataaattttagtggaattttcagagcacaaataataattattaagaaataaacaaagttaaaatgattttataaaaaaaaaaccctaaaagtcccccttccctcccttgggccggcccggcccatctctcctccccccctctctctctctctcctctaaccgcggcccactcggcctctccccgcgcgcgcgtcactgacgggcgggcccgcccgccaccctcgctgacgggtggggcccacccgtcatccccttcctcccgccgctctcgtcgcctcccccgcgccctagcgccaccgccgccgcgaatcccgccgtccccacgtgcaataaagtggggggaatcactccccgtgatcccctctccctttccccccatttttccctctctctctcgcgttcaaacgggcggatttgcccccgcaaatctcgccggcgccattgatggcggccggacctcccgcaccgatttccttcccctccggccgctctctcccccttccaaccctatttaaaccctccccgcgcctccctcgcccgtttccgccccttgtcgcaccgtctccccgccggaatcgagctcgcgccgtcgccctctctctcctccgtagccgacgacctccggctggccttctccgctcgccgggaccgtctcccgccccggagtcgcctcctccggcttcgccgcaccgccgtcgaccccgtccaccccctcgccgagtccgccgaccgccggaacgccgtcgaccccgtcgacccgagccgcgccgccgccttcctccgctccggccgccttttttgtcgtcgccgtcgacctagggtgagccgtggaccgccgtctcttttcccccttcccttcccctctctcggccgccgctccgccgtgcctatggccgccgccggcgaccataggggcgcgggcgccgcctcctaccggccgcgccgagtggccgccttcgggcgcgccgagtggccgccgcgtggggcccggctgtcagccgcccgcgccctcgggtgcggctgacgcgtgggacccacggcgccggccggtgcgagcccgggtgcgcccggtccaccgtggaccgtgaggctgccgcgtgggccccactcccgtggacccggtccgcgcgccccctcccctcggctgacgtaataaaccctttttaaattaaaatttaaatgaaaaaattcataaatattcatttaaagagcatataaacttcaaattgccataacttggccatttgaactcggaattggaccgttcatgtctcaaatttttccttaagaagtcaagaacccatttttgtgctttgttcctgcttgttatatggagtttattagagtaaaagcccttttattttccgttggtcgtgtagacgttgcagcttcggaagatccgctcttcgtggaggttgaagccgacgtttgggaaagtgagcaaggaaagtcacatcatccttgaacatattgaatcccagtttataaaattattttgatttaaattattgcattatcgctttatttaaattcccgcgttatcactgtttatctagccatgcctatttacctttgttatgaccttattattgttattgttattatttccttgttcaccctagaataaacaaaaccccaactagtggacactctactcatggcaccactagtatgattttaggtagatgcttcactggttaattaggcaacattaggtggttttacaactctagactttgggaatactcttatcatctggacactacggaatggttggattattgtggaatgggattcacacctcaaaatggttttaggctgggctcggggtgcatggttttgatagtagcacctcggccatttaaggaccggtcttcgggcctctgttgcaaagtactaccgtacttccacatgtctagtgggtaaggcttagtttgtggctcagtctggttataaacaaaagtacacagatggagatggacgaagtcgggggtcgatggatatctctagggcaaatgaaggctacacgagctgcggctgtaacatcccggcctagggcttaataggattaatagaatactcatatcaacaagttacaactttttttccggaatccaatctccaaagaactccagggttaagcgtgcttggcctggagcaatttgggatgggtgaccgaccgggaaattcttcccgggtgcacacgagtgaggacaaagtgtgcagaaaagacatgtgttgatctgtgagggcagtctatgacctatgaatgaaagctatcagatgtaagcgggcccggcctgggggaaggcgggacgttacagcggcccggtagtcgagatgtcatggcacagggccggtgtcctgctgctaggggctcagtcctgcctacctgtcccgggggttccggccgtaggtggggttgggtcggtactcttgtttatggctatgatgggttggaaactatgtcatgtcttccgtccgtataccgtggtggtatgtggcacgtggttacacgtgaggaagatgtgtcttgtgggtaaagatgtacacctctgatcagagtataacctattcgaatagccgcgccctcggttatgggcaagccgagcaatgtacccaatttagtgttttaattcttaaaacctgcctaacagctaaaatgtgtaatggttggcctgggttggcttgggacgaactgggacccagggtcgggttgccagttcggtctgaatcatcgtaggccttgggttaaggcaggttcgtgtgggttcacggccttggttaataatattgtatagctctaggaccgtgtttacaaagtagctttgaacaactaagtgacttttaatgctgtttactgcaaaccctaaccccctatattatggctcccttgtactcccttgcatttattctgcacttgtgggtgtgtcttgttgagtacggtggttgtactcagtcttgctcaatttttcccaaacccagaagaggagcccctgggtgatgaaggctttggtgtctagctcgtgcctgccgtcaagcgcctgtggtcgtcgccctagtcttccgctgtttttcgtttgtcttcttgtgtgctgggtcttcgccgcccatgtaatagattaattaattacgcttccgcttgttaaactctgaattgtgtcaacttttggtgtaccttgcctcctgggacaaggaataatgcatgcacgtaaggaacgtccgttgggttatttccggtcgtgacatttcggcatccaaaagatggcggctcaaatacgtaatgatatattccttgccatcttcctgttgtgtcaaaacagcaccaatgactttgtcttcggaggcaatatataaccgaaacggctttccggctttaggtgcccgcaccacgggtggatgtggacccccgtttttataacaagaatcaatcgtgtaaacagtaccatttccctggatcaagtagtctggtacacacgaatttatagctgaaataccaagtgcacatacacgagagtctagtacgaattattacatcataagcccacaggcgcagtcttaaatcatcggaccgagcggtccgggatacattccaaaaacagaagtaggtaaggcagcggaattaaggcagtggcacgccattgacataggcaacgaccgtaactaagacctactgggcgccatcgtcttcatcaccctcctagtaataggcatagggatcctccgaagcttcatctccggcctctgattaagtttatatttgcaagggtgagtaccaaccgtactaagcaagccaccacagcaacaatgcatatgatagggatattcaaaagatggctatggttcttttgcgcaaagcaagttttgtaattcttttcacaaacctaagacctagcatagactgatcaaattttagttccagagttcatattaaacaacgacggttctgtccaccatccattgtaatcccaaggatagcttcccgccattgagtcgtcatggttttctgaggacgtccaccttcccgcctctcaggaagtggctccatcagcatagaaatcatcatgcatcatcccatcacacacaagttaagaatttagagtctagccaagtgtaacacatgtcccggtgctcaataaccacgagcacggctattcgaacagatttggtttactcacactgcagtggatgtacactttacccgcactccgcgactgcccaacacatgagcctcgtcccaacacatgagacgcgtcacggcaaagcttttcgataacctcgcattggcagtacccgctccatgaacttaaatcctcatgcactctaggcgtccatgtttctagcagtgagaggagttctggcgctcccgggaaagagaagtctcacacacatattaaattatggttcaagttaagttctctctctcacacactcatggcagtcctaccgatgatgacaccgatgtagggcacgcctctcggccctacctcaacggctgtcccaccgtagtgcacctgcctcactcaggggtgaaccatctatgcagggatactgcctccgctcggctatctaatccgctaggtctatacccatacgagaagtacggttgtacgggggtcgtttcatgcttaacttcatggctcggtccttaattgaccggggacgatattagccttttcccgataccacccaaatcctccgtccgccccagttgaaaacagttgtttaattctatttctcctttcacaaatcatatcatcaacatcatggcaatgtggcgctcatgtctccacatgccgcatctcaattaccttcccaaaggtaattgcccaagcatatagcatttgataaatatgagtatgcataaatctagagtagcatttctaagcatttgtcatagttgactagggacttatacgtagatcatggttacaaggatttaagggtaaacaatactcaaggcatggcataatcacaagtaggatgttcatcattgcatgcaatttttatttgtaaataaaaataatttcacaattgggatcaacatgttcaaagaatagtgatgacttgccttgctcaaagtcttgcgggtcttggccttcacttggatccaccactccctcgggctctatagttacgtgcgaaaattgatttgaatttggttagaattcaaataaaaatccaaataaatccaaatgaaagtcgaatgcgaaagtcgatttctttatattaactttactattcgcgaactaaggcaaacccaatttcgattcaaactattttgcgggtataaatattttgttgtcataagttttttttttaatttaatctacccgagcattatatacatacaataggttagaaatttctatcgcgagctaaatatcggacgaaatcctaaaaatattatacgatttaatttagtctataactaaatgattaaatataatacacgggtaaaatccctagtaattaaatccgaatttctaccgtgaatcgattacttatagggattacccaaaaataatctataataatatataagaattcatctaattgtttagctattaattacatctaaattactactgcgaattgatttcttatagaaattaccaagaataatccataatttatattaaattttgcaattctacgactataataaatctataattaaattctaattattttaaattttctaaacttccctaatctccctctaatttcctatttatttcccttttctttttctccctttctttttctttttccttcctttctttttcttttctttttcccccttttattttctctcccagctcctttcttccttcctctcttcttttctctctctccctctcggcttcttcctccctccctctttctcggctttttgccctcccggcggcgacggcggtggacgcgagggggaaaaggcggcggcttaccgacagcgacggtcggcggcgacgacagcgacggcggcgcaaggcggcgacgcacggcgcggcggctccgggacgacggcgcggcggcttcgaaggtggcggcgcggcggcatgacgacggcggaataatttaaattgaaaaaggtttttaaaagtcttcttttggctttgggccgaaagtcggcccaaaaccccctctctctccctccccggcccaagtcggcccagtccgccgcagccgcgcgcgccctcgctcgctgacaggtggggcccgcctgtcggagtcgtcgtctacctccggccgccgccgcccgaaaccctagcgccgcgccgccgctgtttccttccaaatccggccgctcctttccttctccggagaaatcaaaagaggggaaatgtttcccgagatctcctctaccttttcccttttggaaacatcatctatttcggtttggaaatcgatggattcaagatcgaatcggattcctctctctctcccgaacccgaggtttccttcgcgtcgccggtcgccgtgggccttcgccgccgccccctagcctctttaaaaggatccccaagtccgccgctacccgtcgccaccttcgccttcatctcttgccatcggaagcgtcctagcgccgtgtgacctagcgccgtcgtcgtcgccgccgctccagccgtgcgccgccgtcgttccagtcatcgccgtcgctcgggaaggtcgtcatcgtggtcgccgtcgcttcgccgtcctcgtccgccccttcgcagtcgctgttgaccgccggagcaccgtcgccgccgtcgacccgatcttctccgccgcttcaacctcgtcgccgtcgccatccgttgatcttccgccgcttctttggtcatcggtgagttcgccgcgtcgcgctctacgtcctggtgctctccgttcgtgccgaagcgctgttgttcgccggcgagcatgcgtgcccgagccgccgagccgctgccggtgctgacgtcatcgatgacgtcaccgctgacgtcatcgtggcggtttgccgtgagccggtcgtggaccgatcgatctcggccgtccgttttggatagggttgatctcggccgtccgttcccgtggaccgctgccgtgcgcccggtctaccgcaaaccctagccgctgacgcaataaatctctttttccttttcaaaaataattcattattgcgtcataattcaattaaaatctatataagtgttttaatccgattaaatcttcaaaaattcataactaattcatcttagctcggatttagttggttcaagtctctaaatttttttaaaattgagatctacatgttaaaaatatccacatgtactgttcatgcttgtttatgtgctgttttggtgtttttgctcttttctgtttagattccgacgtttccggagagtccgttttcgcaggagaagattttgaagagttccaaggccagcaaggcaagtcacacagatcccaaacaaccctttgagcatgttgatcctatttaaagctattgtttctattcaactattgcatctattttcgaatgtcattgggtggaattaacctattctttgttatggcccttttgtacttgattactttattccttgataccttgggtgattataattggactagttgagctttatatatattggttcaactagatattagatataattgcttagccatgcttagaaacattagcacactattgggataacttatgactcactattatttaatgatggcttaatggtagttcacgatggtcaatcgtgatttgttaattaattacttgccaactaaaattttataatggtgggttgtgagcacatggttttgatggtcgtgctcatgacaattaaggaccggttcacgagtttcggttgtgaaacattaaccgtgccaaccacaagccagcgtgggcaacggctttaccttttgtatagcatggttcattgcggagcaccagactgagaagtggcggagataagcccacgggggtcgctggggagtccatgccttgtttataagggggtgattatgatctaggaaaggtgcgctgtagtggattgtgttgtgcgaggggtattgccacagctcctttccgaggtaccgtggtggtattgaggcacatggtgacatgatgtggggctgtgtcttgtgggtacagtgatacacctctgatcagagtaaaactattcgaatagccatgcccgcggttatgggcgggcctaataatgtctttcgtgattagtctcacacttctcaccataataaataatgctataattggtaataatttgattagctcctggtttggaatggtatattcctggtttggggatagaactgtgcagccgggatggttgttcagaatggttgggcctatgcaatagggtatgttgtatagtgttggattaatattgtttaattatcactgaactgttttataattctcaaatgtttgctaaatgctgcttttgcaaatgagccctatactatgccatcctttgttatcctgtgcacttgcatatttgctgcgtgacttgctgagtatgtcatatactcaccttgcaatcattcatcagaggaagagttctacagtggtgctgatggtgtggaggattaggtgtagccttggtcaagctgcttgtggagtggagccgtctgcgccgtttatcttttattttccgctgcttagatctttattgattgagaggaactatctacctctgtaatgacattttattcgcttattaattagagtaataattgtactctattatcaatttgttattgtgtgcctcggctgattcctggatgagggttcacacacatgtaagcgtttggaattttggatagaaattccgggcgtgacagacgcgcgcggcgttgggacgtcgatggcgacggcgacaacggtggcgcgcggctcggggagggacgcgatgggcggcgacacaacggcatggcgcaacagcgacgatgggacggcgcggcgcgggcttgacggcgacgggacggctgcgcgaggctcgaggcgacgcggcgacgagacggcagcacgcgcggcacgggggtggcgacgttggctcgagctcggggcggctcggcgatgttggcgcggcggcaggcggcgatggcgacaggcgggcggtgtggcgcgggcgcgtggggcgcgaggcggccaggcgcgacgggcggcggcacgtggtgacggtggcgacagagagaggggaaagaggagggggctgggttaggggaccacgtcaatcacctacgccataatgaacagtgtattttcctatttatcccgattttagtttatttccaatataaatttgattctataatttctaaatcttgcataaatgaagtttactcaatatttgtgttatcttaactaatgaattcaccctagattaatattactcatattttatttgtataatttatttgaatttttaattaggattaattcttatcccatcgcatttaaattcaattgatccaaatatggtcgcgataatattttatttatttctatccacacctaatctttattttaaattatatttattttaccaatttatttttagggtttattcctaattaactattctttactcacgattaatgaacttcgaaatcaaatccaaataaaataagcgaataagatcggcatgatgcaatcaatttaaaaagtttttgaaaatccatatttttagagtttagctttttgtcggtcgaattttcatggtgttacagtggagtagaaaaatacttcttcaacccttcaaacccctttaatagttcgattattttaaccttataatcggctctcatgtttttgtttacaaaagtcggccttggcttagttccatcacctatgtttacttcttccaatggattggccgatgtaaatccttgaccaagcttttttacctcatcaaaatcttcaatagtttcaccaatatcgttctttgtagaccgatattcttgcaccctcttttgcaaccactctaaattatcttctctactcattacataaagtgatatgacctagccgtgctaaacctgccggctttacggagatgggtacaaatttgccattggagatactaaaaaagtcatagctagaaagatccatccctgataagcattgaatattccaatgacgccactcaaatattgcatcggccattgcaacctcggtcgatgtatccgcttgaacaatttcaacatcatcgccgtcccattgaattaaacattgatgcaaggtagaaggcacacaacaattggcatggatccaacaacgacccaaaataacattgtaggaaccttgcacatcgacgatgaagaaagtggttggtagcgtcttgtttcccatggtaagctccaccgaaaagatacccttcgcctccgttggttcaccattgaagccattgagaatcatgttggtcttcttcaactcatcatctccacgccccaacctcttgaacaacgagtatggcatcaaattcacggcggcacctcgatccacgagcatcctagagaccggcttcccatcaatatgacctttgagataaagaggtttcatatgacggtttgattcatcgggcttctcaaaaactgcatttttaggacctagtgaaaattgagcaacttcgtctttatccatagcacaaaactccataggcaacatacataccatgttgacatccatctcctcctttggagatgactcatctttagcaaccaattattcttctttctcctctacagcaatcgattcttcaatgtctatggacttacacctccacatcttcgtaggtggtggtcgcaactcattgaaccttgtatccctttgctcttcggcctctctttccctcaattcttgggcccaaagacgttgcaacctcctcttttgagtagccgtttgttgatgtgaaaaacacgaggcctgggggatctgcttaactccagtgcaggtccaaaagcttgcctttatgtgtgtgagcgtgccagttgatttgatcctataaccaacaagaaataaagacaaagaaaacgcggttaaatccacaaatgatagccgattggctagctgtcgatgacgtatcatttatctttgggccgatgtcacatatagatcgatcggcagtcatgaataagtaagaaagaactaaatctactcgatcggctgtagatattaacaatatataaaccttatgtcgatatatagttaaatcaagtgattgggatagatcggtcgccatgccgagacagtataaatcacttagatcgaaatatatattaacaacaaaactatatatgttcatagcatagccgatcagatagatctagcatgtatcggctaatactccgataccactctatattaagatattaaagcaagcagaatatatcaaacaaaagcctaatatacttaaatgcaacaagatcataacataaagagcggatttaacatgtcaatcaagcatataagacataaagtagttaaatcaggtaagattggctgaaaccccgatactaccctagtcggcaaccagaaagtaggctagagattgagattctaatcacgacttataaggtcaaactcaattgatacagctataagtatgaaaagaaggacaatatccatacaatcaagccgctggttgtttcatagagtggtggatatcctatataatctaagccaacattggtatttaacctaatcggctgccttctaatgatagatgttagccgattggaggctatataacaatattgtcaaagattatataggatatatgataactcgacaagttacacaaacaagattagagtatcataaagatggaagcactaatcccgagaacgcaagccgccataacaagttttacctctagtagaagatcgaaaccgatgcagctcaactcgaaagcaagaaatcatcgaaacaaaatgaaagtaaaagggtggcgatgcgtcgagatagtactgaacgtgtcttgttgtattccatggggctcggggtctatttatacacgagattacaaaatatgttcgtgtcggacacgactcttatctctaacaaactctaagataccataagtctttgcgacagacttttgcccaaatatatctataaagaaattacataaaatatcctaattaacagatacaattgccttcttaggactcaatccgtgcatggcaatcctcatgaagcacattaactcaacccgacaacgtgtatcgcaccatattgtcggtatcggctcaatcgaccaaccttgtccgactcgaactctgccgatcctgctcgtagccgattcttgctctgtttccggaacaacttctttcttggattccgcttcgattcatctccatctccgattcttcgattaccaaatttcgttgttaacaccgttaaatccttaggcatccaccttggtttcggctctgttccaggaagtaaataatggcccctgttgagtctactcgaagatgacgaaacacccgcactacttcttgcaaatctcttgtcgaaccggcgctagagcccaatcagaccggacttagaccaccggtcagactggccagaagcgccggtcagaccgacattggatcggcggtcagaccggcctgatggcccagtcggaccggcagtagagcggcggtcagaccggccagaaggcctagtcagaccgactgactgcgatgagctagtcccggcttcggatttgttgctcgaggactctccaacttcgtttctagaagatactggcacatcatgagaacccactttggtggtaatcacctccaaagtcctcgcctccaccttaacacgctttccttccctcttttctttattgactcgatttttagcataaaaccggctattgtttggtgaagactaatgttcacgagctggcctcctaggtcctccccatccttggttgaattgcattggaggcatatgattgaacatggcggtgttgccccccatggcatgtagtaaggaaaaggataacccggcggcggcattggataaggcccccatgacatgtcttgagaacgatgatatgtaggtgattgcgaccgtcttggtgtcgaaacaagatttcggcaatacaaaaagggggtggctatcaagcaggaaaagtggatgggtttggaggcaatgaattttatacaggttcatgtcctctcaatgagaagtaataccctactcctatccgggtattgatccgccgagtgtgttattgatcgtatgatctgggagaaaagttatgccccaaaaggcacccggacccttccttatattgtgggaggagtctgtattacaagatacagcccatattcctaacggaataggcaaataaagataaaatacaatcgtaaccgactaggaccccgggtatttcctcgatacacaagttaggaatttaacccaagtcccttaaagatattttatccgcatatggtatccctattcccagtcagatacacaagccgtgtgggtatggggtatccataatctccacagtagcccctgagacctttacagtcgacgaaataatcttctctttgagtcttcaacatgatgatcccgagtgcttcaattattcctgccttggtgtcccgagtgcttgaatcaaagactgtgaagggctaaaaaataaaaagttaggtgcatcgactagatgcacctaattagatgtagctcccgactatgtgattagttgaataaaactaaacatatagtcaaggtacattaaaacatccatccgagtggttttatgaataaattaccgaagtaatcatatagctaagcatatgcgacctttaattaaacattaagcctactgctttagcttgattattatacccaaaaggtatataaaggtccaagtaaaaacactctaaagatctgtcaatcaatatatgcgataaaaaattcgagtaaaaactcttaaaggatttataaaatgtcgcataaatgataaatgacaagtctagatagtctaatctatgacttatgccattatcgaattaagcatataacaagccaagagaatgacaattttaaattggtcatctcaatataatccgaacagctttgcagcctaaaaagggcagcaaaattagtatgacacttttctgctgggcacctttttatttgcattgtagcaattccaaagaattatctaactgcttcaaaaagtattttaacggtatttggctattttgttgtgagcattatttgccaaagcaaaaaatatgcctaagtccctaaggatcacaaacaaccacaccgaaagtgaagttgggctgaaaatactgttaaggcccaggccgataagtatttcccgataccctagcgaaataatcgcaaaaatataacgccgcttcgtcttcctcattgcgatctccttcgttttccccatttttcgctacagtgccaaagctgcgccagcgaaagctagggttcgcaaacacacaccaatccacctcttccgaagcttcatgcctctgcgaaaaatcctccgcacaaccacttcatcaatctcccctccaatctccgccacccttgctcccaatttcatcatccatctcgcatccatggcagaggagagagaaagctttgagagtcaatgggccccctccaatgtcacggaggaaaacttgaaggaaatggtggtgcacggcgttctcccggcaaaagaaatcatcggatggcgtccagcgtacggcgaagccttcccgacccccaacactcatgaggtcgtcgtatggtggttttgtccttccaacttcgaagttctttagggggattctagaattttatggaattagtttgcatcatcttaaccccaactccattgtacatattgcaaactttgttcacgcatgtgaagccttcctggggaataaggcgcattttgccctattttgtcgcatcttctttttgaaaccccagccaaacaaaaacaagctatgtgtcatatccaaaatcctaaaccagcgcttcccgagtactcttgtcttcccccaaaatatcaggaaacatggaactcacttccaatgggagatgaaaccgctcaagccctcaccttgttaaatcgtatcatgaagctcaaggagcaaggtctgcaaggggaacagatcactcggcactttatcaaaagctgactggcacccatcaaggagaggtctcgtactgccttcgagtttgatggaaaaaatgatcccaatcgtgaagatcccgaatccctcgaattcaaaattatgaaggagagaatgtacaagattctcatctgccatagtggtcagttattcacatatactaccagtggtgccatattacgcattcaaccctcctcctccagtgagtattgaaaactctttaatctccttgcgatatctgctcttctttgtaatgttcttgactaagggtttgaaatgtcatcctcaggaatttgctttgatgaagtctgatccatcgactgctcaacgtcgttctcctcgccatcattccagtcaaacctctggaggtccaaaaattcaacatgtcgcacaaacgagtagcccaaagccgactgatcagacgggccccagaaaaaggaagctggtcttgagtgacaatgatggtgatgataccgaaaaagccagcaacaaagagatgactggaaaacagcctaaataggctaatccgccaaagaagaaaacattcagccgtccaatacccaaaatcagaaagtaaatccatacagcaaatgtaagtatcatgtctatagtttcacttatccaatcggcaaatccactgagatgctcaagtatgtaatgtagagaatccatcttcaaaatgaagcgaaaaccgcaaccatcgagaagctagttccccatcttagtactctggatgaaaccagggaactagctaggaaaacataacatgatctcagggaacgggttgctgagcttcaaaactccaatttcgaattgagtgggtcttcaaaaggtaactttactcctactcgacccattctgacttgatgttgtgtttaaataatcattgagtatatgatagtccaagctgccaagattgccgaattgaagaagcgaattgaaaccctcgagaaagacaaaggcagtcttattaaagagagggaatcggccatcaaagatgttgaaggtaattgtaatagaaatccaagataagcttgctgatgcctcctagtcctgatctgaatataactgttcatgtagatcgcaagatcaaatctcaagctcaattcgacatcttggtgaataaaattaagaatcttgaaggggctagagatgaagtcgccaaagctactatgcacttaatccaagccatgttctataataacaacggtccgagtacaattgatttagttgaggtcttcgacaaattgcgagctgctccggacacgtgctttaaaaatatcaaggaggctggaagcatgggagcaagcatggcgttggcgatgactaaatccttgtatccgaaaatcgacattgatgccattgatggctttgcagaagaaacaagtgaagaggatgccctttgatctcatcaatgatgcctagaaggacgccgacaagattgcgctgatattgttgagagatttcaagataacaatcttggtccgactgggtttcatgattccgatgatgaaaaaactgagtctgaccgaactttgtaattcaaacgatgtagtctttgatgatggagcctcaatttgtacaatactgatatatttatgctgtgcttgataatttaaattcggtctctgatttcttaaaagtttttgtcaaaccttattgagcctaaaacccgaaatgttatcaaaaaactctcagtcctcattaaccaagctaaaaaatcaaacaaggcaatgataaatcaagtaaacaaattgaattgataaaaatcacactccattattattatgatagcccccgactgataaatcaagaagaaacttgatgttggcagtcaaagaggaaaatagtgtacaaaggtaatgcctaagcataaaacgacgaagatgctcgatattccaagagttttcgacgaccgaaccatcttcatgcttgagtcgataagaacctggccgagtaacttccgagatgataaatggtccttcccataagggagataacttatgcctatctcgcgtagattgaatcctcctcaaaaccatatttccgactaaaaatgcgcgtgatctgacattgcttgtaaatatcgagccgactgaattaatgctgcttcttgggcttcttccaatcggttgaggtcatctactcggtcgtcttcatagtgctcctctttgaaattgcgaaatcgtaaggattcaaactcaacttcacttgacaacattgcttttgctccataaactaagaaaaacggcgattggcccatagcccgactgggtgtagtgcgaagagaccaaagtactgatggtagctaatcaacccatttgccggcataagggcgcagtcggtcaaaaacccgtgctttgatgccttgaactaccataccattggcgcattcgacctgtctattggtcatagaatgtgctacagaagcataacaaatcttgataccaaagtcttcacagaagtctttaaacacatcactagtgaattgggtaccatctataatgatacgattaggtaccccaaaccggtgcacgatgttgatgaaaaaatctcgagctttgtcggtagtgattgtgacgactggtttagcttcgatccacttggaaaatttgtccacagctacaaaaagatgagtgaaaccaccagtagcccttttgaaaggaccaaccatatcaagcccccacaccgcgaacggccaggaaagagggatagtttacaactcctgagttggtaagtgaatctgtatgggaaagaattgacaaccttctcatgttcgcagaactctctcggcatcggatactgcagtgggccagaaaaaatcctgtcgataagccttgccaaccattgttcgtgcggcagcgtgatttccgcaaatgccagagtgaatgtcctgtagcaattgtcttccttcttgcaaagaaacacaacattgcagaattcctgagggacttttcttgtacaactcagcctcgatcatgacataaagcttgctgcttcgagaaatccgctcagcctcgtcattgtcttgaggaagctcttgcttagtcaaaaatttgatgaagggctctctccaatcggtgtcaattacactgacttcttgagtacctgccgtctcgatcacatcctcccttggtactgtcggctcataaaggtgctcaacaaaaacatatgaaggggctacttctcgctttgaaccgaaattagctagtctgtcggccgcttcattgtcgtgcctaagcacatgagttaactctaagccatcaaatttgtcttccaatttaagtacttcctgtcgttatgcagccatattatcatcaaggcaggaccactctttcataacttgattgacaaccaattgggaatcaccgcggaccactagacgccgaatccctagagatactgcaatcctcagtccatgaagaagtgcttcatattccgccacattgtgtgacgcagaaaagtgtatccacagcacataactcaatctttctccagtcggggaaatcaaaacgacccctgctccagtacctgaaagcctcttcgacccgtcaaaatgaatagtccaatactccagcttctccacaggtgtgtcttcttggcactcggtccactcggcgacaaaatctgctaaagcttgggacttaattgaagtacgcggcttgaaggataaatccaaagacatcaattccagggcccatttcacaattctctcatttgcctcgcgattgtgaagtatatctccgagaggaaatgatgtgaccattgtgaccgagtgactttgaaaataatgggataatttcctgacggtaattaaaacaccatataacaacttctgtacctaaggatatcttggtttggagtcggccaatacctcgctaacaaagtaaattggtctttgaactttttgaacatggccatcctcctctcgctcaacaaccagaactgtactcatgatttgcgatgtcgccgacacatttaacaatagcggctcttatggatttggtgaggccaggaccggaagagttgtgagaagtttcttgaaatcatcaaaggcttgctggacttcaggtccccactagaaattgtcagtcttcttgagtaacttgacaaagggcatccctcgctcaccgagtcgtgaaataaaccggctgagcgccgccatacatccagtcaatttctaaacatctttctaggaactaggcggtttcatgttaaggatggcatttattttttctgggttggcttgtatgcccctacgagacaccataaagccaagcagcttccctgacggtactccgaaggtgcatttttcaggattcaacttcatcctaaaagcacggatgctagcaaaggtttcttctagatcagcaattatgtcatccttctgcttggtcttgacgactacatcatcaacataggcttcaacattgcgaccaatttgagttgaaaaacatctctggatcatgcgttgataggttgctccatcattctttaatccgaagggcatggtgatatagaaataagctccaaacggtgtgataaatgaggtcttcaagcagtcgaattccttcaagttgatctggtgataacccgagtaacaatccaaaaaactgagtagctcgcagccggctgttgaatcaaccacctggtcaatgcgaggtaacccaaaaggatccttaggacatgatttgttgaggtcggtgtaatcaacacacatacggcactgtcctgtcttcttccaaaccaaaactgggtttgccagccagtcaggatgtaaaacttccttgatgaagcctgctgctaacaacttggttaattcctccttgattgcatatttcctatcttgcgcgaaatggcggagtcattgtttgatgggtttagcgtcttctttaacatttaaggagtgctcaattacctctcttggaataccaggcatatcagatggtttccacgcaaaaatatctttgttaccttgaagaaaggtgatgagcgcgctttcctattttcaatctaactcaccgcctattacagtagttttggagggatcagatagatcaaagggaatcttcttggtcttggcgtcgtcttctccggtgatgtgaccatggctaccatggatgcaaccattgctcacatcatggatgaacaagaagataccgagatcacgtcctccaagtgctggaatccgattcggccacctattacaccgccgactttaaacggcggccgaatctgcatacgacctccgttttcggcccgtgactacttgatggaaagctctcggagccctctttccaacggatccagcatcgtctctgaattccatctcgtgtggccagaatcacaggaacaaggtgttgcgtcacctattatgggcctgtgagcttgtaacttcatttgggaccctggcccaggtggggcctatgtggggtgcgccccaagctggtgcagcacgccactaggcacccctaggtcgtcctcccacccctatatatagctaggtaccccttcagggtttctcggggttttgtttagatgaaagtttagccattgctacttccttgcagcgcgtgtgtcgatcgctaaggcgcaacacaacgtctcgtacggatgtagtcggatcgtcaacgtgtctcccaagtcgtagttatcatcaactcaccgaaagatcggccaacaatagccttgagtgtcgagaggagctcaggattcatcaggtggtatcagagctttcgttgctcggtgagtttttatctacctataacctgaaaattgccatacaaaaaaaattgtatcctgtacctagccatatattgtgccattgcattgttcttttcagtttttgctttgttgagtttgtgttgcatcgtcgagtcgtgttgctggtcttagcgtttagtctgtttagagtttcgagttctggtcacatttagtaccactgtcgtcaccatcatcgtgtctttgttgtcgtcgggacctacgaaaacactgccacggttcaatttttgtagttttcagaagtttctgtcggttagtttagcagttgcatcttggtctctgtggtctggtttgccttgtgccgtggtcgattgcgctcttgcgcctgagttggatggaaggaggctgttgcgcgtgagttggatggaaagagattaaattggtttttgttgtgcttggaaagaaaatagtagattggatcagtttccttttttcctctcagcaaatctggacgtgtgcagtatccttccgctaccgcccaccaccacgctgagtcgactccctccatctactctcggttccacctataccgtgagttgctagagagcttggtaaaaaatttttgagtgttggattcgacatctgtttgcaaaaacagaacctatgggacgagcgcattccatttttgtatagtccaaatttttgggtttgcacttttgcatttgagtccctgtaatttgtatatttacagttgagtccttgtaatcttgcattaaggtccttgagttggcttttgctgaaaaaaaaattaaaaaaaaagaaaaaaaaggcagaaaggtgctaaaaagaaagaaaacaaaagccgcaccaacaaaaaaaaaagaaaagaaagaaagaaaaagatagaaaaaaaaagaaagaaaagagaaaaatcagttgtatctttgagtttgctttcacatatcagagcgtgcttgagttgtttctagtactatcttgtggtatcgtttgtgtctaggctcgcgtctctcgtacgttctagcctaggaccagcacggtacttaactttaaacaatgatcttcgataacttcgttgcaggcacttcttcggttgcggttgatgtggccagtcggatctcgtcccgagcgagtgtaatctcacatgtctgagccatctcacagctttctttgtcgcaggtgatagcttgcttgatgttgctccgcaaagatatgactcctctaggtcctggcatcttcatgatcatgtaggtgtagtgtgggactaccatgaatttggctaacgccaggcgcccaagtatagcgtgatacaccgtctcaaaatcagcaacatcgaagcaaatattctctgtgcgaaagttctcctgagtgccgaaggtgacgagcagagtgatctggccgagtggagtagaggacaaccctggatgactccatgaaagggtgtgctactcgtcttcagctcagtacgagggatctacatatcgtccagagtcttggcaaaaaggatattgagtacactgccaccatcaatgagggatcgtcggagcttgaagttgtgaaccactgggtccagtaccagggggtaccaccccgggtggaccactcgattaggatgatccgagtggtcgaacttgattgttgtctctgaccaccgaagatattgaggcgtgtcgggctggacggcgttgatctccctatcaatcagcttttgcttccgttttgactcataagcttggggcccaccaaagatatggttgagctctttgcgagaatcttgaaaaccagtcggtccatcgtctttatcatctttcttctttgaggtgctctgatctccatctatagccttcttcgcttgcttggcgtatttctccgcaaactgcttgtagatgaatcaatctttgggaggcttgtgtctaaatttgccgactaagagttcatgacagacacccttggtgaaagcggctatgatgacgtcatcggtgatgtcagaaatctagttgcgttgctcagaaaaacgtcgaatgtagtcccgaagggattcaccgggcttctggatcacattgtagaggtcgaagtgggtgccgggacgttcaaaggtgccttgaaaattggtgatgaagtgctcatgaagctctgcccaagatccaatcgtgccacggggtaacccataaagccaggaccgagcagaatctactagatctaatggcaagtaatttgccatagccttgctatctcctcccgctgcgtggattgcgaggccatagacggtgagccatgactcgccatttgttttgccgtcatacttctcgataccagtcagcttgaaactagccgaccaatccactcgacacaggtcacttgtaaaggatgcgactccatcttcatcgtcgtcgtagcgatttggtgaacggtatggttggtagcctctttctgcaaggtgtcggttgagtgtttcgcgaagatcgacgggttgccgacgacgtggagagcgaggctgttcaacacagcgttctctgtatctatcagcaggcgagtgaacagaacgttcggcataatccctgctcctgtgattagatcctgaagcagtcatgctaaggcttggttggtgataatcttgagatcggagaggcggaacctggctgccagtcggcgtgcaaacgcttgctaagttgactgggtccgaggcggcgatcatggtcttcatctggttgataatgttgaggacgtggttgggcgcatcttcctggagcagagtatcccagagagtgattgctgctattgcattctgctgtggggtgagaaaaaacgctgtcccttcgacgtcctgctgtccaatgagttctcgtgctcgtcgcccggcttccggtgtgcgttgtcatcgatcttcagcctctttcgcggcccgctcgtgttgctgctgctcacactgcagccggtctcactcttgcacttgtcgctcttcttccaatcaacgccgctcggcttcttgtcgtgtacgttgttcttctgcttcatggagttgacgctgttctgttgtctcattatcggccatgaaaacaccgaaaaagagaggcgtgtaattatcttcatagccatcatcgaaatcgtcgaggttgctaaagtcgtagttgtacctgaagtcatcgtagtcaaggatctctgttggctgtgaatcaacgcctggagagctgaggtagctatccaactcttctgttgaaaccgtcccgaggggctgaagtatgacgccgacttccctgaagcaagattgcatcgaggccgaggccaggtcccatctagacctatgagaagaagatgcctttgtggtgaaaacaacagccaaatcgtcagggagcttcatcaggatcggtggatagccgcatcgtcttgatttggtcgtgtcgaagtagatgagatctcgtccgagtggtttgaggctaactcggataagatagtcttgcggtagatctcgaccgagttcgggagaccgaacgggctcttcccaactattttgaatccgagtcgaggagagaaatcttgccgaagtcatcggtgatgaagttgaggctgccgaaccggtatgcctgaccgggagggaaggcaaagtcatcgatgctagaaacgaatcccatcgcactgatcggcgaaaagcttgatgcaacccctgcctggcgcgccaactgttgaaacaagatttcggcaatacaaaaaggggtggctatcaagcaggaaaagtggatgggtttggaggcaaggaattttatacaggttcaggccctctcaatgagaagtaataccctactcctgtcaggggattgatccgccgagtatgttattgatcgtatgatctgggagaaaagttatgccccaacaggcacccggacccctccttatatagtgggaggagtccgtattacaagatatagcccatattcctaacggaataggcaaataaagataaaatacaatcgtaaccgactaggaccctgggtatttccttgataaacaagttaggaatttaacccgagtcccttaaagatattctatccgaatatggtacccctattcccagtcggatatacatgccgtgtgggtatggggtatccacaatctccacacttggtgaatgaccaaatcgctccccaggaggcgatcttggtctttttcctttgttgcgagccttctcaccactttgcttctcatacttatccaaaagcatatcgaaggtcaccttagtcttactaggagctttagaacttgaagcttcactccgattctccttccacacaccaacctccggattctttggcaccatcatctttggcctaggttctccaatgaccactcctttccccttagtagattcggcttgctccagccgaatcaacaccttcttatcatcaaaattaattgtgttcaccggaaaaagaataatgattaagcttcatcttggaaccatcggtaaatttcaatcgtccttcatctatggccgattgaacctgtcgtcgaaacacattgcaatcattagtagaatgagaatgagaatcatgccatttacaataagctcgacgcttcaattcttcttgagatggtatgacatggcctttaggtaatctaatttgtttttcatgcaaaagataatcaaagatcttatcacacttggccacatcaaaactatacttaagctcactttgccgatctttacgaggagtcggcattaaattagaacacacaataggcttatttttgttagtccatgaccactcggcaacatacatatcatgatcaccctcaccatcactatcactagcctcagggtaatcaatcaaattaacattagacttcttctcatatggtctaacaaatttctttttttttgaaagaaagcactgtaggggaagcccccacagtttaaattttataaaataaaaccaagatatttacaacagattaatccaatttacaagtatatctctctcaaacaaattaagcctatggactaaaagggagagttcattcttaaagaaagctctccaggaggcaatggaaggtacaacattattaaaaattaaaccattcctttgcttccaaatactccaagcggcatagagcaccttctccacaaagtgtatcaaagatccatctacttaatccaatttgtacaaccggggaaaaagtatatcaaagatccatctactccatgtttcagaatatgccctcgcactagataagcctaatcaataaacggacgagcagctgagataaaagcaatttggtcgttaacgacccatagcccttttgttatccgagtaatcagagaagtgcactcaacaggcgcagagaattttatactttctaaccattgccttatcatacatttcacaggagcaattttgataatcaattcatcccccctaatgggtctcagatcacttctaggaaacaaagtcatagcaatccatttgtgcatgagcctaagtgtaggattatggatatcattccttttaggtttcttgcaaattggagcaccagaaatgtcttcccaaaacctatttttctcgaacccagaaattcctttctggagatcgattttacaggaatcgtgaaaaccaagaagtgtacttaagcctttccatgtaagtgtgtactccttatggaaaaagtgaaaggaaatacaatcttctatttctttcaaagtgcacagaaattgcaaagtaagcaaacgagaaccaggctcatctaccacagcaaatctctgcacatagtaggcttgcctctcccgatcactgacaaggtcgaggtcggtgtccttcaagagttgtcgcggagcttcggcgtcttccatcgagacatcaactgatgaacgagtactagtctcttcatgatggcttggtgaagagctggaccccttgaatagacgagacaatcaccttctcattctgtacaatggagcaaggacggactaactcggcgggggttaggaatgacaagaattttacccgccggttagtttcaccaaagcaacttgtatatatgcaactaagtgtttgaatttgaaggaaactatcaaagcttgaatgaacttgagagcaaactttggagagggaatgaaaatgtgttgaaatggggtggaattccctctctcggccggctggcttttatagggtacccacaacggtcataaatgacatgtgggacccactagccgttgccctgccaaaagtggcaggtagccgttgccaggccggttcggccgaacccctggtgggcccaaccggccccacttttggccgttggattccaacggtcagtgtggttgtggcatagtgaattttcgttgaaaaatttattttggtttgctctaaaaaattcatttgaagaattttctcaaaattcaaaaatcctaaatgcaattttgaaattcaaacatgtggtgatgcaaaaattcaaaatgttgaaagcaaatatgcggatacataccaatttacctgttggcgaaggtcgcgtcatttaaagtccgacgtgcaagaccgtacctccttccttgctagttcgcggattttccacccgtctccggaggtgatggagtgggcgtctttggcttcttcctccacaccttccttgattttggtgcggacagcggcttcttctgagccgactgctctagcttcttggccggtattgaggattttatcggcgtctttcaataacggttcctgggcatcgttgtttccttctccaggaaattctgcatgaatttcaccaagctatccgttttgggtggctccacttcgaccacttgaatattctgcaggtttggcccgtacttgattctgaccatggagcactgttccgtccttggttgaaactcaaacttttcctccttcccgttgatatggaaacgaatacttcctgttcccacgtcaatgttggctctcgcggtgctaaagaacggatgccctaagatgagcggcgtctccttctccgtgtccatatctagcactacgaagtcaacaaggatgaagaaatcctgtatcttgactggcaaatcctccgctatccctgccaggtaacggactgacgaatcagccagttgaaggcgcatccgtctcagtgccaacaccgtgaagttgagcttgtcgaagacgtccttgggcatgacgctgacactggctcctaggtcgcacaaggcctgctcgaactgttgtgccccgatcgagcagttgatcgtagggcaccccagatcttcttctccgggagcttgtggagtattacgttgctgcattgctccgtcagcttgaccacctccgttgttgggagtggtctctcgnnnnnnnnnnnnnnnnnnnnnnnnnnnnnnnnntccatggggccg

SEQ ID NO: 7016 - DNA, 19822 bp, Oryza sativa
gccaagaaggttagaactgctttgtattgtttattcagcatttcgccatcagtagtcatatcatgactagtcgacttttgaaaatttgttagtcagaactgttgtgtgttgtttgttcaaaatttctttagtttgtattttgcaagtggacactattctcagatttgccagcagttaatccctgtggatttaataatgctgtcaaatagttttttatagaggcgcttttcaaggagtcacctagtaacattagatgttcttaatttgttgtatgggtccatcgtttcttatgatatacgcagtgccttcaagtgtggtgtagacgtgtagttactcttgggttatgtagaacagggtgtgtttgtttaccagaaatgacacaccaagtacatgactggagatgctatgaaacatattattaactttgatagaactgggaagtgcaatcttgccagttacagtaatcattgtctatctcacatggtttaaaagcatttctttcaagacatattatacatgtatatgtctaccagtgtaccacacaatatggaaacatggagaaaataggacattgtactataacatatctgataccttggttcaattttcattttggactcttgtaccatttaaaagatgtccacaaagtttcattactgttcaaaagacatccctggccgaaacaacccgatttttcatgagcagactgtttttctaattattattaaagttggtcaatgtggacactgactgtgggatggagagtgatgggtggcttaacagtatatggagttgagccaaattccatgaaagtaaattttattgaaaccactgtttgcaattgaaaactctgttgttttggcctgagagattcctttgaatggttttgcaagttaaggggtatgttttaaaaagtactacctccatcccagaatataagcatttttagagttggacacggttattaaggaagtaggtaaaagtgaatgatggagggctgtgattggttgagtagtggaggtaggtgggaaaagtgaatggtggagggttgtgattggttggaaaaagaatgttggtgaagaagttgttatattttgggacaaatgttgagggctaaaagttgttatattttgggacggagggagtatgaattaggatggaaattaaactgtgacaggaggtcagatacatagaatggattttctcaagcagacataacttataactaggttgctaagagcagactttgccttttggaaaaaaaactgaatattttgagttgctggtcaatttctttaaaattgggtgttttggctgccaaaatatattcaagaatatacctgagtgagatgttttttgtgttcagctctgtttgcataccagttcaaactgactcttatagttgtaaggtttattttggtcatttactttttctccttggtgctttcctttaggaagaaagcgatagagtgaaagccgaagttgctgctgctgcacaggcatctgcaatgctgtttgaacatacaagcttctctcccagtagtgggccacatggcgattttatgttctctctggatgactttgaaggtaaataaactcatttatgaacagacctgattttgcatattcagactttctattggggcaaaacacatacttgttagtgctcctaatccacattctgaagcattcacatgtttgcaattgtgcttttagttctctgcatgttgcatcctgtatggttggttgccctgcctcacttcatatgtgtgtatatattttccatttaagctcttggaaacaatgctggaccctccacgagtccaccagccagcgaaagaaagcttttctccgatgttgcacggcttggctttgcgtctgcccaagactcgcctcctataagagttgaatctggggatttgactggcaaaagtgaaagcacgggggaacaaggtatggtgacacacgatgcacctttggacgctggcacttaccagtgtgcggcagtgcccatttttcttctagtgaaatcctggcataactaaactgttttctatgcagggccagccgcaacacccgcattatcctttgccagcatcatttcctccactagagcgtcagacaatagcctggacacgcacaaaccaaatgtagtcgggaagaaaggcaagaaacccaccaaagtgctcttgtccactggcggtggccgccgatactgaaggaagagtgacactggaatggaagcagttgccagttggctgtttcctataagcagtgtgtatagtgcataacctggacttcacatctgtaacactcccaagtcccaagtagcagctttttctcccatgtggtttgatctaaatcgcctgactgttttagaaggtttttactgtgtatctacatcctgacccatgctaagggagtaagggtgactgccctgtcgcaaaatgagaagagctatgtaaaatttgataaataatgatgctaaggatcatgcgcaatactttgctcaatgtacgtcgacgagttgatccgtcataggctgatacagcctgctgtttaaatcgtgagatgctctgagtcatattttcaaaatcacggttacggggcatatatataaattataaaatacacaatatagaaggaaggaaaagcagaaatgcatggtttaatgcaataagtttcaaatgggatggaatgtcaaactttaagtaacttatgatgatatttatactaggagtattggcaatgtatggactaaatattgaaaaagtagcagaaattaatttctttgtttaaaaagcaacggaaatatgtgttcgatagggtaaagctaatgggcgatcgatcgctccaggtgatcgaccccatcccccctatatggctcctctccccttcttctcttcgtactacaccataaatctttttaaaaataaaaaaacagttagaaaaatttatgtatagaaatactatatatataaaaaatatttgaattcaaatttaaatttgaatcgggtattttgacttataaactttgggttaataaactttagatgtatagaaaataatatatataaaaattatttgaattcaaattcaaatttgaataggatatataaacttttgacttataaactttggctctctaaactttagatgtatagaaaatactatatataaaaaatatttgaattcaaatcaaatttgaatcggatgtataaacttttgacttataaactttgggtctctaaactttaggtgtatagaaatactatatatataaaaaatttgaattcaaattcaaatttgaatcgggtatataaatttttgacttataaactttagatatatagaaaatactatatataaaaaaaatttgaattgaaattcaaatttgaatcggataaataaacttttgacttataaactttgggtctctaaactttaggtgtataaactttagatgtgtaaacttgaggtgtataaattttagatgtataaatttactaaaaatagcaaagtaatacggtaccaaaaaagaaaaccacgttgaggaggagggggtgtcgccctgatcgcccttagcgatcaatcgcccattagcttttccatgttcgatatgcattcgagagtatcccgatacgcatttgtgtttgatacgatatctgatatggatatgcttgtttttagaagtatcgttttctctttttttctgtaataacaaattaaaatggttgtaaatttgtaattgctcttttattttttgaaaggcagcatccaatattggacatgactacacagcgctactacttcatctatgagaaatcctatccacctatacttcaaataaaaatttctcttaaactactcatccgatctacgatccgattacaccgtcgtgttcgtaattaaatctttgtagaaagatctcacatgattatattctgatgaaaaattgtaaattacatttataatatatcaaaattacttttagatttcactaaatcacttcttagatatatttttttagataatggaataaatatcccggcctttactcaaaagagctacagccaattattacatagacatataaaagtaaatttaataaagcctaaaagtaatttatatatattatagaagtaacttataataaaaagaaagtaactttaatatatgctttttttttcataggacgtgactacacaactagtggcagccgctccatctaatgtcttcttttaacttgaaaaatacaatagtgtgagtcttttttaacttcttcagattcgtgtactctagttgatgcctggactatgcacagatagccgggattcgggttgtcgaatctctgggcgtgacaagttggtatcagagccgatcttgaccgtaggacaaaccaaacggaaagcccatagagccctatgaaattctcttattcccctggaaatctcttcttccctccttttcaagtggtccagtgagtccaaataaatgagtttgttttcaagtttctgaatttcatcaaaaaaatatttttctttgtgccttttgattttttttaaaaaaaatgttttcggcatttcaaaaagaaaaataatattttcggaaaaaaattcttggcaaaaaaaaggaaaaggttttggcagaaaaaaagggaagggtttcggtttaaaaagaaagggagagtttcgtttttaaaaaaaaaattgggccaaaaatagtattttttaaaaaaatatttatattgcttcagtatttttgatttcagtttagtgccttttctttctttttgtttccagttttaatgccagcatctcgtttctgatcggagtcagttttgttccttctatcttttctttagatggccgattctccctgtactcaccatggtgaaggcatggaaggatttgttgcggagcttgcaaatatgacatttgttgccggttacattgaagctccatagtacacagttattgagcccctcaatggagagttgccatatagagttcgcttggaagttcgtggtattttgggcactcttctgattaatacggtggttgagacttctgaggaacagcagagcatgcttgcctggaagccacttatttggtggtggcggcggccggcgggcggtggggaggaggcgtgacggtggctgatctgacgaggacaacggcgacgacgaggacgacggctgcggcggctttgaggttagggaggaggcgtggcgatggcggatctgacgaggacgatggtgatggcgacaaggttagggttcggtttttttttatttttttttggttttttatttttgcgtgcgggcgatataagcacccgcacgcgaaaatcagattttcgcatgagggtgcgccacccgcacgcaaaaaatagcgattttcgcagacaactgggtgcgtgcggttcgcccactcgcacgtgaaaacccttttccaccgcacgaaaaaatccttttcgtagttgtgatttgtttacatgaataggtatgtgaattattggctagcaaaggattgtcgaggtccttttactattattttttcaaatggaaaattgtgctaagatagtctttcaccaatggacctggcactgatttggttttttgacaagttatcttgcccatgtgatagagttttacgttaacttaattaagataactaacccacaggagtccactctatcccaagcctaccatttagttgttgtccttcgaagaatttcgttcttagattatacacacacgtttactgtggatatgatacactgaaatactcttgggtgaaggctacaacggtatttgtgcgcttatagattattccgtggtcataataaataccaacagtgaggcgcggcggcggcggatacaacggtggggaggggcagcggctgccctaccccgcgcggcggcagtggggaggcacagtggcggtggatctggctctggctccggcgacgggagcgggcggacccagccgccgctaggcccctatgcccccacaacgacgacgaggagggcaggttaggtttcgccatttttgggttttaatttttttggatttttatttttgcgagcgggcgacataagcacccgcacgtaaaaagtcggattttcgcgtgaacgattttcacagaccatttggtgcatgtggatcgccctgccatccgtgaaaattgggattggaccgtatggaaaaacctgttatgtagcggtgataaatgaaagttgttgcacaatttttttgtaataatgaaaacttattaataaattatgagttaataatgacttttcgtgtttttttacggggtccttttcgtgttttctgtgcactaactttatcttccttccatagaaacaaacactgccttagtcgattctatcgaaatatacggaggtagtacgtacgtactccctccatcccaaaatatttgacaccgttgacttttttaaatatgtttgaccgtttattttatttaaaaaaatcaagtaattattaattcttttcctatcatttgatttattgttaaatatacttttatgtatacatatagttttacatatttcacaaaagtttttgaataagacgaatggtcaaacatatttaaaaaaatcaatgacgtcaaacatttagggaaggaggtagtacgtgggaggaggaaaacgtcgatcccatgcacaaccgtgtggggagggtcgcatttgcccgtccacttgaatcaacagggcccaaaaaaatcgaccgatctccgctaccaccactaccactactagtagcagggttggtccgagatcgatgcagcatatctgttccagagacagctacggccctacaaaacaatctccccctttccggagttccatcaatcatcatcatggtcgtcgtcgtcattgggcgtgagagaaaccaccagagatcagcaaagcgagcaagcaacaacggccatgtcccatgttacccacgtaggagtactaccacgcatctgcattggaatctagcagagcgtacaccgcaacaacgagaacgagaacaaattaagctatatgctagatcaaaaaaaggaggaggaggaaagagatacatacatcgatccagtacgtgatgatgatgcaagatagacagatagatagatagatagatagatgcacgaacacgagctaggcgcagccatccaaaagattttcgcggtacaccacgcgtgcgtgcatgcatggacaagcgtgcaagcaaccaagcgaaacgaagcaacgcaagcgcgtgcatgcatgccggagaggagaggacagagacaagctacatggtaataagagattctccatgctcctttctttctaaaataaacgaacataatacgtagtgtgacatcatcgatcccttcacatattgatcatcatataatactaaaaaatttaaattgatcattatataaccagtgccctttggtttgacgtgcaacagtattgtatttaggagaaagtctaaattacacctctaaactattaggtgagtacgaattacacctagatccgaaaaccagacattttttaccctcaactattaatatcaagtgaagaactctcctaacttaatctagagtggttttggtcctacatgacagtctaggtagcattttttaagaaatcggtgggatccatctgttagagaggggtgaaacggagagaatctgataggtggattccgcatattgtttttaaataaaatgctgacttgactaccaactaagatcataaccactccggattaagttagaggttcttcatccgatattaataattgagcatgaaagatgtctgatttcagatcttgggataattcatactcacccaatgttaagtgatgcgatttatgcatgcatgcaaattaagcatgcatgtatgcatgcacgcatttagaggttgttaagctttcattttttccatcacaacttaattacattaaataaaatatgtgatatcgagtagtgaacatgtgagacaatctcacatatctagtcaacttcagcctgatatgtgcctgtcaaattatatgaaggcgacgaccagatgtgttacacattcagaagacttaacaaattttgctaaaactctctacaacgtttcaaatgttctcaactcacattggttttcatgaaaaaacttatatatatgatgatcaatatagaataaaaaaaagtattaactcgcatgcgtcccagctcgatccatccatctcgtctgatgttgcaacagtggtgtacatgcatgcatgctagtaggtcaaagacatcagaggccactgaccgtgcttgctctcaggctctcagcttcttcttcctccacacacacacacacacacactctctctctctctctctacacagttacactgtacataacactgcatgttttctataattttattgccacattttgctgctaagctaatgccattttccaagagacaaattcagctagttgtgatggagtttttgaaatggtcaggttgattcaaggaaggagagagagaaagagagaggaggagggagggacaaggggggaacctttcctcggtttggcagaagaggaatctgcgcaggagatggtggcccaagagccgggccgggccagtggtttggtttgagctccgctagctgcatcagccagcagggacaacatgcaacaccaaaacacaccatacgagagagagcgatatgtagagagagagagagagagagtggccatggtagtaggttgatgttacctttccccctagcatcattcatcgatccccccctctctctcccccttggctgcagcagaaagctttcatcatttgcacctttcaaccccttcatgcttatacttttcttcctttggtcgtacaccacattatcacagttttccttcttcttttatcttaaacaaaaagaagatcaaggctggttcattcattaaaaaaatattattgtcttctatagcatcctcaatgcaacattgataaggaacacacaattacttatatagactcggtatacacatgtgaaacaggttccataggccttcggactatcgtagcatagaataccattcatgaataccaggaagctaggcatggttaattaaaactttcaccttgatcgctctcgacctctcgttgttttggaagcatatctcattattacagtatcattacttcactaaaaaggaagcggacaagccgtcaattactcatagcctaatacgcatacttacacgccagtgaatccagcgcacgaaaacaaaacctctctcacggcccccagatttacataggcgccggaaaaaccatcggcgcatatcacgacgctcccacccccacccgccagcaccatatcagccgtaggaagtgcaccagaaaccacccgataccttgggcaagcatacaagacgtaggaagtgaaccagaaaccgcccgataccctgggcaggcatcggcgtccgtccgttaatcccagcgcatactatgttggcacacagttggcactcgtccagacagactgttcctccaattccctccaccccctcctaaaccaaaccaaagaaccctataaaccaaaaccaaaaccaaaaaaccaccccaaaaacacccaagattggcagcagcaggagcaacaatggcagtatatataacagtggctccaaccaggcaccaccaccacctccacctccaccactgtagcctcacgcgtcatacgctgcctacgctacccccggggggccacgcgcaccaccaccaccaccgcggcatcggcagccgctgcggcagcaacagcaaaagcaaattcctttctcctcctccttctcctcctcctcctcctcctcctccttcttcttcttcttcttcttcttcctcgccgtccgtttggttcttgttggagagggggaggggtgggggggtggggtgttggtggtggtagtggacttgacgactgccccgaacatcgagatgatcgcctcgtcgctgcgcaactgctccctcaacggcgggggaggaggaggaggagggcggcgcagggggaggcgcgcggcggcgacggaggggagcgacgacagcgagggggtcaccgtcgagctcaactccgaggtcgccctgccctaccactgggagcagtgcctcgacatccgggtacgtctactactactcgcccatctcttcttccacacatgcatccatacatgcatacgccgcgtttccttttcttccccgatcgattcttccgacgtcggcgacggtggccgccggcgccccgccctttgtccaatcatttggagacataaatggatagcagtttccgaggtaggtgggtgtggtttggtttgggctcgattgggatcaatcatttgatcattaatggcgaaagcgggcgctcgaactggagagagagacgagacgagacgacccgtccgcgctgattttttttttcttcttcctcctcttctctttctgctcctcgtctcccttctctcttcttgttcttgttcttggatccttgcttcatctgcgattcctctcttcgtctatgcaaatattttttttatttatctctgttttttttcttcggttcttatcttcgtttggttggggattcgatcatcttcagagagattcaggccgttctttttaacacagggatgacaaaagttcagaaaagaaacctcggaaaagatggtactatttttttctttttttttgttgatgatatcaaggctcttcaaatctccacaccttctctggtctctgatctaagcgcgcattcagatctgtgttgcattctaaatttctgacacatccctgtagatccattcctttttgctctgtctctatctgaaactctagatttcgctatagatttcttctggaccacaatgctctgtttttttggtcctgggttctaatctaatcgcagagctttgttaaacaccagatgattctcacctctgggaaatcttcagttccattgtgacaaagtgtctccctttctttttcatccctgctagtactttgaacagacgaatgaatgcctaccccaatgaagattcatgcgtattaatcaccaaaatggagtgttcatctccaccttgtctccagcaacagagtagacaaaaatgctcttcttatggttatttcagtagccttttctgaagatactactgcaatacatttatgtgctttttaagtagaacagctttcctgcagattagagtttttttttttttacaaaggatgaaatgagaatttggtggtggtgttcttcattgccaaccttgccctgtgatttgcaaacaaacaagaggacaaagagagcagcattcattacaccatttgatccagattttttttctttcccctgttctgctgtactttgttatgggcatcagttattaataggttctcaaccttgtttcacggaagcaactgaatgccaccgcattaattgttcttgcagactgtcaccaaaatgtacttgtagattttccccacccaaacttctccatgcatcatgcacatttactcaccacattcttgaaacagcatttcgccatttgcaagattaacttaatctgtaccactagctgtctagttcaagcgcatttcctttattgttattatttttagatgaattttgatgtgtagttcatgacttcatgtgaatttgtgtgaaatgtgctttgtgattggctttgctgatgcagacggggcaagtttactacatcaactgggaggacggcacccggacgaccatcgatccgcgctcgtcgtcggcgtactcgccgtcgccggcgtcgcggtccgcgtcgtcctcctcccgccgctgctcgcgcgcgcggggccgcggcggcggaggcggcgccgccgccgcggcgtcgaccaccacgtcgtcggggtacacctccgtgtcgtccgtgggcgcggtcaccgcggcggcggcggcgtggcgctcgcacgacagcagcgggcacggctacggctacggctacggctacggcagctatggctacggctacggctacgacggccgcgacggcgacgacgaggagagcagcagcagcagtagcagcagcagcagcagcagcagcagcgccagcagcagccggggctccgccgtgtcgtccacgctctcgtcgttctcccccaccgacgagtcggcctccggcgccggcagcggctacgccgtcggcgacaacggcgcccacgtcctcgtcaccgccggctgccgggcttgcttcatgtacttcatggtgaggaagaccgccgacgtgtgccccaagtgcggcagctccggcctcctccacctcagccgcaacggctacgtgtgagcctccgccgccgccgccgtcgcccgcgccgccgctcgccgccgccgagttccgcaattcactaattgtaggggggccttctcgcaattgtgcatgctctgttagagagaacttccaaagggaaaaaaaatattgagagagagagagagaagagtttttggcgagaaggtccccaagtttcgccattattacctacattgcactccaatgtatgggaggagacccatctctagaattcttgttttccttccattgtttcttggttgtctcctctcttttttttttctttttcttttttctttttctgttccagtttgtgagactaaccccctttttcccccttcacatttccctttaccttttcaaggatgaacatttgtaaccctgatttccattcttgagctagctggagctggggtcatgcaacaactagttactaattagtgcattaaaaccatctgcaggttcttgtctggattagcagctgttgagtatagagcttgctttggaagttggcagggtgtgatgtgggtgccaagtaaagtgccaactgcatactgctggctggctggagctgtggctcgtggctttgattttggtagagagcatatattgatgatgcatcatggtgtgtgatctactactacttctatgtgatgtgctgctgccctgtttgcttctgcttgtgtgatattcttctggtgtgtgccttggaagcaagtgcatgtgtgtgtgtatatatgaattatatatatatatatatatatatatatatatatgtgtgtgtgtgtgtgtgtgtgtgtgtgtgtgtgtgtgtgtgtacacaaaccgtggtctatgctggctggcctgacgctggttttgttgtttagcatcctccttccccattgtgcccatccgtattctgacgcctgcacctgtcatgcatgttcccacaagaacaaaagagaaaaagaaaagaaagaaagaagaaatccttgtgaagaggttaaaggggataagggagagagagatttggtagttggattcttgttcttccaagagagaattaaattcctcttgctttcttactactatgatagtatgagcatatagtattttcctagttaggttcacgtgatgcagtttgtgcttagcaccattctagcctagctataagcactactgggactggaatgtttgtcttggtgttgtttatcctattcctgtggtttatgtctctagttacccacacttaatcatacttcttttttgtctcttggtagagatagttgccagttgccaccccatgcattgctctggggttggaggcagcatgtgcttcagtttagttgctaaaacaacaaggaccacttgcaaattggatactgcaaattggacattgcattttaatgagacagccgattctagaagaagctaccacactggtttaaattccctttcccctgctctgggtcctttaggtctatgaccatttttctctttggcctatattagtacaattatgctgaatagattgtaatagccttcccttcagaactgcgtaaccagtctatttgacaggtggacccacttacacataccacctcacttatacttccatcatcgcttcgtataaaaggatcaacccgggagtcatatggttgaagggatgaattctaatatgtcggttccactcttactaaactagcaaggtgatagtaaacatacgcacatagttatcataagtcacacatgctaaattctaattagaccaggatgctatgtagttgtccattcttctttttaagtttacaaactaggaatcttcgtttacctaggatcccttgttgtcaatggcagtggaagatagattacaatggacttagagcagatacaatagcaagctattaaccagctataaacatattttaatgagataaacgatgagagagaagagcagcgggctacagattcgtagccagctgcaacacggactccaagacgcaatgtgtatatgacaggtgggactatatattaatagtatagtaagcaactattgtatgaattggctattagtttagctataaataaattgaagatagtagtgagcgagcgagcaaaagctctagttgaaactaagtgagcgagcaaaagctagttgtatctgcagcgtgccagggtggctagctaggcagatacaaattggtcgtgtacagtgcagaatgtttttggctcgatttgtggagatcgcgacggtttggcaagtgcgataggggttctgcgtatggtggtcatggtctgatgaagtctcgtccttagatccgtacgtgtcggccgcttcatgtattttcaagttggctataccttaaaagttgatcatttaattaagcatgtttctctgctgccgagtaaggttttctaacataagagagaccacccaagagtcttggagataacctaatacgctattactttggttaattacctaattagttacatgattatatatatgtaaactagaaaaaatatctgtgtgttgcaacggataaaaacatttttgaatcgtatacattatactctttttgggccaaaagattatttcttcgttctatttttatcccagcctagcccgctacctctctcagcttggcgtgcgtctctttgacctagcccacgagtaaagctgtaggcccggctcgcatagccgactgtcgtctttaacaatagataaaaacattttcgatcactatacattatagcaactcatatagccgactgctgtcgtcaaagctcgaaagagtgtgatgctagaactgatcctccccatcaaagcccggaagagtgtgatgctagaactgatctcctatcaaatcgcatcgaatctttattgatcttctaaaattggttaagggtttgtgatgcacttattctactcttctgtttttatcaaaatctgagcgaatccataaaactcttaaatagagattagatctggtaaattaaagcggaattgaaaggaaaaattatgggaaaaataatgagggagtccggtaaattaaagcggcattgaaaggaaaaattatggagaaaataataagagagtagtgaggaatcgatttttactatcaattgaaggagagaatgcggagaccgatcgacatggcggtggagatgacgagaacaaacggcgaaaaagaaaaaaaaacagaacgttaaaagagaaaaaaacaacgggtgaaaaaaaaggaaaaaagaagcgaagaaaaaaaatggaggaacggtaaaaaggaaaaaaaagatgaaaataaaaaaaaagtgacggacaaaaaaacagaaaccttacgtattttaacaatatactagaaaaaatgcccgtgcgttgcaacgggtaaaaacatttttagattgctatatattttcctatttggttttggacaaaaactcatttctttccttccttgtcaagtggagctgtaggtccccgattctccccatcaaatctggtcaaatcccccacatcaaatccagtcgaatctttctcgatcttccaaattggtagagagtttttgatacactagttctcctctttccatttttattgaaatcgaagcgacaaaactcgagataaaaaggtgatttttaaatagagattaaattcagtaaattaaagcggagttaaaaggaaaaatcatgaggaaaatggtgaaggagtagggggattgatgtttggcaatcaattggaggagagaacgcatggggaggtagattgacatggcggcgacgttagtgttcggccccgcgacgaaaaaaacatggcacaaatccttatcgcgtgtggaaaaatacaactaaaaaaacagcaatgaagaaaaacatatgaaaaaacccggaaaaaaggcctagaaaaaaagtaaaaagccgatggaaaaagagcagaaaaaagacggacaaaaaaagacgaaaaaaacagaaaaaaaaagaaaaaagaaaaagggtgaaaaaggacggaaagaaaaaaaagccggtgatttttaaatagagattaaattcagtgaattacagcggagttaaaagggaaaatcatgaggaaaatggtgagggagtaggggggattgatgtttggcaatcaattggaggagggaacgcatgggaagatagatcaacatggcggcgacgttagtgttcgccccgtgatgaaaaaaacatggcacaaatccttaccgcgtgcggaaaaatacaactaaaaaacagcaacgaagaaaaacatatgaaaataaccggaaaaaaggcccagaaaaaaaattaaaaagcacatggaaaaagagcagaaaaaaagacggacaaaaaaaagactaaaaaacagaaaaaagaaaaaagaaaaagggtgaaaaaggactgagaaaaaaaagtccaataggctgttttcttgctggtttttttccgtccgatcggtttttttatccgattggtttattcgcacgcggttttcttccccagtttttttttgcatgtggttattttgcacgctttttttttccgccggataaaggaaaacggacgaaaaaaatttgcaaaaaaggacgaaaaagaaaaaaaagacggacggaattttttttacgaaaccttacgtattttttaattaggtaatataaatatagatatagaagtattgttcgaggaggccatgctactagccgtccctgtctccgcaactgacgtctctgtttgatcggtataacctacaataatcttaattttaatagtcgaatatgtgtactgagctatagactttagaaaatctagccttttctagttcaatccaacagaatttgtggcatggttttggtcattttggagaacaagcaacttaggtgaaaactctcaatgacctacaccagttaattagatccatcgacggcatcgacttaagcggctttttttcaccgggaaagaccgaaggagaccatccgaatatattaaaaaggaaaaaaattacaacaatcgacagacactatcgaagtcagaagtgcaccaaagtgcatgactaagaaccacgtgctaaccacacaaacacaacccaccgagagaggaacctagcaccaaaagacctccgctatacgtggccgatcgccactaggcctacgacaaaacaacaaagacgagactctaaaacgatgcccccacagagatcacgacatcaaagacgccgccatcacctcgagaaactcgccaaggaagagatgaatcctcgacagtgccctagagggggttacaacacccgaaggcgtagccattgccggcccggtgaactactagacatggctttcgcctggaacccctgcaacctttcttgaagttcgtcgcccatccactcaaaaaccaccacactggcagcacgaggcctccaccgcaccgtattaagcggcctttttctgtttgaagaatttgctttggagaaacttttgatctgcgatggtgaaatatcttagccgtgccctcgttaacgaaagaagtataaacaacttttatcatcatcatcgagtccaaacaatgttgctccaaattgttactttggtcttttgctccttgtcttaatttacatttagcaaatgccgatgtaattgtacatcatagttggtgttataggccagaattataccatgatttcttaaaaacagtcgattggacatcatttcgcaattttcagaagatgtttaattagtttgcttcctcggaagttttctgaaggggaaagccaattcaaaaaccaatatagccaaattcttttcacataggacattggctaaaaacatactccttcagtaacaaaaacatgccattttgaacatgtatggttcatgtaaaattcgaaaaacttcaaatacaaatattttttaatgctagctagtaatagatttattaaaatcgcagaggttaaggcctgattttaaatataaatatcttcattaatgctagttctagtattggatttgttaaaatcgtagaggttaaggtctgatcgaggaagtctttataaaagcacgctgtgaaagaatgtatcgtagatttgtatttaaaaataaattcttaacatcactcctaccatatcgaagactacatcaaaagtcctaaaatatacccacttcgttctgaaatataagattttttgggttatttagcaaacaataatatttaggtcaaaaaattcttacttttaattgtcaattttttaattttgaattaattagattttctttccaagcatctgattaaatttacatgcattgaaacatagaaatcgcatcagtgcatgaataccgttaaaacgaaggtttgtattgtgatcagaggggcaagtttcaactttcaactttcaaattaagtttctgaaaaaaaaaagagaagaactttcaactttcaaggatgactggcctgccagccaggccaggccatgcacactcgagggtaagaatggtcaaagcttgaggtagctagctagaggattaatacgccacagaagcagaggtaataaccaacagagccgtggatttttcactgtttttaagacctggagcaaacggacaaagcccacgtatagcaaggcagcaaactcagcatagtagctgaaatcactcgcggacaagcctgaaaccatacaaaaaaaaaatgcagccaaggaatgcaacaaacgcatgggatcaaaatgggcatactttttagaagcctgtggcatcccctagcaaagtacagctaaaaatcctgcaagcaaacaaagcagctcgtaggcaggagatagagaggagatccatccgccatcgttctatatatactcagccggtcccgtgtcttccccatccccaagttattaattgcatcctgtcattctcttttcacctttggacaaacacataatgagatataaatatatatttatatagttttgaatgggaagaatgttgcgaaagcatattagaaactaatatattgttaggctcgcattttcctcaggaccgatatcgatccagagtagaagtacatgcgcacgtgagtatacggtcgatggttgtatatctgtaccacgtaaggccaaacctctaattttgtttagatgtatgttaaaattattagatattttttctcgtgaatagggcatggaggagtataattaagctcgtgtgctacatatatcttccgattttgatacaagcttacaaaatgcctcttgtccgctaattttatcccatttgtttctttgtgccaagggaaacaaaagtcgaggggaaccacacagtggcacacacatatcctacaaaagtgacacatcgatgtgagaaacacccagagtagagaggggacgtacccgttcgtaccacacacacacgcacattggaagctagctacagcaagagagaagatgcgcaagacatgcaactaaaagatttgtgaccagaattcacaaacaacaggggg

SEQ ID NO: 7017 - DNA, 4014 bp, Oryza sativa
tttatccaaagtcaatgcgacgccaggaggcgacagacacgagcgcgcatcgacctggcactggcacaccacaggacaggagcccaggaagctacctataccttgctagcttggcgtcttggcgaaacacccccttgttggatcaatctgctgtgctggtggtgagtcagagttaagagttctaaaaaaaaaaagagagtcaaagttaagagatcgaccaagtcgctaaacaaatgcaggataagacgagcacctcagcatgagccgtcgtcctaatttgcaatcacctgcatttcatcttctactactatcagatccaaccaaacaagcaagggcatcagatattcagatcagtatatcgatcaggggcaatggacaatgcgctgatgcatgtgattccacttagtcatgcgagttaaccaaccggccgtgtgcgcaataatggattaaacaagtactagtaacaggagatttgtggcctagttgcctgaatttatgcgtgacgcgtctcccattattggactacttgacgatgatttattgttaagttgacgtgtaaaattattactgtaaactgccttttctgtaatctttatcagtcgatctctgtctctctctccgtcctgccgtacgtggtttcagaaaaaaaggaaggttgttgttgctatgctggatatacaggattagtcatgaaatgaaggggagttgcaagtgttgatcaattagtgtgtcgaaccaaatcaaccatgtcatcagcagttcttgtcttctaaggccagtcacaatgggggtttcactggtgtgtcatgcacatttaataggggtaagactgaataaaaaatgattatttgcatgaaatggggatgagagagaaggaaagagtttcatcctggtgaaactcgtcagcgtcgtttccaagtcctcggtaacagagtgaaacccccgttgaggccgattcgtttcattcaccggatctcttgcgtccgcctccgccgtgcgacctctgcattctcccgcgccgcgccggattttgggtacaaatgatcccagcaacttgtatcaattaaatgctttgcttagtcttggaaacgtcaaagtgaaacccctccactgtggggattgtttcataaaagatttcatttgagagaagatggtataatattttgggtagccgtgcaatgacactagccattgtgactggcctaaagaattttcctcgttaattaatcaaattaattaacccggctgtacttagtcgagtgttagcccaagccattctcagccagctagtcctttttctcctttttttttttcaaaataaatagtgctgtttgtacgtgctatggctgttttgaggaataagctgctattaattcacgtcttttatatgaaatgaactcgtgattctatttccaagagatattgcgttctcgcgcgtgttgatctgacagcagcattgacccctcagtataatgcagtttttttatataaagaatcggatgcaactaccaacaatggacaattggacataatcactaaactaaaggaggatcactcctgctaccacatggacaataaacaaattaaaacggcactgaaataccgaattcagctacacacgaaagaagaaaatatctactctagtagcaacttgcaagctttaattccttctcccttaattaacccttcccctttatatatatatatatatatatatatatatatatatatatatatatatatatatatatatatatataaactgaaacttgcaatctcctctgcacatattctcagggttcagcctaaataaaaccgagaaaagaaggtgctcctttgtgctctcgtgatgaatctgtcgtgtccatcacgtatagcaggaataaaccaatcgtcttatcctttaacccgtcgtggaacagaatcacgatttcttctttattggacaaacagaatcgcatacgaagtgacgacgaaaagcggaaccaccagaacgatcgatgcatccgcatgatgtggctgatacgaatgatatcacttgacacactcgaccaacggctagctaggcagcgagcggcgatcgacgagcgcgcgcaagcaacggcacagacgcacgcacgcgttgcgcgggcggatgctgcaggagttcgctgcagattgggcgggcgaagccgtggtaaaagctagtactacccaccagctgttccaaaccatctggacgacaccacttgtcaagttgtattgccacgatggcggctttgaacgattgcacgtacgcgaacgcacaacgtcgactcgggctctgttagttttcacgtaaaaacttttcactatgtgacattgaatgtttagacacatgcatagagtattcaatataaaaaagacataattacatagattgtgtgtaaattgcgagacggattttttaagcctaattgctccatgatttgacaatgtggtgctacagtaaacatttgctaatgatggattaattagacttaataaatttatctcgcagtttacagacggaatctataatttattttattattagtctatatttaatacttcaaatatatgttcatatatctgatgtgacacgtcaaaaattttcacctaacatctgtatgaacacagaacacagcctcggtcaaagagaaaaaacgaggcacggagggtaaaaaaggaaaaggggaaaaatcgtggcagaaaggacaggtgaaaaaacggaaacagcgctgtcctgatgtgttcgttcgttggttcgttctcgtagttgtagcagcagagggaagcgtctgtctgcgtcgggtgcgtgcctttggaccggaatatcctggaggataaaccatccgatccgcggggacggtggcagcaaattggcaaatgcgcgcgatggctggccatggcgaacgcatccccaccccgaatattccccattcccgcttccttcctttctccaacgacccacacccaacactcgatccctttccccttcccccgccttgttataaattaggctcggctcccgcttcctcgcgtcgcgtcgcgtcgcgtcacgtctcgttgttgcattgcattgcgcccacgatcctcctatacgcgcgcagctaggacatcctccgaatataatggcccagctcaaggccgcgcgcgtcgccgacgtccccatggcgctcgacgtcctcgccgccggcgcccccgccacctccgccatcctcggtacgtacggattattcaatattcattgcgtggcgtcgagacaccgtgccgcggcggcgttagttatttccttggttatgcagcagaggtggacgcggcgggtgctcggagcgccgcggcgggcggcggcggcggcggcggggggcagaggttcgcggtgatcgggcaccgcgggaaggggatgaacgcgctggcgtcgcccgaccggcggatgcaggaggtgaaggagaactcgctcaggtcgttcaacgaggccgcccgattccccgtcgactacgtcgagttcgacgtccaggtaacgaaaaaaaattcttcatcatccgtccatccatgtccatccatccgtcatagcggtaacctgggtggggttgagctgctcgtgctaaatttgggggtccccgtgggcgttcgagacgaaaaagcgagaccaatcaaggaaaaggaaaggaagagaggcagatggggagatgggttcacgttcacctgggtgatgggacgggtcgccggcttcctctcctcgatggcgacgcgtcagcgccatggagggcagaggagtgggggcgccgcgtagcgtagcgagcgctcgccgccgcccgcgggcgaaacagaagagccaacggtgtggcgacgcgtcgcggtgagctgctgttccgattcgcggtgtcacacgtaagccccacgcgcccgcccgttctcgctcgccttcttgggaaatacgaatcgatcgacataataattgcccttcttggagaaactgaaacgcgaatcgaaaatctcaccggcacgattaat

SEQ ID NO: 7018 - DNA, 1801 bp, Oryza sativa
tggattgcattgttaaagtacatttttttattgcagaaccaaggaattgatatttcagacaatgagttgcttgatttcatatctgagtctagcacaatgagtaaatccctagttgactatggagaacaaaaatcatgtgctgtaacaacagcaaaaagactagctgaattcctcggggattcaatggtaaaagacaaagggctgcattgccaatacatagttgcccgggagccacaggtaagtactgaatagttcaacaattaacatcatgcacttacccattcctttaaattttgatagttacggtaccatatttcaattttggatagtcacggcatgttcctttcagtgggcaaatattccctttattttgttttcatggaatttgtttattctagttttcatgatttggcttgcttttttccaatattcctactgctttgttgacttgctgaaatcatgtagggcactccagtgagtgagcgtgctattccagtagctatctttgagacggatgctggtattattttaccttcaaatcatgtttttgcaagagccaaacttttcaatcacttacattctcttgctatccttgtatcttacagaaattgcaaagttttatttaagaaaatggtgtaaaatctcctctgaagcgagcatccgatctattgttgactggtcttactataagcaacgcctaagctctgctattcagaagattataacgattcctgcagcaatgcaaaaggcaatatattttttacttgttactttgattatattatatactttttacttgtcccctttgattttccatgacatttgtgaaatcatgttgctacagatttcgaatcctgttcctcgagttcttcatcctgattggttgcacaaaaaggtcagagagaaagatgatcgatttcgccagcgcaaactacgtgatatgttcaatcctttggagaaggacaggggggtgcagaatttggatgggacaggagatatggaagatttattaacgctggatggtggtatgagaaaaagtcatgtacccaatggttttggaaaagaaaataaaccaaacgacgcaccatcaacagaagctggttcaaagcatagcaagaataaacaaaaatctataactaggtcaaatgaaccccttgccgtacatattcaaaatgatgctgctgatgaacaagttgatagaagtactgattatcaaggatggcttgatgctaagaagagaaaatggaaatatgttcgtgagcaaaaaaagcgtcaaaggtatacaaatttatgttgtacacaaattccaactaatttatgcttgtaaatgatactccgttctacattttaagatgttttggtctcttcatccttgtctagattcactaacatccatgtaaatttggacacatgaacataggatctatgcatatctattcaaaacccaaaacatcttacaatgtgaaacggaggaaggacttatagattcagttcatttagcattttgttcctctcctagctctcaaacagactactagactaatcctggacttgacttcaagtttgtcatagtaatatgtagcggttttaggctgatgatagtaagcttacattttgccagcgtgaatcagccttttgagcatcgcattaccttataaatcctaagttacattgatatgatggactggtgactatttttctttgtattgtcactgttaatataatggagattacactaagtaaactaaacagctaatggagggaagtcaatgtttatgtttcctttttgcatttaccaggt

SEQ ID NO: 7019 - DNA, 49425 bp, Oryza sativa
tatatgtagcacacgagcttaattatactcctccatgccctattcacgagaaaaaatatctaataattttaacatacatctaaacaaaattagaggtttggccttacgtggtacagatatacaaccatcgaccgtatactcacgtgcgcatgtacttctactctggatcgatatcggtcctgaggaaaatgcgagcctaacaatatattagtttctaatatgctttcgcaacattcttcccattcaaaactatataaatatatatttatatctcattatgtgtttgtccaaaggtgaaaagagaatgacaggatgcaattaataacttggggatggggaagacacgggaccggctgagtatatatagaacgatggcggatggatctcctctctatctcctgcctacgagctgctttgtttgcttgcaggatttttagctgtactttgctaggggatgccacaggcttctaaaaagtatgcccattttgttcccatgcgtttgttgcattccttggctgcattttttttttgtatggtttcaggcttgtccgcgagtgatttcagctactatgctgagtttgctgccttgctatacgtgggctttgtccgtttgctccaggtcttaaaaacagtgaaaaatccacggctctgttggttattacctctgcttctgtggcgtattaatcctctagctagctacctcaagctttgaccattcttaccctcgagtgtgcatggcctggcctggctggcaggccagtcatccttgaaagttgaaagttcttctcttttttttttcagaaacttaatttgaaagttgaaagttgaaacttgcccctctgatcacaatacaaaccttcgttttaacggtattcatgcactgatgcgatttctatgtttcaatgcatgtaaatttaatcagatgcttggaaagaaaatctaattaattcaaaattaaaaaattgacaattaaagtaagaattttttgacctaatattattgtttgctaaataacccaaaaatccttatatttcagaacgaagtgggtatattttaggacttttgatgtagtcttcgatattgtaggagtgatgttaagaatttatttttaaatacaaatctacgatacattctttcacagcgtgcttttataaagacttcctcgatcagaccttaacctctacgattttaacaaatccaatactagaactagcattaatgaagatatttatatttaaaatcaggccttaacctctgcgattttaataaatctattactagctagcattaaaaaatatttgtatttgaagtttttcgaattttacatgaaccatacatgttcaaaatggcatgtttttgttactgaaggagtatgtttttagccaatgtcctatgtgaaaagaatttggctatattggtttttgaattggctttccccttcagaaaacttccgaggaagcaaactaattaaacatcttctgaaaattgcgaaatgatgtccaatcgactgtttttaagaaatcatggtataattctggcctataacaccaactatgatgtacaattacatcggcatttgctaaatgtaaattaagacaaggagcaaaagaccaaagtaacaatttggagcaacattgtttggactcgatgatgatgataaaagttgtttatacttctttcgttaacgagggcacggctaagatatttcaccatcgcagatcaaaagtttctccaaagcaaattcttcaaacagaaaaaggccgcttaatacggtgcggtggaggcctcgtgctgccagtgtggtggtttttgagtggatgggcgacgaacttcaagaaaggttgcaggggttccaggcgaaagccatgtctagtagttcaccgggccggcaatggctacgccttcgggtgttgtaaccccctctagggcactgtcgaggattcatctcttccttggcgagtttctcgaggtgatggcggcgtctttgatgtcgtgatctctgtgggggcatcgttttagagtctcgtctttgttgttttgtcgtaggcctagtggcgatcggccacgtatagcggaggtcttttggtgctaggttcctctctcggtgggttgtgtttgtgtggttagcacgtggttcttagtcatgcactttggtgcacttctgacttcgatagtgtctgtcgattgttgtaatttttttcctttttaatatattcggatggtctccttcggtctttcccggtgaaaaaaagccgcttaagtcgatgccgtcgatggatctaattaactggtgtaggtcattgagagttttcacctaagttgcttgttctccaaaatgaccaaaaccatgccacaaattctgttggattgaactagaaaaggctagattttctaaagtctatagctcagtacacatattcgactattaaaattaagattattgtaggttataccgatcaaacagagacgtcagttgcggagacagggacggctagtagcatggcctcctcgaacaatacttctatatctatatttatattacctaattaaaaaatacgtaaggtttcgtaaaaaaaattccgtccgtcttttttttctttttcgtccttttttgcaaatttttttcgtccgttttcctttatccggcggaaaaaaaaagcgtgcaaaataaccacatgcaaaaaaaaactggggaagaaaaccgcgtgcgaataaaccaatcggataaaaaaaccgatcggacggaaaaaaaccagcaagaaaacagcctattggacttttttttctcagtcctttttcaccctttttcttttttcttttttctgttttttagtcttttttttgtccgtctttttttctgctctttttccatgtgctttttaattttttttctgggccttttttccggttattttcatatgtttttcttcgttgctgttttttagttgtatttttccgcacgcggtaaggatttgtgccatgtttttttcatcacggggcgaacactaacgtcgccgccatgttgatctatcttcccatgcgttccctcctccaattgattgccaaacatcaatcccccctactccctcaccattttcctcatgattttcccttttaactccgctgtaattcactgaatttaatctctatttaaaaatcaccggcttttttttctttccgtcctttttcaccctttttcttttttctttttttttctgtttttttcgtctttttttgtccgtcttttttctgctctttttccatcggctttttactttttttctaggccttttttccgggttttttcatatgtttttcttcattgctgtttttttagttgtatttttccacacgcgataaggatttgtgccatgtttttttcgtcgcggggccgaacactaacgtcgccgccatgtcaatctacctccccatgcgttctctcctccaattgattgccaaacatcaatccccctactccttcaccattttcctcatgatttttccttttaactccgctttaatttactgaatttaatctctatttaaaaatcacctttttatctcgagttttgtcgcttcgatttcaataaaaatggaaagaggagaactagtgtatcaaaaactctctaccaatttggaagatcgagaaagattcgactggatttgatgtgggggatttgaccagatttgatggggagaatcggggacctacagctccacttgacaaggaaggaaagaaatgagtttttgtccaaaaccaaataggaaaatatatagcaatctaaaaatgtttttacccgttgcaacgcacgggcattttttctagtatattgttaaaatacgtaaggtttctgtttttttgtccgtcactttttttttattttcatcttttttttcctttttaccgttcctccattttttttcttcgcttcttttttccttttttttcacccgttgtttttttctcttttaacgttctgtttttttttctttttcgccgtttgttctcgtcatctccaccgccatgtcgatcggtctccgcattctctccttcaattgatagtaaaaatcgattcctcactactctcttattattttctccataatttttcctttcaatgccgctttaatttaccggactccctcattatttttcccataatttttcctttcaattccgctttaatttaccagatctaatctctatttaagagttttatggattcgctcagattttgataaaaacagaagagtagaataagtgcatcacaaacccttaaccaattttagaagatcaataaagattcgatgcgatttgataggagatcagttctagcatcacactcttccgggctttgatggggaggatcagttctagcatcacactctttcgagctttgacgacagcagtcggctatatgagttgctataatgtatagtgatcgaaaatgtttttatctattgttaaagacgacagtcggctatgcgagccgggcctacagctttactcgtgggctaggtcaaagagacgcacgccaagctgagagaggtagcgggctaggctgggataaaaatagaacgaagaaataatcttttggcccaaaaagagtataatgtatacgattcaaaaatgtttttatccgttgcaacacacagatattttttctagtttacatatatataatcatgtaactaattaggtaattaaccaaagtaatagcgtattaggttatctccaagactcttgggtggtctctcttatgttagaaaaccttactcggcagcagagaaacatgcttaattaaatgatcaacttttaaggtatagccaacttgaaaatacatgaagcggccgacacgtacggatctaaggacgagacttcatcagaccatgaccaccatacgcagaacccctatcgcacttgccaaaccgtcgcgatctccacaaatcgagccaaaaacattctgcactgtacacgaccaatttgtatctgcctagctagccaccctggcacgctgcagatacaactagcttttgctcgctcacttagtttcaactagagcttttgctcgctcgctcactactatcttcaatttatttatagctaaactaatagccaattcatacaatagttgcttactatactattaatatatagtcccacctgtcatatacacattgcgtcttggagtccgtgttgcagctggctacgaatctgtagcccgctgctcttctctctcatcgtttatctcattaaaatatgtttatagctggttaatagcttgctattgtatctgctctaagtccattgtaatctatcttccactgccattgacaacaagggatcctaggtaaacgaagattcctagtttgtaaacttaaaaagaagaatggacaactacatagcatcctggtctaattagaatttagcatgtgtgacttatgataactatgtgcgtatgtttactatcaccttgctagtttagtaagagtggaaccgacatattagaattcatcccttcaaccatatgactcccgggttgatccttttatacgaagcgatgatggaagtataagtgaggtggtatgtgtaagtgggtccacctgtcaaatagactggttacgcagttctgaagggaaggctattacaatctattcagcataattgtactaatataggccaaagagaaaaatggtcatagacctaaaggacccagagcaggggaaagggaatttaaaccagtgtggtagcttcttctagaatcggctgtctcattaaaatgcaatgtccaatttgcagtatccaatttgcaagtggtccttgttgttttagcaactaaactgaagcacatgctgcctccaaccccagagcaatgcatggggtggcaactggcaactatctctaccaagagacaaaaaagaagtatgattaagtgtgggtaactagagacataaaccacaggaataggataaacaacaccaagacaaacattccagtcccagtagtgcttatagctaggctagaatggtgctaagcacaaactgcatcacgtgaacctaactaggaaaatactatatgctcatactatcatagtagtaagaaagcaagaggaatttaattctctcttggaagaacaagaatccaactaccaaatctctctctcccttatcccctttaacctcttcacaaggatttcttctttctttcttttctttttctcttttgttcttgtgggaacatgcatgacaggtgcaggcgtcagaatacggatgggcacaatggggaaggaggatgctaaacaacaaaaccagcgtcaggccagccagcatagaccacggtttgtgtacacacacacacacacacacacacacacacacacacacacacatatatatatatatatatatatatatatatatatatatatatatatatatatatatatatatatatatatatatatatataattcatatatacacacacacatgcacttgcttccaaggcacacaccagaagaatatcacacaagcagaagcaaacagggcagcagcacatcacatagaagtagtagtagatcacacaccatgatgcatcatcaatatatgctctctaccaaaatcaaagccacgagccacagctccagccagccagcagtatgcagttggcactttacttggcacccacatcacaccctgccaacttccaaagcaagctctatactcaacagctgctaatccagacaagaacctgcagatggttttaatgcactaattagtaactagttgttgcatgaccccagctccagctagctcaagaatggaaatcagggttacaaatgttcatccttgaaaaggtaaagggaaatgtgaagggggaaaaagggggttagtctcacaaactggaacagaaaaagaaaaaagaaaaagaaaaaaaaaagagaggagacaaccaagaaacaatggaaggaaaacaagaattctagagatgggtctcctcccatacattggagtgcaatgtaggtaataatggcgaaacttggggaccttctcgccaaaaactcttctctctctctctctcaatattttttttccctttggaagttctctctaacagagcatgcacaattgcgagaaggcccccctacaattagtgaattgcggaactcggcggcggcgagcggcggcgcggggacggcggcggcggcggaggctcagacgtagccgttgcggctgaggtggaggaggccggagctgccgcacttggggcacacgtcggcggtcttcggcaccatgaagtacatgaagcaagcccggcagccggcggcgacgaggacgtgggcgccgttgtcgccgacggcgtagccgctgccggcgccggaggccgactcgtcggtgggggagaacgacgagagcgtggacgacacggcggagccccggctgctgctggcgctgctgctgctgctgctgctgctgctactgctgctgctgctctcctcgtcgtcgccgtcgcggccgtcgtagccgtagccgtagccatagctgccgtagccgtagccgtagccgtagccgtgcccgctgctgtcgtgcgagcgccacgccgccgccgccgcggtgaccgcgcccacggacgacacggaggtgtaccccgacgacgtggtggtcgacgccgcggcggcggcgccgcctccgccgccgcggccccgcgcgcgcgagcagcggcgggaggaggacgacgcggaccgcgacgccggcgacggcgagtacgccgacgacgagcgcggatcgatggtcgtccgggtgccgtcctcccagttgatgtagtaaacttgccccgtctgcatcagcaaagccaatcacaaagcacatttcacacaaattcacatgaagtcatgaactacacatcaaaattcatctaaaaataataacaataaaggaaatgcgcttgaactagacagctagtggtacagattaagttaatcttgcaaatggcgaaatgctgtttcaagaatgtggtgagtaaatgtgcatgatgcatggagaagtttgggtggggaaaatctacaagtacattttggtgacagtctgcaagaacaattaatgcggtggcattcagttgcttccgtgaaacaaggttgagaacctattaataactgatgcccataacaaagtacagcagaacaggggaaagaaaaaaaatctggatcaaatggtgtaatgaatgctgctctctttgtcctcttgtttgtttgcaaatcacagggcaaggttggcaatgaagaacaccaccaccaaattctcatttcatcctttgtaaaaaaaaaaaaactctaatctgcaggaaagctgttctacttaaaaagcacataaatgtattgcagtagtatcttcagaaaaggctactgaaataaccataagaagagcatttttgtctactctgttgctggagacaaggtggagatgaacactccattttggtgattaatacgcatgaatcttcattggggtaggcattcattcgtctgttcaaagtactagcagggatgaaaaagaaagggagacactttgtcacaatggaactgaagatttcccagaggtgagaatcatctggtgtttaacaaagctctgcgattagattagaacccaggaccaaaaaaacagagcattgtggtccagaagaaatctatagcgaaatctagagtttcagatagagacagagcaaaaaggaatggatctacagggatgtgtcagaaatttagaatgcaacacagatctgaatgcgcgcttagatcagagaccagagaaggtgtggagatttgaagagccttgatatcatcaacaaaaaaaaagaaaaaaatagtaccatcttttccgaggtttcttttctgaacttttgtcatccctgtgttaaaaagaacggcctgaatctctctgaagatgatcgaatccccaaccaaacgaagataagaaccgaagaaaaaaaacagagataaataaaaaaaatatttgcatagacgaagagaggaatcgcagatgaagcaaggatccaagaacaagaacaagaagagagaagggagacgaggagcagaaagagaagaggaggaagaagaaaaaaaaaatcagcgcggacgggtcgtctcgtctcgtctctctctccagttcgagcgcccgctttcgccattaatgatcaaatgattgatcccaatcgagcccaaaccaaaccacacccacctacctcggaaactgctatccatttatgtctccaaatgattggacaaagggcggcgcgccgccgcccaccgccgccgccgccgcaagaatcgatcggggaagaaaaggaaacgcggcgtatgcatgtatggatgcatgtgtggaagaagagatgggcgagtagtagtagacgtacccggatgtcgaggcactgctcccagtggtagggcagggcgacctcggagttgagctcgacggtgaccccctcgctgtcgtcgctcccctccgccgccgccgcgcgcctccccctgcgccgccctcctcctcctcctcccccgccgttgagggagcagttgcgcagcgacgaggcgatcatctcgatgttcggggcagtcatcaagtccaccaccaccaccaccaccccacccccccacccctccccctctccaacaagaaccaaacggacggcgaggaagaagaagaagaagaagaagaaggaggaggaggaggaggaggaggagaaggaggaggagaaaggaatttgcttttgctgttgctgccgcagcggctgccgatgccgcggtggtggtggtggtgcgcgtggccccccgggggtagcgtaggcagcgtatgacgcgtgaggctacagtggtggaggtggaggtggtggtggtgcctggttggagccactgttatatatactgccattgttgctcctgctgctgccaatcttgggtgtttttggggtggttttttggttttggttttggtttatagggttctttggtttggtttaggagggggtggagggaattggaggaacagtctgtctggacgagtgccaactgtgtgccaacatagtatgcgctgggattaacggacggacgccgatgcctgcccagggtatcgggcggtttctggttcacttcctacgtcttgtatgcttgcccaaggtatcgggtggtttctggtgcacttcctacggctgatatggtgctggcgggtgggggtgggagcgtcgtgatatgcgccgatggtttttccggcgcctatgtaaatctgggggccgtgagagaggttttgttttcgtgcgctggattcactggcgtgtaagtatgcgtattaggctatgagtaattgacggcttgtccgcttcctttttagtgaagtaatgatactgtaataatgagatatgcttccaaaacaacgagaggtcgagagcgatcaaggtgaaagttttaattaaccatgcctagcttcctggtattcatgaatggtattctatgctacgatagtccgaaggcctatggaacctgtttcacatgtgtataccgagtctatataagtaattgtgtgttccttatcaatgttgcattgaggatgctatagaagacaataatatttttttaatgaatgaaccagccttgatcttctttttgtttaagataaaagaagaaggaaaactgtgataatgtggtgtacgaccaaaggaagaaaagtataagcatgaaggggttgaaaggtgcaaatgatgaaagctttctgctgcagccaagggggagagagagggggggatcgatgaatgatgctagggggaaaggtaacatcaacctactaccatggccactctctctctctctctctctacatatcgctctctctcgtatggtgtgttttggtgttgcatgttgtccctgctggctgatgcagctagcggagctcaaaccaaaccactggcccggcccggctcttgggccaccatctcctgcgcagattcctcttctgccaaaccgaggaaaggttccccccttgtccctccctcctcctctctctttctctctctccttccttgaatcaacctgaccatttcaaaaactccatcacaactagctgaatttgtctcttggaaaatggcattagcttagcagcaaaatgtggcaataaaattatagaaaacatgcagtgttatgtacagtgtaactgtgtagagagagagagagagagtgtgtgtgtgtgtgtgtgtggaggaagaagaagctgagagcctgagagcaagcacggtcagtggcctctgatgtctttgacctactagcatgcatgcatgtacaccactgttgcaacatcagacgagatggatggatcgagctgggacgcatgcgagttaatacttttttttattctatattgatcatcatatatataagttttttcatgaaaaccaatgtgagttgagaacatttgaaacgttgtagagagttttagcaaaatttgttaagtcttctgaatgtgtaacacatctggtcgtcgccttcatataatttgacaggcacatatcaggctgaagttgactagatatgtgagattgtctcacatgttcactactcgatatcacatattttatttaatgtaattaagttgtgatggaaaaaatgaaagcttaacaacctctaaatgcgtgcatgcatacatgcatgcttaatttgcatgcatgcataaatcgcatcacttaacattgggtgagtatgaattatcccaagatctgaaatcagacatctttcatgctcaattattaatatcggatgaagaacctctaacttaatccggagtggttatgatcttagttggtagtcaagtcagcattttatttaaaaacaatatgcggaatccacctatcagattctctccgtttcacccctctctaacagatggatcccaccgatttcttaaaaaatgctacctagactgtcatgtaggaccaaaaccactctagattaagttaggagagttcttcacttgatattaatagttgagggtaaaaaatgtctggttttcggatctaggtgtaattcgtactcacctaatagtttagaggtgtaatttagactttctcctaaatacaatactgttgcacgtcaaaccaaagggcactggttatataatgatcaatttaaattttttagtattatatgatgatcaatatgtgaagggatcgatgatgtcacactacgtattatgttcgtttattttagaaagaaaggagcatggagaatctcttattaccatgtagcttgtctctgtcctctcctctccggcatgcatgcacgcgcttgcgttgcttcgtttcgcttggttgcttgcacgcttgtccatgcatgcacgcacgcgtggtgtaccgcgaaaatcttttggatggctgcgcctagctcgtgttcgtgcatctatctatctatctatctatctgtctatcttgcatcatcatcacgtactggatcgatgtatgtatctctttcctcctcctcctttttttgatctagcatatagcttaatttgttctcgttctcgttgttgcggtgtacgctctgctagattccaatgcagatgcgtggtagtactcctacgtgggtaacatgggacatggccgttgttgcttgctcgctttgctgatctctggtggtttctctcacgcccaatgacgacgacgaccatgatgatgattgatggaactccggaaagggggagattgttttgtagggccgtagctgtctctggaacagatatgctgcatcgatctcggaccaaccctgctactagtagtggtagtggtggtagcggagatcggtcgatttttttgggccctgttgattcaagtggacgggcaaatgcgaccctccccacacggttgtgcatgggatcgacgttttcctcctcccacgtactacctccttccctaaatgtttgacgtcattgatttttttaaatatgtttgaccattcgtcttattcaaaaacttttgtgaaatatgtaaaactatatgtatacataaaagtatatttaacaataaatcaaatgataggaaaagaattaataattacttgatttttttaaataaaataaacggtcaaacatatttaaaaaagtcaacggtgtcaaatattttgggatggagggagtacgtacgtactacctccgtatatttcgatagaatcgactaaggcagtgtttgtttctatggaaggaagataaagttagtgcacagaaaacacgaaaaggaccccgtaaaaaaacacgaaaagtcattattaactcataatttattaataagttttcattattacaaaaaaattgtgcaacaactttcatttatcaccgctacataacaggtttttccatacggtccaatcccaattttcacggatggcagggcgatccacatgcaccaaatggtctgtgaaaatcgttcacgcgaaaatccgactttttacgtgcgggtgcttatgtcgcccgctcgcaaaaataaaaatccaaaaaaattaaaacccaaaaatggcgaaacctaacctgccctcctcgtcgtcgttgtgggggcataggggcctagcggcggctgggtccgcccgctcccgtcgccggagccagagccagatccaccgccactgtgcctccccactgccgccgcgcggggtagggcagccgctgcccctccccaccgttgtatccgccgccgccgcgcctcactgttggtatttattatgaccacggaataatctataagcgcacaaataccgttgtagccttcacccaagagtatttcagtgtatcatatccacagtaaacgtgtgtgtataatctaagaacgaaattcttcgaaggacaacaactaaatggtaggcttgggatagagtggactcctgtgggttagttatcttaattaagttaacgtaaaactctatcacatgggcaagataacttgtcaaaaaaccaaatcagtgccaggtccattggtgaaagactatcttagcacaattttccatttgaaaaaataatagtaaaaggacctcgacaatcctttgctagccaataattcacatacctattcatgtaaacaaatcacaactacgaaaaggattttttcgtgcggtggaaaagggttttcacgtgcgagtgggcgaaccgcacgcacccagttgtctgcgaaaatcgctattttttgcgtgcgggtggcgcaccctcatgcgaaaatctgattttcgcgtgcgggtgcttatatcgcccgcacgcaaaaataaaaaaccaaaaaaaaataaaaaaaaaccgaaccctaaccttgtcgccatcaccatcgtcctcgtcagatccgccatcgccacgcctcctccctaacctcaaagccgccgcagccgtcgtcctcgtcgtcgccgttgtcctcgtcagatcagccaccgtcacgcctcctccccaccgcccgccggccgccgccaccaccaaataagtggcttccaggcaagcatgctctgctgttcctcagaagtctcaaccaccgtattaatcagaagagtgcccaaaataccacgaacttccaagcgaactctatatggcaactctccattgaggggctcaataactgtgtactatggagcttcaatgtaaccggcaacaaatgtcatatttgcaagctccgcaacaaatccttccatgccttcaccatggtgagtacagggagaatcggccatctaaagaaaagatagaaggaacaaaactgactccgatcagaaacgagatgctggcattaaaactggaaacaaaaagaaagaaaaggcactaaactgaaatcaaaaatactgaagcaatataaatatttttttaaaaaatactatttttggcccaattttttttttaaaaacgaaactctccctttctttttaaaccgaaacccttccctttttttctgccaaaaccttttccttttttttgccaagaatttttttccgaaaatattatttttctttttgaaatgccgaaaacattttttttaaaaaaaatcaaaaggcacaaagaaaaatatttttttgatgaaattcagaaacttgaaaacaaactcatttatttggactcactggaccacttgaaaaggagggaagaagagatttccaggggaataagagaatttcatagggctctatgggctttccgtttggtttgtcctacggtcaagatcggctctgataccaacttgtcacgcccagagattcgacaacccgaatcccggctatctgtgcatagtccaggcatcaactagagtacacgaatctgaagaagttaaaaaagactcacactattgtatttttcaagttaaaagaagacattagatggagcggctgccactagttgtgtagtcacgtcctatgaaaaaaaaagcatatattaaagttactttctttttattataagttacttctataatatatataaattacttttaggctttattaaatttacttttatatgtctatgtaataattggctgtagctcttttgagtaaaggccgggatatttattccattatctaaaaaaatatatctaagaagtgatttagtgaaatctaaaagtaattttgatatattataaatgtaatttacaatttttcatcagaatataatcatgtgagatctttctacaaagatttaattacgaacacgacggtgtaatcggatcgtagatcggatgagtagtttaagagaaatttttatttgaagtataggtggataggatttctcatagatgaagtagtagcgctgtgtagtcatgtccaatattggatgctgcctttcaaaaaataaaagagcaattacaaatttacaaccattttaatttgttattacagaaaaaaagagaaaacgatacttctaaaaacaagcatatccatatcagatatcgtatcaaacacaaatgcgtatcgggatactctcgaatgcatatcgaacatggaaaagctaatgggcgattgatcgctaagggcgatcagggcgacaccccctcctcctcaacgtggttttcttttttggtaccgtattactttgctatttttagtaaatttatacatctaaaatttatacacctcaagtttacacatctaaagtttatacacctaaagtttagagacccaaagtttataagtcaaaagtttatttatccgattcaaatttgaatttcaattcaaattttttttatatatagtattttctatatatctaaagtttataagtcaaaaatttatatacccgattcaaatttgaatttgaattcaaattttttatatatatagtatttctatacacctaaagtttagagacccaaagtttataagtcaaaagtttatacatccgattcaaatttgatttgaattcaaatattttttatatatagtattttctatacatctaaagtttagagagccaaagtttataagtcaaaagtttatatatcctattcaaatttgaatttgaattcaaataatttttatatatattattttctatacatctaaagtttattaacccaaagtttataagtcaaaatacccgattcaaatttaaatttgaattcaaatattttttatatatatagtatttctatacataaatttttctaactgtttttttatttttaaaaagatttatggtgtagtacgaagagaagaaggggagaggagccatataggggggatggggtcgatcacctggagcgatcgatcgcccattagctttaccctatcgaacacatatttccgttgctttttaaacaaagaaattaatttctgctactttttcaatatttagtccatacattgccaatactcctagtataaatatcatcataagttacttaaagtttgacattccatcccatttgaaacttattgcattaaaccatgcatttctgcttttccttccttctatattgtgtattttataatttatatatatgccccgtaaccgtgattttgaaaatatgactcagagcatctcacgatttaaacagcaggctgtatcagcctatgacggatcaactcgtcgacgtacattgagcaaagtattgcgcatgatccttagcatcattatttatcaaattttacatagctcttctcattttgcgacagggcagtcacccttactcccttagcatgggtcaggatgtagatacacagtaaaaaccttctaaaacagtcaggcgatttagatcaaaccacatgggagaaaaagctgctacttgggacttgggagtgttacagatgtgaagtccaggttatgcactatacacactgcttataggaaacagccaactggcaactgcttccattccagtgtcactcttccttcagtatcggcggccaccgccagtggacaagagcactttggtgggtttcttgcctttcttcccgactacatttggtttgtgcgtgtccaggctattgtctgacgctctagtggaggaaatgatgctggcaaaggataatgcgggtgttgcggctggccctgcatagaaaacagtttagttatgccaggatttcactagaagaaaaatgggcactgccgcacactggtaagtgccagcgtccaaaggtgcatcgtgtgtcaccataccttgttcccccgtgctttcacttttgccagtcaaatccccagattcaactcttagaggaggcgagtcttgggcagacgcaaagccaagccgtgcaacatcggagaaaagctttctttcgctggctggtggactcgtggagggtccagcattgtttccaagagcttaaatggaaaatatatacacacatatgaagtgaggcagggcaaccaaccatacaggatgaaacatgcagagaactaaaagcacaattgcaaacatgtgaatgcttcagaatgtggattaggagcactaacaagtatgtgttttgccccaatagaaagtctgaatatgcaaaatcaggtctgttcataaatgagtttatttaccttcaaagtcatccagagagaacataaaatcgccatgtggcccactactgggagagaagcttgtatgttcaaacagcattgcagatgcctgtgcagcagcagcaacttcggctttcactctatcgctttcttcctaaaggaaagcaccaaggagaaaaagtaaatgaccaaaataaaccttacaactataagagtcagtttgaactggtatgcaaacagagctgaacacaaaaaacatctcactcaggtatattcttgaatatattttggcagccaaaacacccaattttaaagaaattgaccagcaactcaaaatattcagttttttttccaaaaggcaaagtctgctcttagcaacctagttataagttatgtctgcttgagaaaatccattctatgtatctgacctcctgtcacagtttaatttccatcctaattcatactccctccgtcccaaaatataacaacttttagccctcaacatttgtcccaaaatataacaacttcttcaccaacattctttttccaaccaatcacaaccctccaccattcacttttcccacctacctccactactcaaccaatcacagccctccatcattcacttttacctacttccttaataaccgtgtccaactctaaaaatgcttatattctgggatggaggtagtactttttaaaacataccccttaacttgcaaaaccattcaaaggaatctctcaggccaaaacaacagagttttcaattgcaaacagtggtttcaataaaatttactttcatggaatttggctcaactccatatactgttaagccacccatcactctccatcccacagtcagtgtccacattgaccaactttaataataattagaaaaacagtctgctcatgaaaaatcgggttgtttcggccagggatgtcttttgaacagtaatgaaactttgtggacatcttttaaatggtacaagagtccaaaatgaaaattgaaccaaggtatcagatatgttatagtacaatgtcctattttctccatgtttccatattgtgtggtacactggtagacatatacatgtataatatgtcttgaaagaaatgcttttaaaccatgtgagatagacaatgattactgtaactggcaagattgcacttcccagttctatcaaagttaataatatgtttcatagcatctccagtcatgtacttggtgtgtcatttctggtaaacaaacacaccctgttctacataacccaagagtaactacacgtctacaccacacttgaaggcactgcgtatatcataagaaacgatggacccatacaacaaattaagaacatctaatgttactaggtgactccttgaaaagcgcctctataaaaaactatttgacagcattattaaatccacagggattaactgctggcaaatctgagaatagtgtccacttgcaaaatacaaactaaagaaattttgaacaaacaacacacaacagttctgactaacaaattttcaaaagtcgactagtcatgatatgactactgatggcgaaatgctgaataaacaatacaaagcagttctaaccttcttggcagttcgtttcctctgtttctctcgcttcttgatttcatccatgaatggagctaatgagctaggaggcagcatatcacccaggtcaatttcacagaactgcgtagttcatagatgacagagcgtaagaacaagcttgtaagtaaaagttagttatccacaactggtttacctggaacgttgttgtcaatgagaagtgacttagataacgatagcgctttcttgtagcttcggattgtgttacagtttctagctccaagatttttccatgtattctgcgtgcaagtaagctggataagtatcaagcaaacaccacgagcaacaaccagatacaaaaaaaaaggagaagagataagcactccaaccagaatgtagtatctcatgcacacaagaaatacattgctcgagcaaattgagtaaaattggttatcagatcaaactaaacaaattatctctgcttacatagtgaaaaatccaattttccataatcataatcaggatgcaatctacccaatactaatacaatacacaaaataatgtgtcaatatgagagcgatgacttttaaggtgtaaacaaacactataccttggtgggagcatatcagaacttccataatggtttataaggcatttcatgtttagcggatgaagaattaggtgttggccatcagatacctgcaacaagatttgacatatcaaaactctgagaatgaaaaaccatgtgcacaaggtaaacaatcacagccagacatacttcagacctggtaaaaattataagtatcattctcatttgaatctatgggagccatacatctctcttctgttttcgatggcattcctttattaaagattttatttgattcaggtgaaatacagagctccgaaacaccagcaatcatatcttcatctgatagaggagatagcttgtgttcactgttctggcgtgaagattgtgcattattagggttccttgatttggaactagttacaggtgagaagctgtcttttaggggagggctgacactaaaatttctgtactcactccaatatttcatccgttcttctagctgctccaaagcggtagaaacgtatggaagtttctccaagtcatccacaaggcctaaatctgccatatgcaaccaattaacaagatctgtttttgcctctctaacagaaagttccacatcagacgtcaaaatgaacttggagaatgcactgcaaggatcttcgtctatagtagattcatcagtgaggttcttaatagaaggagtgagtgaattttttgagcggctcaaaagtgtaaatgtcacattgtcaccaacatgaaaatgctggacttgagtaatatagattgtatacaactcctttgttgagatcatcatgaaacacagtgggcacttcttccagctttcacctttgtaatcttcttttcccataagtaaataacgtaaaatgcatggaaagcaatatatatgaccacatgatgtaatctgtgggcacaatgggctctccaagcaaatagggcattgcacctcacaagggctataatatcttacacatacaatatcttcccactggagcatcttatctggatccattaattctatttcatagcttccagtatccaacacaacaaacttaaaatttgcttgtaggaacaaatctttgttgtatggtctgatcttcctctgtcttcttgtaggatatgttctggggcctctaggctgtggccgagaaattggatcatagtggaaattcagcagataattggcatttacagactgattctttctagcagtcacctgagtaccattcccactagaatttgtagtggatagatcaatcttcagggattccatcaattcaggtctctgaggagttgcctggcctgaggtgccattattggctgaaaaacctgaattcccatgttcagaagagtggcattcagaaaaattgccaacttcttgggtatatgaatcatcattctcttctctagagattctgaatccaactacctggacatattccagattcataagaaaattgaatgtaagtttcataaaaaatcaagagcaacatacacaaatgtttatcgaaaaactgaaatctgatttgaattacgttatgtaaacattttaccttttgggaagtatcaacatattctctgatagctggaaccaccgagactgcaaagtatgagttgcgttgtaaaaattactttccaaatgggtatattggaaactagtaaggcaacacttcaataatatttatgaaaaaaaaataccaatcaatggatatttttattagcaaaatgatgtaatcaatgagcatgctcatagcagacattgtcaacactcaacagtgaatttgagaatcaattgaactaatgaagaacacaaaatggcttctaagggaacagaacttggttgagactgcaacatgctatgtcaaatggggtcactatcttcatgaccccattgttatttccactatttatactagatagcataacgttcatatggaatcactaactcctgaaaaaacataatcccccgctcgctttaattgagccttccccacttttgaaggatagctaagtaagttgtaaggcatcaattgtccaatatggtagtgcctacctgagaccaaaatgtctttacaaagaaatgcatgctctacagcaaagtaatgaatctaaattccatgagacgtaaccattaatccgcatcggcagcactcgatagtaactgaccaattataagcttaaaaacattgatccacatgaatccacacgagaattggtccaattggattacaattaaccaagccaaagctcacctaagcacggatacagaaatctgtaacccacgaaacacgaattaacctagaaatcacagaccaacactcaatttaccaaaaaggtattagagtttctacacaaagcttgggctcaactctacaacctgcaaaattaacaggtaaaaagcttcccacaatcctcgtccccccaaccaacccagtccagctatctagatcagtagatctgcaagccccgccgataatcccctatcgtttcaatcgacgtttagccgtggaagggggaagagggagggagctcgcgggaagcgagaactcaccggagctcgggccgccgctcccgccggcggctgagggcggtgagacgggagccgtaggggagcgtcggccgcggcggcgcggtggggcggagctgttgccatggcggggtccggggctagggttggaagggcgcggcgcgagcggctgggatcctctggtggattcggaaggggagatggacatcaactccgcgcgggagctcggtgttgggtcaaacggcggctcgtctggtcggcggcgaggtggcgggcggcggtggcggcggcgacgccgacgcggtcacggtggcgcggcctttatacggtggtggttggggaagcagacacgacgaggacgcgcatggcttggctggaccaagtccacgtgagccgcaaacgtggaggattatagtattatactggtcggaaaagcaggtgggtcccacatgtaagtgtgacggaatctgtgagccgagtccatggaagctgtgggagggcttatggaggaggcgaatatgcggttgagttcgctggcgttgccgaaccgatgcgacggagctctccacgtgaggatgacgtgtgggcccagtgacccacgcatatggacccagcttatggaatggatgggctggacctttgcttgaagaaattagtatattttgcttctcctaactactgccctttgtccaataacacccctcaacaataaaatcggtacattacatcctccaactttaacaaccggtgcaaatcaatatttttagtagtttgcaaagtggtttttactgacatgataggttgatcgtgcttagactcactaagtcagcatgggctactgtaggacccatgtgtcaacgcccactcttcttgtcctctctctttctttctccaaaccaagccaacaagcccctccgagcacgtccacttgtgagtccgtccaacatctagctccgagaggctatgatgcaacaggaggttgatgatcgaggacggagatcacaacggcatgggagctcaacaacgcgctcattgcaccatccccaagtcggtgctctctccctcatctcctgcgctacgcacacaaggagctcgaagctcctagcgaccacctcccaacggtcggacaaggggctttgggaggaggtcaacagaccgaggacgaaggtcatagcggcacgggaactcgaggagacgctcgccgcaccatccccaagccgatgctctctcccctatctcctccgccatgtgcgtgaggagcttaaagcttccagcaaccacctcctagcagctagacgaggggctttgggaggttggtagactggggatagaggttgtggtggcacgagagctcaaggaggcgctcacctcactatctctctttcatcacttccctctttccacttgggacctagggagggaggcggtggcgaggtggagctgaggaaggcagtcctcccgaagtagtcaaggaagcccaacgagaggagacgactggtggaaaagagtcctatctctccaaggatagtggagacatagaagtctgggcggagcaggcaaaggccttaggcggcaacaggagctcggcgaggcatctcgccaaggaatgttgtgcatgtgcggcgccaatgcatcttggtgcatccatggtgccgcgggcgctagttgatgctaccgagaagaccacctcactcgcctcgccgccacccgagaaggtcgcgatgctctactacagcgacgaggccaccctctactccgctagcgacagtcgcgtccacctcgccaataggctcgcaagcaagcaccaccactcccttttctctccacctccctcgattccgcgaaccagaggaattcctcgatggcggcgaggagggcgagggtggcgacctcggcggcaacggcaaggggcgtggcgagggtggcccgtgccacaacacgttgggcggaggtaagtgccaccgctgcgtcgtccgcggagagctcatcgaggtggcactagggttgaaagcagacgattgaggaaagagacgacgaagaggcgttgtggtcaaaagtagccacggctacagtgccaaaggaattgggtggcagcaagggtgatgcctggtggcggctgtggcatgaccatggtggtgcaagctcgccggagtcgttggctaaggagtgtagaagaagaggaggaaggaggatgatccgacatgtgggacccactgtcattttttttttctgtttaaaatgccacctaagcaccatgtaggataaaaccatctacaaaaacatccagggagtcgatttgtaatagttttcgaagatggggaaggcgctatatccggttttggggaaagaccaagagatgagggagtcagaacagacttcttccttgctagaatagatcccggtggagagtggaggacgtgttaagctaggcctttgctaggacatttggcccattttcataaattcaagtaaaaacgaatgaaccaattccatttcttacatcaaacaggaaaaaagactcatacaagatgagaaaaatatcccaaagttaaacggcgattcttatttagcacatttgcgttcgcagtgcacattttcttttcctaaaaaacattcatctgaaaacattcgtccgaaaaactttcatctggaaacgtttgcctgaaatacttttataaaataacttttgcgttggtaatgcaacttcactaaagcagataaacattgctacgattcagatcgtcaagatgccagtaacaaccttacctttcctccctataaattacagtacaaaacaaaggcaacatctcaaatcaataacggtttctgaccgaacttcagaaccgggggtttacaaaagaatcgaattgccaattaatgatccctaagccaatctgtacaatatccccataaaaatgtcaccttctcctctctctcccctgctgtaaattatttcacactctacgtgactccgaacaacctgaattcctacgcttaattagcgttacatataggagtactagtatcttattcatatactgtatatgcctggctatagcttgtcggcgatccggccgagcgcgtcggcgagccggccgagcacgacggcgaggctggccgcctggtctcgccgctgctcccggtcgagccggctgttggcgttctgcgcctccagctgcgccgccaccatccggctgctccgatccaggatctccaccagcttgctctgcagctcgccgccgcggcggccgtcgtcctcctcctcctcgtcgtcgtcggctcgccgccgcttctgcccaccctgctgctgctgcgtcgtcggcggcggcggcggtggcgtgcctctcgatgcggcctgctgctccggctgcttgtctttcgacgtgcctgtgaaaaaagaagaatagtcgctgattggttagtagtgttacgatacttccagctcagatcagctgttcgtcacgttactttcggagaagattgtgtcgtctgatcatgcaactactaattaccaagtcttttcaactcttcgccggcaaaaaaaaaaaatggaagcttttttttttcaactgtactacacatcgagatgctaatgaaaactgcagatttgctcgtggaaataaaccaaaaaaaaaaagcaaacggattcgtttgctgctactacgattgatgacatattgacatgacactgaggaagtaccacgacgcgtatgatgaaacgataattaattaaatctgcaggcatcatcatctgcacagtacaatgcacatgaatatttcgtatctgcaaagaaataggttaccgatctaaaccatctcctttcatttgtcaaaacaaggcaaaggacacaggaattcacgcctcttcccagctctaaagattggccgggaaaacgtatttatctctcatctctctcattttatgtgtgtcatctaaatagtcattaaaaaaattaaaataaattgacaagattaatatgaaatatatcactccacatacatgtaagttaaaatttaatttttagtagacgtgcattgcaacgggtaaatactattttaattttattattgttatatcttttagttaaggtgaaatatactgtaagaacccgtttggatatatatattattttagaaaatcatgagctgcaattaggagtctgatcgtctcaagttagcatgcgagtttttaaagaaatctcttatacaattccttctgtatttacaaaaacaaacgaacttaaaaaccgacttaaatacggctttgtatttccaaaaagaacaaacttaaaaaccgactcacactcggataacgtaccaaagtaccgacaaaaacatcttcaatttgtataatagtataggcaagttataacaaaaaaagctgcgaatatacgataactattttcagtttaattcattttttttgcaacttatagaagttgaatttggcttttgcatgcttatgaagtgatgtatttcatagcaatctatgttgaggtgacatgcaagtaagtagaggatatccccttaagagatgaaaattcatatctagaggcaatgctgctactactacgtacaaccgtttggcaatgctactaatcttcaggtgtactcgatttgaagcactaaactaaggtattagttttgaatcagaatcatatcaaactgacccattttattcgaacattgcaaatttgaaatcctaaatgccgtgcgctaggaaggaaccgaaagccgtgttcgatatcaaggactgccaatacagagaaagcttcgagggacatggtaaccaccgaatcaattcagtttttggtgggttgccacttccatcacaccacaggggtgagtaaactctagttttggtttcaatggcccccacacggccatatatagctcaatcagttcatcatgcgaaagcagagtttgcattgcgttgcaacaattggttggacagagatgtagtttttgccccgaggagcccactgtttagcactagttgggctagtggctaacatgatggacaatctaggaaggtgaacagtgcaagtacaattgacaatttggatttcctttttcttttggtcttactgtgtgggttgaatttggatttaaattttaggataatacatatatattgtgcaaatgccattaaacattttcaaatttttccgtaacaaattacatgtgatttgaaagaatgacggggcaaacctctcttacgggataaaaaaggtttcccattctaggaagcatctgacagtttactagtaaaaccatttgctgataatcctgaaatttcattgctaagtgacatggtgaaagagatgcatcaagtgcatttgcaggctgcagctacctcctgccacccaaactgataatcataacatgcatcactaatctaaatcgcaattttttcgcctttttgtctacggactatgctgatcaagtcaatggaacagtaacttatttctttttcccttgtgcaacactagcaacaaatctggaaacaaggcagcaaaaggagagagctcgatcgagaaaagatgatgtaaaatgaagtgaaatccgattacctcctttctctgttcttctctggaaaaagaaatcacgaggaaaaaaaaagcaacatgaatcgatgaacctaccaaacgaaccatctctaccagaacgaacacgaaccagaaacaagaaagacaccaggcaaatcattcaaaccctcaccccaaaatttcaatatgaggacgcacagactaaatttgagcactggaagctcaaaattttgcggcaattcaagtcgtcaacgcaaagaggacacgctgaacaatctgtgcgatgggaaccggaaagattcccacctttttcgcgtcctatgaacagcgtaaacacagattcgtcgctcaaaagctaggttttgtagcaaattatttcccgagtttaccgccgaaaagtgctaagagttcgaattcatcgaggaggaggaggaggaagaggggcgagaactctgcttttatcgccaaaagatattgcaattttagcagcaaaaaaaggaaagaaagtcaaagggcagctcaccggatatcggcaaggcgatcaccgctcgaggcggcgcctgtgccgtcgcagcgacggcggcggcggtcgccggcggcgcctcgtcgtcgtcctcctcctcctcgtcgtcggagaacagcgactcttccgcggcggggcggccactgtcgaacaccgtctcctcggctcgggctcgcgtcttccccgtctcctcctcctcctccacctccacctccacctccgccgccgcgcgcgcgggctcctcttcccccgccgcggcattacctcctccggagggggagacgagggtgccgcgcccccggccgtcgagtatgtcgtacacctcccggtcgaagaaccccgggagccggcgctcccgccgcgcgtcgttccgcatggcccagaacgacggctcccgcggcggcgccgccgccgccgccgcgcgctcccactccttgatcttcttgtagtccccggcgaggttgctccaccgcttcctgcactgcacggcgcccctctccacgccgtgccgccggcagtactccgccaccgccgcccacttgggctccagcgccgccaccgccgcctcccccccagagccccccgccgccgccgccgcagcagcagcagccgccgccgcggcgcggcccctcccgccgcgcccgccccctcggccctccaccatgcgcttcccctcgatcagcaccagtatctcctgccgcgtccaccgcggcagcctcggcgcgcggccggacggcgtggcggctgccgcggccgcggccgccgcggcggggtcgccggcggtggacatgcgcggcgcgtgtgcctttctttttttttttttgtggcggaagttgacgtgacggcgtgaggcgggtggtgtaacggagagataacggcgaggaggggaggggacgcgtggggaagaagggaagggggagagagagagagagagagagagagagagcaaagagggcatgaaggaaggagggaagaggggttgtgtcttaagagaagggattaggaggattttggaggggttgttttagttattagacactcatcatgtggaggagatgagacatttatgtagtacactagtactaaattgtaatcaagcatccaagcccaaatgcccaaacttggttttattagggatatattttaaaatgaccatccataatttttttatacaaaaaaggtattgttcttctcatggcattttcattctcctaaacttggtattattagggacactttttaaaatggagagatggtaattttgattgtattctaaatttatgtgatggatttattctttattctcaacatgtgagttgtttacaaaagtagaattccttttgaacatcgacatgaacgaatcaggagactacaatagcttacatggaaaataaaatcatttatgaatgtccttatctttatgtctaaatgtttgatgacaatattgcttaggtgggaagccaataaggagcttttcaattaaaaggattagtaagggaggagggtcatgtgtattgttcaacagccatgggcttagaacaatgttggtatatccgtgtaggaatggatggcttaattaagtgatcaacttaggatattaattgccatagttgcagtcttagccacttccataagctagcttaaagaaaaaaaatgtcctggagggagagagttagttggggcttaaccagaggaatcggtgctaaataccaaatgcccatgatgcctcatatctccatgatgtaacaagcaaaaggtgttttggggttttggaattggagaaacctttggataacaatggtggacattgcaaggagtggtgctgccttaaggaggtggattaatttattgtgtgattaggacttgtgattagagcacaacaataccctgccaggctcctaccgtctctgtcaatctttgtgatgggataaaaatttcttttcttatctttattccacaccaaggggtttaatttggcccattttatttttttagtcaaaaaaaatgtacaggagtatttgatttgtctgtgtgctagacacgtgtctaccggaggtggaattatatgggaggccaattgctaaaccacatcaactagtggttagcactaaccctcttgaattagtgcttaaccttgcccctaatggctaaagttcacaaaaaaggatgaccacgttaggatgctgctactaagagaataagatgccagacttaattattcttaattaattgttcttttgtgaaaattgaaaaaaaaaataaagatgtaaggaaccagtgtatagaacatgtactatctgcataaatgccatgatgatgatatggttttgctcaaaattgtgtataggtgtgcatcatatatatatggtgctataagcaggttggacctcacctaatagagttgtataattagggctccagtattggtttagctgtccctgacctggccctttaaatttgaggaggtccatttccatgccatatggcatttgaattgacctcacctactgccaagttcctgtcaacatggttgtaaacaactacactgcttgtattttggtacatgtatgatgtatcctctagctttcccctatattattattgcagcttgtagaacacatcttaattagcactgcgatgagaatatggagagaagccccatgattgaatttcccttttcgatgcatgtcatgcaatagttagccgtttcagagagttagcttcgcactgataattagagagatcaattaattagtggaccaaatctagctaattcttgcactaagagccaaaaagaacatcattagggggccctttcgaacgcgaaaatttttcatgcttttgtactaataatgaaaattacacataattctgtgagagagttcttagaaaagagaaacttagaaaaaaaaatcctaaatagtaacagagttcttgatctcggaaaaaaaaagatatcttttctcctgtcactgtggagacactgtttgactttgattggggagattttataataattcccagtacggcaacaaaatcctgagaaaaaaaaggagagaagtaaataaaacggcggcaaatcaaaaggttgtgggagatttgggcatgatcctaagaggatatcgcccatagagagagagagagagagaggtcccaaaacgagaggcgtggctcttccattgttccatgcacctcgcttgcttgcttgctcgctcgctcgctcgagcctcctgtaactttcagtgtcaacttccccttttctgtgtgaccaaatgggcctctcccatccatctctcctgccctttcagccactacaagaggctacgcatcctgcaacccatttacacatatacatatatactccatccgtcccataaaaaaccagcctagtaccgaatgtgacgtatcctaatactacgaatctagatatacatatgtttagattcatcgtactataatatatgcaaatatatatatgttacctctggtttcgaatgtatgtaactgttggccagtacaacaaaaattttaactgtgaacatcaataaacattaaatggttatacgtcatgacacatggaagttttatggctattttgtttattttttttaaacaaaccaacgttatataaaaagaaaaaaggtatattttttctttaattatatgtgtccatgagatgagacgatgacctcttcttcctctagctggatgctgatgtttccattgcgatgtgccctagctatgtgtgggggagggaagggagggcagttagtagctttgcaagctagctgatgggtggataggtcatggtgatggcaactgctttcattagaaatgaaatgaaagaaagaaatcaagaaagaaagaaatcgaggatgaaagatattgagatagggcaagatgaggtgtgacaggtgcctctcttgttggtgccttgccatcctatcccatgttgacgactcatcatcgatctcgatcttgtgtccgttttgactttgttttcctcctttttctcctccttttgcatatgtataatccactgcaaaattaaaatatagctgtgtgtatatattagcatatgcgcacgtgacgtgacgacgtctggtttttctctattccttccttgatgttgttgtcacgttaattttaataatttaatggttcttggtgtacttcctgatacctctaaattcttttgttggtttttattatatctgcgtttgtgcggtaacttcttgaccgcaaaacaaaattgaagttatccaaaatctcgaaaatttttaaaacacaaccatacggatgaaaacatactgatactgattggaattgaacccgacagtaattctgaaaacattaaactatatataaaaaaagcacgtatctaactgtcgaaactagatttcggcaataataaaagggggtggctatcaagctggaaaagtgtatgggtttggagacaaaagatttatacaggttcaggccttcttataaaagaagtaataccctactcctgtccggggatgaatccgccgagtgtattattgattgtatgatttagagaaaatcaacatctgcccctagaggcgcccggaccccccttatatatgggaaggagtccgggttacaaaagataatcaatatccctaacggaatacacagatatagattaaatacagccgtgaccgactaagtctcaaggtgtttccttgttgtacaagtcaagaaacaaacccgagatacaaataagatattctatacatattcggtatcctatatccagcccaaatagtatcgccgtgtagatatgggatatccataatctccacagtagcccccgagacctttgcagtcaaccatcgtagccttctcaaagatagcaatccgagtgcttcagattattcatgccaaggcccaccgagtagcgaagacgaagactgtaaagggcgaaaagataaagaatatggtgcatcgaatagatgcacctaattaggtgtagcccccaactatgtgattagttaacaaactaaacatatagttgagaacaatataataacacaatcatgcattagatggcaaaagcatacgcgtcgcctaaagaggcattctagccgactgctttttagccataataaaaagaatccgagtggtttacactcgaaaaggttcacgaatgaacacactggacaggcatccgaatataaaactataaagattacccaccaaatattataaaaattatggtaacaaaaagactaatagcctaggctatgtcaagttaccacaataaaaataggtatataacataccaaggaaatgactatgataaaaacaagtcattccaagttaacccaaacagcttttgtagcctaaaaaagcttacaaaaacagcataacgcttttctgcagggcaccttttaatttgcattgcaataactccaaagaattatatgaccgcataaaaaggattttgtcagcattgggcaacactattgtgtgcataaatattgccaaagcaaaatatgcctaagtccctaaggaacacaatgggccacgctgttaaaagtattgggctgaggtactgttcaggcctaggcccatttgcacctccgatacccttaacaaaaaatccgagatccaagcgacgcttcgtcttccccgccggaacgctcgccattttccccactccttgctacagtaaagagctgcgccggcgaactagggttcatcaatccgtccaaatccaccttcgaaaagtgattaaaaatccttcccgtgatccaccgcctcaattcctcacctctcccaagccatccatcaaatcaaatcagcgcattcgggtaaaatcgatggcggaggagaaagaaagctttgaaggccaatgggcgccatccgacgtaacggaagagaacttgaaggagatggtggcgcacggcgttctcccagccaaggagatcatcgggtggcggccagcgtgcggtgaggcttttccgacccctgatacacatgagatcgtagtcttctcgcatttcttctatggcggcttcgctcttccgacctcgaaatttttccgcgggatcttgaacttttatggaatcagcttgcatcacctaaacccaaattccatagtgcatatcgccaatttcgtccatgtttgtgaagcctttttgggaatcaagcctcactttgccctgtttcgccggatcttcttcctcaaaccccaaccgaacaagagcaaaccgtgcgtagtcgggggggggcaggattccagctaaggggaactctgagccaaaaatacttctctatgcccttcaagacttcaaacaaagggtggcatgcaaactggttctacgttcagaatcctgagcctgctcttcccgggtactcttgtcttcctccggtgtaccaagatacctggaactcccttccaatcggagatgaagcagtccaagccttggagttgatggaccgcatgttaaaactcaaagaacaaggtttgcaaggagagcagattactcggcatttcatcaaatgccgactggcgccaattaaagaaagatcccgtacagcttttgagttcgacggcaagcatgatcctaaccgtgaagaacctgactctctggatttcaaaatcatgaaggagagaatgtataaaatcttctcaaatgccattgtcgttagctactcacaccagctgccagttgtgccatataatgcattcaatccgcctccgcaggtatgtatctgaaatcttcaacttatgaccaaaatagtatcttgtcttcatgttgaattaactaaccatggaggcatcttattcaggaatatgtattgatgaaatccgatcccccaattgctcagcgacgatctcctcgccagcacaccattcagggaagtggagggccgacaatcatgtcagacccacaacctcaaacctccaaaccggctgggcagacaggtcctcgcaagagaaagctggtgcttgatgacgacgagggcgatgacagcaacaaatctggggacaagggcacgcccaacaaactcccgaagcataccatgcccaggaaaaaactggctggccgtcaaatgccaaagattagaacatcttccaggtataaacctctcgataccattttgtttcggcatgcttcccttatagaaattatgctaaatatcgaaagggcactttgcaggaaaccgtccgatatagatccaaccggaaaagatcctgatccggctgtgacagaacaaaatatatccaaggacgctgagccgactgctgaaagccagccgactgccgaaagccggccgactggcgcccatgcttcggatgacaaggccaatccgagtgaccagccgccgactggaaaccagtcggcaacaactgaaactgcaacaacccgagagcccccaactggaaaccagtcggatgtaggtcctgatcaagaaatccctgaagttgaagcgcaagcgacatcttctcaaggaccagaggctggaaatgactcggtggttggctctccagataaagaacaaggatcatctcgcgctcagccaggcacatcctcaggtaactcatcttctcaagtgatatcgttctgaataactccagcttgctcgtctaatgtcttggaaatacatcaggaacactaggcgatgacgaagaaacaattcctcgcataaaggcggctgatgactcccgtccccctatcttactcaaatggtgggacgagaactctcaagtttccggcattgttataaatcgccaaaaagaagatgaggaagtgtgccagctgaagaaagcacttggagaagccactcgcattgtgaatgtaaatcttccgggtgactgcctttaataactttgttttcttgttagcaaaactaatccatgaaccaccgtgcagagaatccatcttcgtaatgaggccaagactgcaaccttagaaaagctggttccacatttgggaactcttgaagccgttagggaacagctacacgaggccaaggagtatgccaagaaaacggagaaggaattaagggaacgaattgcacagctccaggactccaacttcgagctgagtggttcatcaaaaggtaatctctagatctgtcccatttatactgtcatagctggatcctcaaacatttggatttcaaacagcgcaagccaccagaatggcccagatggagaaacagattgaagccttgaaaagagacaaggtagaactggctgcgaaaagggactcagccttgaaggaggttgaaggtactgccaactgacaatttgaactgtcctctctttaatgcagcagattcttattataaatgtattttgtagaccgtaaaatcaaatcgcaagctcagtttgatgtcctggttggtaagatcaagaagcttgaaggagcaagagacgaagtcgccaatgtcgctacaccactcgtccaagctatgttccttaataacagtggtccgagtgcacttgacgcaaccgaaatctttgacaagttaagagttgcaccggatgtatacttcaagaacatcaagaaagctggaagcatgggagctagcatggcattagcgatgaccaaatccttgtacccaagaattgaaatcgacaccattgatggatttgcagatgggacaagcgaagaagctgctcttgatcttatcaacaatgctcaaaatgcggctgacaagattgcaagcgatgtggtagatcaattccgcaacaacaaccttcagccgagcaacgataactctgatgatgaaaggactgattctgactgagtatgattgtaacaaatggaggcataatttgtactatactggtgtatttatgctgtgcttgatagttctagccaagtctttgatttcttaaaagtttttatcaagctttgttgagcctaaaacccaaataagctattaaaaactttcagtcctcgcaaactaagtagaaaaaaccaaacaaggcaatgatagaccaagtaagcaaattaaattgataaaaaatcacactccattattataatgatagcccccgactgacaacttcaagaagaaaacttgatgttgacagtcaagatagggaagtacaatgataaacttaagcgtagaaacgacgaagatgctcaatgttccaagagttgtcgacaagagtaccgtcttcgcgcttgagtcgataagaccctggccgggtgacttcagagataataaatggcccttcccatagaggagataacttgtgccgatctcgtgtagtttgaattttcctcaaaaccaggtcaccgactaaaaaggcacgagatcgaacattgcgattatgatagcgccgcaacccttgtaaatatcgagccgaccgaatcaaagctgcttcgcgggcttcttccaatcggtgcaagtcatccactcggtcctcttcgtagcgttcttcacggaaatttcgaaagcgcaaagactcgaattcaacttcactcggcaacattgcttctgccccatagacaaggaaaaaaggtgactggcctgtggcccgactgggtgtagttcgcaaagaccaaagtactgatggcagctgttgcacccatttgccggcatagggttttagccggtcaaaaacacgcgctttaatcccttgaagtatcatgccattggctcgctccacctgtccattgctcatggggtgtgccactgaagcgtagcaaatcttaattacaaagtcttcacaaaagtctttaaaaactccgccagtgaattgtgtgccattatcggtgatgatccgattgggcactccaaatctatgcacaatgctgatgaagaagtctcgagcattgtccgctgtgattgtgacaaccggtttagcttcgatccacttggagaatttatcaatggccacaaagagatgcgtgtaaccgccgactgcctttttaaacgggccaaccatgtcgagcccccaaaccgcaaacggccaagacagcgggattgtttgcaactcttgagctggtagatgaatttgtctggcgaaaaattggcaaccttcgcacgtgcgcacaattttgtcggcgtcggacactgcagtaggccagaaaaaaccctgccggtaagctttgccgacaatggtgcgtgcagcagcatggtttccgcatatcccagaatgtatgtcttttagcaattgtctcccttcctctaaagatacgcagcgttgcagaattcctgaagggcttttcttgtataactcggcttcatgcaaaacataaagtttgctccgccttgaaatccgctcggcttcatctttgtcttgggggagttcttgagaagtcaaaaatcgtatgaggggctctcgccagtcggcttcaaccatagctacgtcatgagtgtccgcatcttgagtagtatctttatgaggtacggtcggtgtataaaggtgttcgacgaaaacatctgagggcgccgcctcacgcttggatccaaaattggcaagtctgtcggcggcttcattgttgtgtcgaagaacgtgactgagctcgagtccatcaaatttgtcttccaatttgcgtacctcttgtcgatatgccatcatgttgtcgtcaaggcaggaccactctttcataacttggttaacaaccagctgtgaatcgcctcgaactattaaacgctttatccctagggaaattgcaatccgtagcccatgaaggagggcttcatactcggcgacgttgtgggacgccgaaaaatgtatccagagcacatagctcaatctttctccagttggggaaatcaaaaccactcctgctccagtgcccgaaagtcgtttggatccgtcaaaatgcatggtccagtgctccatgttctccgcgggggtatcctcctggcactcggtccattcggcgacaaaatcagctaacgcttgggacttgattgaaattcggggcttgaatgatatgtccaaagacatcaactccaaagcccacttagcaatacgtccgtttgcttcgcggttgtgcagtatatcaccgagtggaaatgatgtaaccaccgttaccgagtgaccttgaaagtagtgagatagcttcctggtagtaattagaataccatataacagcttctgaacctgagggtacctcgttttggagtcggctaggacctcgctgacaaaataaatcggtcgctggactttttggacatggccttcttcctcgcgctcaacgaccaaaactgtgctcacaacctgggaggtggctgatacatacagcaacaacggctcctgcgggtgtggtgaggctaagactggtggctcggtgaggagtttcttgaaatcttcgaaggccttctgtgcttcgggtccccactggaagttatctgttttcttcagtagcttgaagaagggcatcccccgctcgccaagtcttgaaacaaatcggctgagcgccgccatgcatccagtcagcttctgaacatctttctgggtacttggcggtttcatgttgaggatagcagtaactttctccgggttggcttggatgcccctatgagacaccataaagccaagcagcttccctgacggtactccgaaggtgcacttttcagggttcaatttcatcctgaaagcacggatgctcgcaaaggtttcttctagatccgagatcaaatcatccttttgcttggtcttgacgactacatcatccacataggcttcaacgttgcgaccgatctgcgttgagaagcatctctggatcatgcgttgataagttgctcctgcgttttttaatccgaacggcatggtgacgtagcagtatgccccaaagggcgtgatgaatgaagtcttcaagcagtcggattccttcagtcggatctgatgataccccgagtagcaatccaaaaaactgagaagctcacagccggcggtcgagtcgactacctggtcaatgcgaggcaacccaaagggatctttgggacaagacttgttgaggtcggtataatcgacacacatgcgccattgccctgttttcttccgaactagaaccgggtttgccagccagtcgggatgaaggacttctttgatgaagcctgctgctaacagcttggttaattcctccttgatcgcgtccttcctgtcttgtgcgaatcggcggagtcgttgtttgataggcttggcatcttctttgacatgtaaggagtgctcaatcacctctctaggaataccgggcatatccgaaggtttccacgcgaagatatctttattattctgaagaaaggtgatgagcgcgctttcctatttacaatctaactcggcgcctattacagcggttttagtaggatcagagggatctaggggaatctttttagtcttggcttcgctttctccactttttgaagtcttggtggcaggtatttctccttcgctcgccgtggctgcagccagtcggatatcctctcgggcagacgccatctcgcgagtttgggccatgtcgcaactctccttgtcgcatgtgacggcttgcttgatgtcgctccgtagggataggactccacggggaccaggcatcttcatcatcatgtaagtgtagtgcgggacggccatgaacttggctaacgccgggcgtccgagtatggcatggtatgctgtctcgaaatcggcgacttcaaagctgatattctctgtgcggaaattttcccgagtgccaaaagtgactgggagggtgatctggccgagtggagttgcggataatcctggaattactccgtgaaaaggcgcattgcttggttttagctcggagcgaggaatctgcatatcatccaaggtcttggcgaagaggatattgagtgcactgccaccatcaatgagggttctgtgaagcttgacattacggaccactgggtctagtaccagggggtaccgccccgggtggaccactcggtcaggatgatccgagcggtcaaacttgattgcaatctctgaccatcgaagatactggggcgtgtcgggctgaacagcattgatctcccgttcagtcaacttctgcttccgtttagactcataagccagggggccgccaaagatatggttgagctccttgcggtgatcttgaaaacctgccggggtgtcaccgtcgtccttcttccttgacgtgctttgttcttcgtcagaattcttccgtgcagtcttggtgtattgatccgcgaattgcttgtagatgaaacaatctttggccacgtggttggagttaggatggtgcgggcattgggagttcatgatcttgtcgaacgtgttgacgcgcgaacgctgtcgagaagagtgactggcggttgcaacaagttccgcaggcttacgcttgcggtccttatgattgttacatccacctcctcccgtagccggcgtacccttgttttgcttccaactcggacccgactgctttgatgcggtgacagcgtcttcagctttggcgtactcgttggctttttcaaacatgagcttgactgtcctgggaggcttgcgcccgaacttgccgaccaattcttcgtggcgaatccctttggtgaatgcggcgatgatgacgtcgtcggtgatgtcggagatcttgttacgttgttcagaaaatcgccggatgtaatctcgaagggattctccggacttctgaatgacgttgtaaagatcatattgtgtgccgggacgctcgaaggtgccttggaagttggcgatgaagtggtcgcgtagttcggcccaagatccaattgtaccacggggcaatccatggagccaagatcgggcggaatccgctaaagccactggtaaatagttcgccatggccttgttgtctcctcctgctgcgcggattgcgagaccgtagacggtaagccacgattcggggttagtggtgccgtcatacttctctattccagtcggtttgaagccggctggccaatccactcgacgcaggtcgtcggtgaaggcatcttgttggccgatgagatcacgcgctcggcgccctgcttccaaagctcgctgacgtcgatcctcagcctccttcgcggtccgctcacggtcctgctgctcacgccgtagccgttcttgttcttgtgcctgatgctcctcctccagtcggcgacgttcttcggtctcccgggcttggcgttgctcctccgtctcattattggccatgaaaacgccaaagtagagaggggtatagttgtcatctaggcttccgtcgaagtcgtcgaagtcgttgaagtcgttgtagcgagaactaaattcgtcgtactccacgatgtcagtaggacgtgagtcgacggtgggagagctgttgtagtcatctagctgatccgtcgaaaccgtgccgagtggttggaggatgacgccgacttccctgaagctaggcgaaatcggtgttaaggccgacttccgcctaggcctacgggatgaagacgctgtcgtggtagagacggccgctaaatcgtcggggagcttcatcaggactggtgggtaagccccatcatcttgatctggtgtcgttggagaagatgcgatctcggtcgagtggtttgaagccgactcggttgagatggtcttgaagtagctttcagccgcgttcgggaatccgaacgggaccgaaatccggttctctcccgactggtttgactccgagtctaggagagagatcttgccgaagttgttggtgatgaagtcgaggctgccgaaccgaaacgtctgcccgggtgggaagacgaggtcgtcgatgccggagacggaacccattgcactgatcggcgaaaagcttgacgctacccctacctggcgcgccaactgtcgaaactagatttcggcaataataaaagggggtggctatcaagctggaaaagtgtatgggtttggagacaaaagatttatacaggttcaggccttcttataaaagaagtaataccctactcctgtccggggatgaatccgccgagtgtattattgattgtatgatttagagaaaatcaacatctgcccctagaggcgcccggaccccccttatatatgggaaggagtccgggttacaaaagataatcaatatccctaacggaatacacagatatagattaaatacagccgtgaccgactaagtctcaaggtgtttccttgttgtacaagtcaagaaacaaacccgagatacaaataagatattctatacatattcggtatcctatatccagcccaaatagtatcgccgtgtagatatgggatatccataatctccacactaacttaatatgactatattatataatgatataaatttaaagttacactatgtaaattacaaaatattacccctttagccatatactcaaattagggatttggttgagtagttgatggaccactaaagtatgggccaaatagtaacatgaaccacagatactgggtatttagaaatacagtaactattgtattgtagaaatagtaatatccataaaaaagtaaagacaatgaaatggttggtacaacagttccgtttctatatttctttaccatttatattttcattctgtttggttaatattttcatataattcttttggcaagagttaattgaaatccaccacaattttgatagggtagctagggacggaaaatatatatgttgctcgatttgataggaaaatttgtgttatgagcatatgaacattgattgatgttctttttttgttcagagaattaaactaaccctacatctgcatgcttcactagagaatattcttcgactctaaacttgaattttctcatttttcgttagtatatggttttttgcaaaagttttttttctaaatagaagttgtttaaaaaacttaaataatttttttaagtttataattattaatacttgattaatgtgctaatgagttttctcgttttgcgtgcgctaaaattctatccccaaatgaggtgatcgaatagagctttcaaataaaatctctcatggtccctcaataaaaaaaagggtgaaacttgccggtaaaacgaatttgaaaatctccagtaaaccactcacctcatcacctacctctgttaatttctgttttgtttggcttgtctttccaatggagaaaaaaaactaaacgaaagacaaaattgtaggatcgaaagacaagaactaagccaaccagagggggggtgaatggttggtatacccaaaaaccgaaaacttttagcgaaaataaaagttaccctcgaaatcgacggaagtcggtctgaccgagatttatctgccggtctgaccgaagcgtagccgccggtctgaccggtgttgatcttccggttggaccgccctggaatccctgtcgcgcctgttgtcaccgccggtctgaccgcaggtcacccgccggtctgaccgccgcgatgccgccggtctgaccgtcggtgtgtcgccggttagaccgccgaaacccggcgaaacacaaatcgaagaactctaaaagtggatgacgactttatcaagtcatgtgttgcaataaaaagaagataaacccatctataatataacaagcatgcattaaagtataaccatgaaccaaagattttacaattaagcttgaatcaacaatcaaaattcatgatttcatatgatttataatgcaacatcttaacaagcacataggttgaagaataaacactaaacacatatacctattgcatttatcactctttctcaaataacctttagcacaaaataaccaagagaatttttttaaccttttcttttcttgagcctttttgctcatatttttctcttttattacgggtacgtccctatcgtcaagactgtttccagggattcggctccaattattttgctcacatcgaatacgtcctcgtcgtcaagaccgtttccaaggattcggtattcatttttttcatattttttattctctttttcacaatgagcaattaaagctatttgaggaataacaattcaataaagcatatatatagagcatttataaatcaaaccatatgctagcatcaacattgcatattttcttaattcaagtagaatttaaatgtcatgcatcatctcccttaaaagcaaaatctaaatctcatgaaaagactagaatacatacaagctatgctagagacaaataaaccttcaaagtattgctagcatgcacaagaaaataccatatgcataaacaaagctctcttttctcaatttttctcattgtcatattattgcttgataaaaccatgaggtacaaactccccctcaaaccatgccaaaaggatgaattatgcccaattcaccatgaagaaaagcaaagcgattagaatccaaaggtttagtgaaaatattagcaatttgcaactttgtgtccaaaaactgcaattcaacatctctcttcttaacatgatccctcaaaaagtgaaaacgaatatcaatgtgctttgtgcgtgagtgttgaacaagattcttagcaatgttaatagcactagtattatcacaaaagagaggtactttctcaaaagtaagaccataatctttcaaagtggataaaagccaaagaatctgtgaacaacaactagcagcagcaacatattcagattcagcagttgattgagcaacactagattgtttcctagaagaccatgcaatcaatgatgtaccaagaaaatgacatgttccactagtacttttcctatcaattctacaaccaccaaaatcagcatcgaaatatccacttaagtatatagaagatgaagtagaataccaaattccaaactcaagtgtatgattcaaatacctcattattcgcttgaccgcttgacgatgtgaagcacgaggagaagcttgaaagcgtgcacacaaacacacaacaaattgtatatctggcctagaagcagttagatacaacaaagatccaatcatacttctatattccttttgatcaacagcttcaccatcttcatcaggatccaacatagctgtataaccaattggtgttgaaattggcttgcaattctccatcttgaaccgtctcaaaagatcctttgtatacttcatttgatgcacaaaagtaccttgaggtgtttgcttaatttgcaatcccaaaaaagtacgataactcacacatcatgctcatctcaaattccttgcgcatagtctcagcaaaatctacaaccaaagcgtgagtcgaaaaaccaaaaatgatatcatccacataaatctgaacaaaaagttgattatcaccatgcttaaaaacaaaaagtgttttgtcaacctttcccattataaaacctttcgcaagcaaaaagttcttaagactatcataccatgctctaggagcttgtttcaaaccatacaaagctttagacaatttaaaaatatggttggaaaaatcaggattttcaaaacctggcgattgtttgacataaacttcctcctgtataaaaccatttagaaaagcacttttcacatccatttgatacaatttaaaaccttttgaagcagcaaaagccaacaaaagtctaattgcctcaattctagcaacaggagcaaaagtttcatcaaaatccaaaccctcaacttgagtaaaaccttgagcaacaagtctagctttatttctcacaatcaaaccatcctcattttgtttatttctgaaaacacacttggttccaataatattatgtccagaaggtggttcaactaaagtccaaactttgtttctctcaaaattttcaagttcttcatgaatggcgttaatccacgattcatcggttaatgcatgtgacacatctttgggttcaaaagaagcaacaaatgcagaatttgcacaaacatcatgagtcgttaccttagaccttgtagtccgctcacctatattaccaatgatttgttccggcggatgtcgtcgttgaatgtgcaaaggagcatctcgaacaacatcaacagaaccctcagccgacgaccctggccggtctgcccgcacctcctgtgccggtctgaccggaggtgtgacggtggtctgaccggcctggcgcccggtctgaccagccgagccgacctcctcgtcgtcgttgtcgtcgctctcgtcttaaaaaatatgaccatcctcctcctgaacctgtgacagtgtacctgcaatatcgggtctagtacctggactagcctcatcaaaagaaacttcgcaagtctcaacaattttgtttgtctccaaaataagtacacgatagccacgagtgtgtgcggggtaaccaagaaataattcatcggtagaacgtgcctcaaacttatccaaatttccagatttcaagacaaagcatttgcaaccaaaaacacgcacatgtgaaactttgggttaatgtccaaatcgaagttcataagaagtttttccaagttttgatttcaagaaaacccgatttgaaatataacaagcagtgttaatcgcctcagcccaaaattttctaggagttttatactcatccaacatcgttctagccatctcaaccaaaacacgatttttcctttcaacaacatcgttttgttgaggaacacgaggagaagaaaattcatgttcaagacctctttcattgcaaaattattcaaaagaagcatttttaaactcaccaccattatcacttcgaattcttttcaaagaaccaagaaattcaagatccaatcgaagaaacaaaccacgaaagtgttgaaaagcttcgtccttagttgccataaggaaaacccaagaatatcgagaaaaatcgtcaacaataaccaacacataccactttcctccaactgattgcactctagctggaccaacagtgtccatgtgtaatagctgtcccggtgcatccgtcatcacagaaacaataggagcatgtgaagaagcaaccatcttagcatgacgacacggtgtacaaaccaaatgaagatctttcttaagtttaggcaaaccacgaacaagatccaaaccacttaacctagtgagatgatcaaaaccaacatgtccaagtctacgatgccaaaacatcacatctttatcaaacttagcaaccaaacatgttatcacaggtgaaccaggattttcaaaatcagctttaaacactcttccatagcgagaaatattcaacacagaatcaccacaagaatcaaaaactttacttccagttttcttaaagtgaacctcaaaattttcatcaacaatttgtgaaaccgaaagcaaattgtactttaagtcctcaaccaaagctacattctttaattcaaatttttcatttaccttaaccaaacctatagcgagaacgacacttgtagaagcatcaccaaagataatcgattcagtcttggatgccttcttgagtaaggagaaccaatttttatcaccggtcatgtgccgcgaacaaccggaatccacgatccacacgttctccttccttgccaccaaagcctacacacaagcagaagtcgaagcctcagtactggggttagatgataataaaaatttaggaatccagtactgaaacacacgaccagaagatccaataagcatatatccacgtgcaaaatcaattttagaattttcagaaaaattcctccgaggccggtctgaccgaagtacagtggccggtctgaccacttctgtaccaccggtctgaccggtgcccgggatgaatgaccctaatttt

SEQ ID NO: 7020 - DNA, 11420 bp, Oryza sativa
cctatacttgataatgatcccatctcattaaagaagcaatgaagagtgaacattcatctgaatggctaaaagctatgaaagatgaaatgaaatccatgagtacaaataaggtctgggacttagtagaaattcccgaaggagccaaaacagttggctgcaaatgggtctataagactaaacgtgaccccaagggaaatatcgaaaggttcaaatcaaggcttgtagcaaaaggatttacgcaaagagaagggattgattataatgaaacattttctccagtgtctactaaggattcattcagaattattatggcactagttgctcattatgatttggaattacaccaaatggatgttaagacggcattcctaaacggtgatctgtatgaagatgtatacatggcacaaccataaggttttgttatgaaaggaaaagaacatatgggatgtcatctaaagaaatcgatttatggactaaagcaagcatcaaggcagtggtatctaaagtttgaccaaatcataagacaatttggttttaaagaaaataaaaaggatgactgtatatacactaagtttaaggagagtaagttcatcttcctaatattatatgttgatgacatactcttagccagtaatgacaaaaatatgctactggaaacaaagaaatttctggcctctaagtttgaaatgaaagatctcggtgaagccacttatgtgttgggtatagagatttaccgagacagatcaaatggtgttttagggttatctcagaaagcatatatagaaaaggtactgaagaaatataatatgcataattgttcagcctcgcctgctcctataatgaagggggataagtatggaaaattccaatgtcctaagaatgagtatgaagctgcgctgatgaagtcaataccatatgcttcagctgtcggaagcataatgtatgcacaagtgtgcactcgccctgatttagcttttgttaccgggatgcttggcagatatcaatctaatccaggtctagaacactgcaaattagataagaagaccgtgcgttatcttcagcactaaagacctcatgctcacatatagagagtatgaaaaccttgcagttgttggttattcggactctgatcttgcagggtgtgtcgatgataagaaatccacgtcaggttatatattcacccttgcaaggggagctgtatcgtggaaaagctccaaacaaagagttactacatcgtcgacaatgcaggctgagtatgtggcatgttatgaagctactggacaggcaatatggctgaaaaactttatcccgggataacaaaccactcaaattatactgtgataacaaaccactcaaattatactgtgataacaaaccactcaaattatagtggttgacagtatatcaaaaccactcaaattatactgtgataacaaaccaacagtatactattcgagtacaacaaatcaagtgcttctgccaagtacattgatatcaagtaccatgttgtgaaagaaatgatccaggatcagacaataagcgttgagtatatgaacactaagttaatgttagcggatccacttacaaaaggcctaccacccgctgtatttaaagaacatgttgccggcatgggtttggtagaaaaaccttcgatcctggaataagaaggaacctatatggcactgactccccataaaactaaggcggactcattttgtaattaaataggaaccatagtcacttggttcagtggtgcttaattggctactgtaatctagtgtcttgatgtactgttttgttgaaaagtgagtccataagtttgtataagcctaatgtaataagttcaaagagctcgtaagattaaagaagtttattttaaaatataatggtatgctatagtcactggattctttgatgctttatattggtcactgtaatccttttgtcttggtatactattttattgagagatggacttataagtttagcctcacgatcaagggggagaatgttagtgtgaacacaaaatatgatcttgcggctaaacctaaagtcggcaaagagatattttgtttagggcgatcgctacagtgatcgatctctcatgaacatccctgatcgggggataaccgccataccctagtgtcggtttcccctgtgtgcagtggctataaatagagatcaatacctaagtgttaaaccttaagagatttctctcgctacccgatcaagcaacccactgaaacacagggaagaaccaagacacgattctctctgtgcttccaaactagaagagaagaaagaagaacaaagacagagagatgggaactccaggagatcaaggtatgatccaatcccatttcaatttgtagttccactttgtgccaaaccgacccaaagcaatccaacaattatataatgtattatgtgttttatttatttatatattattagatactaaatatcaaatacatattattttgacaccgtgtcattgtcctttatctcccactttttagacttcgttcgatcaagctcattgtgtgagcttccagggcacgcaaaatggtgtaagtcattagcacaggattaattgagtattaaattaaaaatgataataaatttattttatttgtaaaaaacttttatataaaaaaatttgcaatacatgcaccacgtaatataccatttagtagttcgggaaacatgctcgacataaataagggagtagccaatccgataaacgccttagaacatagccttaaatgtattatttaggtcctaaaaaattaataaataatacacaatatatttgtatacttggtcaaccatagcctaaaatatcaaacttatgtcctcactgatccccatatatgtaagttctatatataagccactatccactaattgctaaataatattatttacgaggtattcatgcacaatgcacctaaaaattagctgatatctaattagcacgtgtgtcatccagcaccgaaaataaatggtgatactaagtgcacaaccatcaacaaactatagagtaagtagacgatgcaaacaatatttgactacaagtagattacaactatgagtaataccattcctacacttctataaacgctcctaagatatcacatgatactctaataagttagaaagaatctatgaaagttatataaaaaagtaaacatctatccataaatttacacttaaatcgatgatccattactttcaaccattaaattaaattagatatattaaagtaatccctctgtcttaaaaaccatataatatgtctctacatacgtacacaactcctatataattacgtacacaagagatataaaaagaaaaaaaaaaggaagagtgtgtgtatgtgattcgtcctatctggtagttttctctttctttccagctctaagattttcccaaattgaggatatataaacatagcaaccgctcctagcgaggtggtaaaacaagccatgccgcggcgctgcctcacgccacccattgcttcactcccatctcgtcatttttctttaaagtatttttttactaataatgtaaaagtcaatcatatgagctcatataaatatgtgcagatgcacactatgaatacatatacatgcaccatatccctatattagaaaaatattcattcagaaaaaggaaaaacaaacgtatgtacaagagactaatattcgctagaaaaaaaaacaacatataactacattatatctatttttatgtcatcctcatccaaataattttaacaaattagctcaaattccaacgcatattaacccccgtgtacatgcataggtgaattagatgtataatataagaaaaaaaatcaaaacttatattaacttgtaagttagcataggataactgcgtgagcaaatattttttacgtggtcctcatcactggagctattagatagtcgaatgatcaaccctgcttttttaaaaaaaatatctatactactgaaatttagtactattgattaaatgcttaaacaaattatgtctaccctatacaataaatcaactctaagacacataaagactttcttatcacctccatcttgtttcacttcttccataaaagatgccaagtatgaatctcaactggctacattatagtaattatataggagtatacattattcggttaaggtgatccgagtaagatgctaccgttgataataatgcttaactggcctgctacttaccgataaaattatgttaccattgagaagcacgattatatcaatgcgggacccatgaatcaaggcattagagctaaatccttagcggctatagtcggattcatccgatcgtcagaggagcattcatattcatatataagtttaattgttttatcctattaattggtagaagcggtatttttaaatatttatatatagatttggacctgtgagacatggcacttggtatgatgtggatattaactttttatggtattaatgatgtattgggtattttttatgtaactgcaattccatcgattaaaaagacactcatacttcaaaacaatggtaataagttatggcgaatggtgaatttatatataattgggataaaatgatttttggttggatatgatagccattctgatcatttactacatcaaaattaatggtctattcaaggtaaaaaaaaattaatggtctatttcttatagtgaatagtgaatatggcgagatatgatttcttttagtattctttttataggcaataaataaattgtccgcgtatccgcgcgggcttcctttctagttagtctaataaagctcaaaatgtgctgctcatattctagatagtgtaccaattttaatttttaaacaaaattggtgtttttttaaagtacgttttaaactaaaaacaaagatataaccgcaagtaccgtgtgggagcgtcacaaaaattcaacgtagaaattcgcttgtaaaagcatgggtgcacgaacactgacaattatcacataaactatattttgagaaacatagtactaacgttacgctcaaaacacgcgcacactcatccctataaacacacactcacatcctacccattatccatttgagtatcttcagaagactggaccgacaaattttgtgtttgacaaaatcaccacggacgctttattgttaatgggtacatcacgtactacttaaaaattaattaaccataaataaaagcactcgtgttaactataggacttgaatttgataggatagttccaccataataaacttatagttgagctatagtcacttcgcaacttatatttgttaatcacgagtggcatgcctagataattattaatttgaatctgaatttttaagttaagggaatcaacaaaataagaaacctgctgctgactattaataccgaatccaggaattactaaatcatgagaaaatataactgagaatctttgtatttaggctatgtttagatttaggggtgaaaatttttgccgtgtcacatcggatatacggacacatatttgaaatattatacgtagtctaataacaaaacaaattacagattaatttcgcccgtaaactgcgagacgaatttattaagtctaattaattcgtcattagcaaatgtttagtgtaacaccacattgtcaaatcatatagcaattaggtttaaaagattcatctcgtaatttacacgcaatctgtataattagtttcttttttatatttaatacttaatatatatatgtccaaacatttactagaagatctaaacagtctcatacttaggttccgcttgcgaataccaatgagattatgtacgtgccgacgtcgatcaagccccagaactatactaaagcccagttggtgaaaagaagatatgagatcaagacgctgaggagaaattgacttgcactgaccttagacacgggcacacggcgatcgagattaactcgaattttccacgggcgcgtacaagcggataaggacagggtgtgcgcagcgacaagcaaggccggttaagagcaggtataataaagtacgataagccggcgacacaagcatccacgtcataaaaatcataggtggaagagagagaaaaccagagagagaagacagcgggtgctaatgcaatcgccgagctctagcacaggaaatgatgcaagtcctgagaaccagccctcagtcctagcttttgcccaataacttaacaattgctccatcaaagattgagtagaaggaaacaagtctcattaaaaaaaatcaactgcttagggatgtgtgggtaggtaacttaacagctagttattatacgtatcatctattagtaacatctattacttacgtgtataaatttttaacccatcaacggacgatactattaaacttaaacttgctctaaagaagtagtagagggaggccgggacagatatcacaaagaataaagagatcagggacagattccacgagaaggtttgccgatatgccgtggccgcaagcgtccaagcgcaagcctacagctgcttacgcgatgccgctcgtgttaccgcctgcgacagaaaccgccatgcacgcgcggcggccgagagagatagagagagagaaaaaaaaaagagaaaaagaagaaggcggcaaccaccagccgcccagccagcgacgctcgctgccgctgcttcgtccgcctgcgtgctgggctgctgccgctgccggtcttcctcctttaatttgttccatgcccttgtcgcgtggctgtgctttgcatgcgttcgttgcggctaggtcagagtcagggtcaaagtaggagtagtgcgctggtggggtggtaggagtaacctgtgactcgtctgcgagaaaggctgctcctcgggagaggtgcgttgagtgtgcgcgcgcgcgcgatgcatgggcatggcaatggcaattttgacagcggtacgtgtggctgcgtcccatgcggcggccgtaagcgtgcggtcgtccatgtgcgagtgtcggttggcgcattttggcaaaaatgccacggccggccggccggcgccgcgcttgtgtccgcttgcgttggccggccggcgccacccgccgagctgttgtgctgcacatgcgtacgaacgcgcgtgcatatcgtggagctctctttctacgcctctctacctacaactacaacagggctagtacagctactgttccatggtggtgcagatgcaaaagaaatcaaatgcaaatatgcgacgcgacacgtcggctcggcggtgaggtccaggtggcgagagagagagagagagagagagagatcgatccgggagttgatggcgcgtgctgcgccccgcgggaaaggcaaggtgggggcagacagcgccgtcgtgtcccgcgagccacgaccagccctgtcgccccgccaaagccgtcgtcacgtcgatcgatccatcggtattacttctacgcgcctgcgctgcaggccaggccagcggaaagtcagcgacgtactactacccctacgtgccgacgtcaccccggcccggtgaggcgatccacgacgtggcgtcagtactgatcaagttcatgcatgcgtgcgtcaccccggtgagagcacagcattcctagtgcatgcatgcgcgcgctcttcttgtccatcaagttcgatcgcctcgcgcaggaccatgccctcctcacctagcttccagcctgctttattcttatggacgatcgcccacggactactacataccgaccctgcagctcatgatacagagtaccctgttcgtgataactccagttaaagtatgcatttgtgtaaataaggatcttagagcagctccaataatctacctaaatcaaatcaagatttagtttttcaaagctctccaactgatttaacaagttaaacttattgctcactccaaccgtctctctattaaccctatcaaaaataacaagacccatatattaacctctagttccttttttccttccctttttactacccaacaagctagagaaccggaggtggggacagcgacgctaggaggggtcggagtttaggacggtggcgctaggtggggccggaggcggggacgatagtgcaaatcgatagtgagagttctcctatacggattgtagcatgaggagccgctcgatgccgtggatatgatgtcatcgggccacatggctgccaggtgcccacctacatcgaagtcagagacctagtccccttgccctagagagcttgatgtgctcagcagagaggatgggtgggaggacggcaaggggaagagcttgttggctaaggtgtggaggtgggcaaggaagacgtagaaagaagctatgtgcagcgacttgcgaagacggcgtacggcaaggaagatgacttcccatccgcgccgccataggagcacgtgttgatgccgtccctatccatggccacgggtgtcgctgaggtcctgcttgtcgcaggcgtgcccacagccggtgtcaggcaagtcgcagggatgtgcctcgagctgctgtccatgcctatgaagatcgacgaggcggggttccgacgtaaaggaggtggttgatagccggcactgaagaacgtaaagtgatgacactttggtgatggaggcgaagtcggtcattgacagacgctggagcacaagaaagataagaggggcgtagccacgtgggaaggaaaaatagtacgtgtggcccactgttggcaagtgattttggttggccaaatttggtcagtgaggagagacatttggtcggtcggatggcttagcaatccacttggcgagattattcgagcacaatttttcgttagaattgtctaattttagcttaaacagtgattcggagagaggttgttggaaattctctcggatcagatccagttaattgtacgtgtgacatagggactggtaagcaagaaacatgcaaacaaaatcatgcgctgcctatcactactgttggacgtaattgtcggcagtattaattcagttcagttcagttcaattgaagaagagtaaagagttgaatcgcagcgcagcagtacagtagggccagccgcgcgcccagccggccggtagcccggtaggcaggagggggccctatacgtgcaggggcactcgtacaaacggccgcatgcatgcataaatgtgagccctttttggagccgatcgatcatatcgtacgtgccgaaagccgattcgccggagcccttgcgcccttttcccccaacacccataaatatggcagtcataccgttgctgttcctgtttcttgctccatcatgatccatcgatcgatcgatgctggagtactgcaagggtgtggctggagtctgtctgtctcgatcctgctagcagtactacgaattaaacccagccataagatatacaattgaaattctttatatttcaaaatggaggttgtagcttactgatattttaacgagttcagttttagttggatgcaaaatttgtactcctgtatgcactatatatttggattgatcatccaaggtgtctcaagattcgtcttattaaattgacaacaaaggttactatggtccggctcatttctcccacaagagctggattaagataaagattttcatggcacgttttttaaactgctaaactgcacgtttcgtgcgaaaactttatatataaaagttgctctaaaatatcatattaatttatttttcaagtttgtaataattaaaactcaatcaatcatactccctttattccaaattgatcatcgtactccctccattccaaaatataggacacaactactttttaaagatgtttcataatataaggcgtgcatgtatgtatggcaattaattagcatctcttctctcctaaattattattatttaaatcatacactcacaagatgcttaattctagggtgcatgtattgtgttagttggattgattcaaacaaagagataataataattgtttcttgttctttgagtcaagtgtggttacgccttatattttggaatgaagggagtataatttatttgaaaatattcctaaatgatcatcatatttatgttcattcattaagtctattcgttatttgtgcattggggtaaatgagcattgatgcaggcatccatacacacaagtgttttgatttgctattggctagaaaatagtggggattgtgcatgcatcaagtttattgctaaagtaaatgtagcatgagagagttattatattttcttggtcttggtgcactcatataatatgaagatcaattaggaataaagggagtacgttaataccacctcgttttgcataaaaaaataatcttcatcttcatcttcaggagaaaagaacaccacctatgtctcacgataattttaatttgcttttgttcgtcaatcataattcatactccatatattaatataatattcttgtacaatactccctccattccaaattgatctacatataattttttttaggttattcctaaatgatctacatatttgtgttcatttattaagtctattcgttattttatttgtgcattagagtaaatggacattgatgcatgcatccatgcacacaagtattgataacccacatgcaatatcttgatttgctatttgctagacaatagtggggatggtgcatatatcgaatttgttgctatagtaaatacagtatgagagagatattagtatttcttggtcttagtgtacctatgaaatatgtagatcaatttggaatggagggagtaccatttactcataagaatttgtttctccgtccttgaatataaacatttatattcttggctttgtaatgataatgcccccttatttaatgtgctaaccgcttaaacttttttaaaaaaagaaagaggggggggggggggggaatccccacctgagttccataaaccatcgtaagagagagtttacacagtttgagattaaaaaatacagattacagatcatcttagggaggacgatagagtttccttccaggaggaaacgaccactttgtcctaaacactctgtgctagcagttgaaactttgctgagacaattgataaacttgtacatttcgtcctccatatataaacttgtacgtttctgtttccagcaaaagttttaatcagctttcaacaatttataatggtaaaatggtctttttatatccctcaacggaggaatgctaacgaaaacctgacggctatgataattttggaacaaagattgtacgatgaaattttcgggaagttgggttcgtcgatggtactttttagatgggacgtttatcgatggaatttctttgattttctaaaaagaatatactccatccgtcccataatgtagcaacctaggatgggattaggctcatcctatgactgaatctggacaca

SEQ ID NO: 7021 - DNA, 1997 bp, Oryza sativa
aggctcaaaagattcgtctcgcggattccaggcgagttatgaaattacttttttcattcgtgtccaaaaaccccttccgacatccggtcaaacatccgacgtgacacccaaaaatttccttttcgcgaagtaaacaggccgtaaattccatgatgtttgactcagaagccaagtaggagtagctcgaataactggagaaggaaacgcgattatttatatttggaaaaagtacgaaatctatcgcggtcgaccgaattaccccctgaaccacaaaaccggacattcttcacccccaactttgcaaaccagacaaataacccccctggctcaatccgcggtggttttaatcctatatggcagtccagtcaacaattcatttataaaaaaataggtggcccccacctgtcagtttctctctcttctatctctttcccaatatctcactctctctctctctctctcttcatcagtgttccatgagaggccgcacctgttagggccgtcgccgccgccgacgtccagaccggccgccgcgccatgctcaacctcatcgccaccgggatcaccggcggcgccctcgcataggcggcgctcgccaaggccgccaagcccatcaagctcggccccccaccaccgccctccggtgaaggagaggttctacatgcagccactgccaccagcggaggcggcggcgagggtgaaggaggcgaggcggcagcgggcgcgggctattggcggggcgtgatgagctaaggtcggcgctgggggtgggtgcggaggcgggcgcgggcggcgggcgggcgcggaggcagctgcaggtggcggggcggaggtgggtgaggaaccgatgacgacaactgggcggggcagaggcgggtgcgggcggcgggcgaggagctgaggacggcagcggggatggttgcgagcggcgggcgggcgacgaggcatcttctggcggcgggcgggcgaggagcggacgccgatgggtggccggcggcgggtgatgcaagcggctcttccgcaatcgcgcctccgtgaggcgcctgccgatcccgggcgccgatgacgagcacgtcggactccatcgacgacgacgacgagaagctctgcccgcggttgtacctcttcttgacactggcggcggtgcccacggcgagcgtgggctctagctccgccgcctcctcctcgtcgtcgtcggtctcctccacgtcctcctcctcggggctctgcgtgtactcgaccgccgacacgagccacgggccacgggcagaccgcgagccacgggccgccgtctcgggcgacgccgcctcacctcgcgcttccgccccgtccgcccccgtgcaccaccgcccaccgccccggggcgctgtcgccctccgccgctcgccaccagccgcgtccgccgctgccacttgcgtcgccgcccacatcctcccctgcaccaccccacgaccgtgagagagagagattgaagagagaggaagaggggaagggcatgtgggtctcacatttttaaaaatagaaaatgctgactaggttgccacgcgtacgtcacgtaggacaaaacctcgaggggggtaattcgtctggtattgaaagttccgggtgaacaatatatgatttttgggttcagggatgtaattcggtcgaccgcggtagttcagaggataattcgtactttttcctttatattactggtagcaacgcatagaaattttagctggtctggctgaccggccggccgagagctgcagagaaatttcttccattctgaaataatagatgtttaaaaccatgctcaatcacacacacacacgcgtgtaatattaagatttaacatgtgaaaatggcaccaattatatatttctgttgtagtgattttagcttgtcatttacatcatagtctaataataggaacatgtttctcatttctttaatcatatatacgtaaaatcatttaaaaatatacaacagtgtgaaaatatttttaaatgatt

SEQ ID NO: 7022 - DNA, 3071 bp, Oryza sativa
attaataatagactgtaagagatcagcccctaaaacaaaaagaagaggagacaagggatctccttgcctaacccctctcttgcagtaaaaagactttctaggaacaccatttaagagaactgaagaagaagcagaagtaaagattttctcaatccagcctagccattttgaatcaaaccccttatgcctcatgacatccaaaatcacagaatgctctatagtgtcaaaagccttttcaaagtcaagctttaacaaaataatttctctcttggatttctgacactgatgcaaatactcaaaagaccaagcaaggcaatcttggataatcctagctttgatgaaaccatattgattttggtgaattagactaataataactgattgcaacctgtctgctagaaccttttttattagcttgagagctatactttgcaaagcaatgggtctgtaatcattaaccttctcagggtttggctttttaggggcaagagttatgaaactcctattcagactttccaagcagagagtaccttcacaaaactgagcacacaacatatagaaatcttgcttgatcaaagggcaacatttttttcataaagaggccattaaacccatcaggtccaggggccctatctataggcattttattaacaactccatcaatttcagagatagaaatattatcaaacagattgataagtgattcacaaggtgataaaagctgactaagctgaaaatgcattttgggcttagaagttacccccatcctttgctgaaaagtctagaaaatgacagcagccttctcagcatgcccagagagagagataccatcattagatttaagatgagtaattagatttcttttgtatcattctgtagcagctgcatgaaaaaatttggtgttctcaccaccaaacctgacccatctaacagtacatctcttttgcaatataaatgtatgtatctcatatatagaactgctttccctttgataatatttctcagattccactcagccaaagtaagatccctgagttcgtctattctgtcaatgaaagaagtgaccaaagagcagtttttaataaccaaattaagcctgggcaaacccttgctccacttttttaagcccttccttaagcttttgaacttgagagagatatttttagctgaatcctggcagttcccattaccacaccaaattgaagagaccaaataaaaaaaaaccttcatgctccacccaaaaattttcaaacccaaacagatttgttttggggatagaagttacaatttgaaccacacaaggtatatgatctgaaacgactcttgagagagatttgactaaagtatttggatatgaggaagtccaagaaactatggtaaaaaaccagtctcattgctcaagcaggggagaatcttgcatattactccaggtataggccttccctttaagaggaatctcaagaattcccaaattactgataacctcattaaaaaatcattatatcattcatattagcaccatctctatttctattgtcaactgatctatagaaattaaaatctcccataaggatccaattctcattatcaggaatatctaaatcatgaagccattgcacaaaggccgatctatctggttcatggcaggggccatagactactactagagtccaacattcaccattatgcttggaacaaaattgaattatgactgcagatctagagatgctgatgacattagcagagaacaaagcaccaatccagcaaactaaaatgccaccagaagctccaactgagggagagaaacaaaaagaatcgaaccgttttggggctaatttctttatataagcagtgtcaaaaaaatctcttttagtttcctgcagacagaaaactgaacaaccactctcctcaatattttgcctaaccgtcctccactttccttcagctctatgattactcataattaactagaggtaggcagggaaacacacaatataacaaagttatactgctggaaagataacaatgcagaggaaagcagtcttaattgactgtagaaggaacgacaaaaggaacagcaagtagcaaacctgcacaaccagaggggggaattattacagccaaaaggaacatgaaggacatgagacttagcagacacataaactctaaaccaacaggaaagaatcacacttttattcttgactcctaaaagagactgcaactggaaggacttaattgttcccatcagattcatttggagcccgcgtcttcaaaaggtcaatttgggacacctcttgagcagaagcaccacacagatcaactgccatttttttgcaaaagaggcacgagcagtcagcaggcgcaccagaagcatcttcagtggtagacccttcctcaaaatccgagtcttgcagatcacaaccagagaacagaagacctacctccttggccacttgcttcaatttcttaactgatttacctctaggtttcccaatgccctgatttggatctggctgagtgagaaattcatctttgtgcccatcatttaaagcagacaatctagaactccttcttaacccaacagttgtgattggagtgtcaatccgtatttttggactcttaactggagcaggaagcacatggaccacaggtgggactataaccaaatgagtaagcataagtactggcaattccgattccattccctgactatagcccagatgctgcctagaagaagatgattcaccaggcatatatggtccaatactgagagcagcccaaaaggaagaatcttgagtaaagtgtttatcaaacatggtatggggaaacctctcacaaagataattatataagtcagcatgaacagaatccttatgaaccacaatactcttgtctggagaggttaaagcctgttcatcagtagatatgctgactgccgaatccgcaatacttgcagagctagcagaagggtaagtagatagagagcttgcagagcttgcttgcaaatcaatcaacaactgtgggacaagaggcataagatgttcatcgacctgattacctccctgattatc

SEQ ID NO: 7023 - DNA, 11244 bp, Oryza sativa
gtctcgcaatttcccccctaactgtgtaattagtttttttaatttatctatatttaatactctatacatgcgtccaaagattcgatgttatgcttttgggaaaaaaagtttctgaactaaacaggcctaaagtctttttgccttacccatctctaattctatattctatatttctagatccatcgatgtgatgtaacatgttgaaaaatgcatatagcagtatgaaacaattgtaagatggtatgtacgcatagaagtattcaaatacaacacagctggttttttgaactgcgccaccggatttgcctcccaatactactcatgctggtggaggaattacatatactaaattacttacttgccgtttaaacagtggttggtgaatgaatctaccggattcccttcaagcagcaggggtggatctagcgtgaaggcagcggaggctcgagctttcactactggcaattggatcacgggagccctaattaatgaagtttgcactaattttcttttgtcatacatatatgatacatataaagggagggctatatatagttttatctagttattttttaaagattccttactattttttcttggatccttcacaatcacgtcaaactatagtagatttatggagcaacttggcatgttaattacacgtcaaaaccgtgcactagatgatgatgagtagccgttgtgcattttattttgatatattctagggacaataatgcgtgcatcccatggattttttttgaagtagttcgagctggaactaacgaatatgaaataatctccgttgggggcaaatgaataatactacctcgattaaatatcttgtttaacttatgatgtgtttcatttgcaccctgcacctttgggccgtcgcttataaagttataattaagagtttaatccattctacgtttgtcattgcaaagcacatgtcctacgatatatcactgataaagctcaattctataatatactattttgtcattgtgtggttagtcaatcattaatcaaactccgtttaaagagaaaatgacaattttacgaagggtaaaaatgagattctgcacaacgccgtgacttgtgaaataattttggatgataaaataaacaagcaattctatttttcgcgaatgagaaaaaaatatcccaataaatgaaatccatacgtaaacatggtactctaagagaaatgataattttctaccttaacagagttgactagcagttaataactaacagtggtggcatatatgaaagaaaacgaattgcttgatagtatatcatagaattctgcttcatcaatggcacatcctataattcatactttatcgatggcatatagtggattaaatcattaattaaactaaacaagtaataggccttaaatagctgaactgtacaatatattaaacatttcaatattctctttatgttcttactagtgtacggcaaaatacctggtttaattaccgcaccggatatattaacccggtagaactgaaaaaataaaatatgccacatgaattgaaaataattcatggcaataacctatttttattttcatgtgagttttctaccctcatactgtagactttgatcaaatattgtgtcaaacactacaattttgttttgaatagatacattatgccaaaaaaaaaattcagattttaaattaaagtgctttcataaaatgttggtagtatatatacgattaatattaaaatattctatgaaaatttaatgaccaaagtttatttctcaaaattaaaataaaaacaaaaggaaggtggtggttatgatatcgagctagctagctaggggacaaacgtattgcagatttgcaatgaaaaaaccattatattcaaatatttccatattatcaaatagaagactggcatgtataactaatcagtcgtgcatcacatatatagtatcccaaaacgcactccaatgataagatagaatcatagttgactaacccctacacgatgaatgattgtttaaataatgccccgtttacttgcaacaaacagttgactactttgtcactccattcttttacacaatttgtgcttatccatttactggagatgtctgttcacaattattgccagctaggatatgagagtgtacttgcattgtctgtttttttctaaggaagagtgacatagttattgcaacatagatcatattccttagatcatattcctttctgcttattcgttctattattactgtggattatttatttcatgttttttaaaacaaaatatttttactatattaattataccacttattctaaaccatataataacacgacagtcttcactattatatacccttattataataatccaataaaacaacatcatctttcccctcttgcatacactcttatgtaatgaaataatgaaagagcctcatcatcatacatatttaacacaatacaaacatagacacatatatacatatgtgcatttataacttatccatataaatgcacacatgtgtgcatactcattcctgtaaacgtacacacgcatactttactcctatatgaacctatccaaaaggcttgatcaccatatccttatcagcagagactaacccgcggagccataaatacaacaaaattgaaaccgattaatttctagataagattgacctgatttctttcaagtccaatcaactcccagttaacagatggtacttaactattcgatatccctcctcctgcatgcatcacgcatatggatgatcgatggcaacgtcgatcgttgtgtagcgtttggacccgtcgaccgggttggcgacgcccccggtcatccccggccgcatacaccgtcctctcctctccggctctccgtatccacgacacgccgccccgccccgctgacgcacgcccccggccttatgctagctagctagtagtacaatatagtatatggcaatccgccatgcaaacacatatacgtcggcaagctagagcctgtagctaagctactccctctgctccatccgtattagttactaatttatatggtactttaggtttatcaaatagaatttaattaagtttgtagaaaatataacataacttctaataaaaataaattcactataaaacatatttagttatggatttagtggattaaatctatgtttgtagatgttgtcatgtttttttataagaggtgttctatgatattctctggtagaagtgtactgtttatttcttcttaatatagatgtcatgtatatttacgggggaatatccaatgaaaaccatcaaataagtaaaacccgtgaaaaccatatctaaaagttttgtaaattcataaaaaaattactagaggtaggtataggcatgaaatacattcataccagatctcaagtccaaacttaacttcatttgagagaaaaaaaaagacaaatttcgtatgaatagtgttatgttattattcacctcaaatttgtttttttgtttttcccaaatgaagttgagtttggacttgagatttggtatgaatgtactttatgtgtatacctatctcttataattttttcatgaatttaaaaacttttagatatggtttcacgggctttcacttatttgatggttttcaccggatatgtccccatatatttatactatcatatcaactactgatataaacgtagtagaatattttctttcattggtactacaacttagaaaataactaccaaaactatttctaagaccataatactggtataatatatagtaatacaagtagagtacttattatatcttaaagaagtttaattttaaaaaataaaaatacagtgtctaactacctagctgttgtatgctcacgagtatatacatggatccatttagcagagctacagctcttaaaaataacttcaagagcatacttagagtagaatttgtgaagcgcgccaaacccttgcttcacctagctctctagtttattttactgagatcagtaaagcctgctccacttctctcctttatatggatttaaaattgtttggttatgccacggctctagaaaagatggatctgaacctagatccggccatattatataggagtacgtagctagtactagcgtatacgtccttgccgcttagctcaaagtcgtcgccctcctccctctatttattcgccccacccctcgctcgagctcgctcgcacctttgccaccccccaccctcgatccagagacgcacgagccaaccttgctctcaaccgttaatttcctctctccacgactcgacgccgcacgacaaaccagcggaggcgctcgcgcgctcgccttctcctcgccctccatttgaacaaccccttcaattaactcctcctcgatcgctagctctctctctctcgttgcctcctcgatctccttgaatcgatcagcggcaaccagcctgatcgttgtttgctagttagttaatttccgtcgccgatgccgacgacgcctcgtcgcaaggagccatgaaccgctgcaccgacgtcgagatcaggaacgcgctgcgcctcctcgcgcccaagcccaccgaggacatgtcccgcctccaccaggcctacgaccgcggctagcttagcgagtagctgctactagcgttcataatcattctgtgttccatcgctcgagttcttgaacacgaagaggagcttagtagtttgtgtcagctgttagtttaatttgtgcatagttcgctgcgcgcggcgacgacgacgatgaaggaaggaggaggaggaggaggggagaggaggaacatcctggccaagacgatcgacaggtgccggtcgtcgctggggcaccggacaacgaggcgccccgcctccgccgccggcggcggcggctacggcggcgcggccgtgccggcggggttcttcgcggtgctggtggggccggagaaggagcggttcgcggtgcgggcgcggtgcgccaaccacccgctgttccgggctctgctggaccaggcggagacggagtacgggttcgccgggtgcgagggccccctcgagctcccctgcgacgtcgacgccttcatggacgtcatgtgggagatggagcaggccgaccccgccgcgtccccgcgctgcggcgcgcgcttcggcggtcccgccgccgccggcagcggcaggggctacgggggccacggccaccaccaccaacaccaggggtaccagatgatgagcaccccggcgaggctcctcgtcgccggccgctcgtgatcgatgtctcggcatctctcgcgacgccggccatcgccggcgatctcgtcgtgcccgtccttagttaatcaatttgctgtctgcttgtaagtactatagtaggcacgtgttgggcgcatgcagagagaggtttgttcacctgcttgcttgctttgctatgctatgactgtgatagggtaggggtgttcaagttcaactgttcatgtcaacgtttgtttccatgtcgcgttcgatgtatctctgtaatcgtagttttgtatgtgtgagtgatctcatgcgtgttcaaccaacccctaagtcgataaaagatcgatgcatgtacatgcatggtgttttgttcagtgttaactgtgaatcactatgaataaaaagactatagtgaatctcagttctgaatttcaactagttttactctatcttttgtggtgatgtgcgcccttttgcatctgatttcaagcaagctgccaaaaaaaaaactatttagaagctagctcttcatttgatgaatgcgtgcatcggttttttcttcttggatctcaaggtcaaccgtttggtgagcctccccggagtctgaactcgacaactcagcctcgaccaggagagactacgcaaaatgaaaggcttttcttgagctagccgtctcctactctgcttcgagagccaatagcaaaaaaaataatactaccaatatgaacaagtcaatatcacacgaaagtctaatctaaagacaacttgatccgtataaaatctgaagaccagttgatcatcttctgcggttgagttgggcctcgtgcatgaggcacaggttattctgacctgccacttgctgcccttggagatgctctggatttctaaaacggtagcaggacacaatcattgccattatgatacaataaaaatgacctcagcgttctctgtcctctacagaaatgtcagagacatcaacaaatcgtcatcgcaaacaagaggacaagtttgacaatgctcacagaaatacttctagcagggatctagtataaatggattcgggaaataagacaaggaattacaatatggcttggggcaagttgcggctgaggtcagattgcatgccgacctgaagaaaatccaggcctagcctgccgggattacatttccctgtgtacagtaatgatagcccacccaaccaaacaaccatgacgtctggacgccacaactcgacaggtgttaacttcagaggcatataagatggctacacaattatatcggcatcaactttttttgatggcaatatatctgcatcaatcaaacaattaaaaaaaggaacacaaatccaacataaagatgaatcagctcacatttaaatatgtgaaacagacaaattctcgatatacaatcagggttgaaggctggcactaacgttacagctacatacaccttgagtaaccctcgataccacttctggcaggtcaagccccatccaaacaggatgggacaatctagttctactgaacagcatgaaagagccaaaataaaaaatacagtacaatatggaaaactgcaagtgtactgctatacacccatttctgtacaatgtttgctgcactggtctatgtaagctggtcaaaatcagagatcaactatattatgtcaagttaactaatgtagtgataaacatcatctgacctctagaatccattggacaacatcctgaagcagctcgaacttttgactgaccgcaacatttaggaaaacccgcatcttgctgaggaattgcgatgattcttccttgcaccggaatgcacctccacaggagcactgctcagataagtgtgccgctttcacttgcctgcagcggaggcagaccaaatcctgcaagtgatagagcctctctcgctgacggactacctgtagaagtgcattttccatctgttcacgatggtatggctgcccgcactgcggcacagcacacctccactcctgaccttggagtgttgaatcacggcagagatcaagatcccgacaatcattgcaatagctgcaaacacgatgttgttacgtaagaattagtaacatcaagggttgatgaaaactagtgcttattcaccagcccaatacttacaaacttgtgaattttacgaattggaataagccatggtaggcaggtagtacaaaatagtagctagtacatgattacatatagtcaaaagcatgccatattttggaaaaaataattttgacctagtttattttccttcttccaaaacattaccatgttttcaataatattgttatccataactttctttgactcttaaaaaaatggcaatcaataatgcttttacagcaaatggcatcacctacacctgacctaagtgaatcggtcacagttgtatccatagacgtatgtttacatcttaaaatgttgattatatggaaatcaaataaacagtttctacaatttatcttagaggtaatacctgcaaatcacattggggagagtgaatgaggcacatggatcttggaactgtgcttctggagcaaactcctttacacgaactaactttaacaagttcttcctcattctctgtcagatatttttcaagtcaggtcgtggcacagttttcttagaatttagatacttcaattttgtaataaaaactgtcaaaaatcaaggcaggaaactcctatgttttgaagagatagaaatatgggtgtgaaaagatatacatgcagttccacaaaaccacaacatatattttgaacagtggatcctcatttagcacatcagtgaaagaaaatattatatttttggatacaagttctacagtaaaagcagttaccatcagttcacaatggattaagaggcgaattaccagaatatcatgctgaacattctgatcaagagcaagaacagcacatatatgcttaatgaactctaatgcagcatctcccttatgtgtgtgaggatcaggttctctgtttgtaagttcaactgattcggacttgccttttcctttgaaatgatgaagtatatcacttacaatcctgagaagcttgtctgcaaagtaattacttatctgcaatatcagatatggaattcagattaaagttgtgtatgttagtcgcactagatgataatcccagtcccaatgttaatatatactccctccgtcccaaaacataacaacttttagccttcaggacttgtcccaaaatataacttcttcaccaacattctctccgcaaccaatcacaaccctccaccattcaattttgccacctacctccacttctcatccaatcacattgtgtgtttaatggcgcttccccatgcttggccgatgtcctccgagacatcgctaatgagggcgctctttggtgcctagcaggagctgctaggcttcgtgatctctttactaggacttggctgctattgcactagtttgtgtttttttttcctttgggtgtatggtattctgttgtatccttgatgggtgggtgtcagagtttttctctaacaccgtacaccttttcttctctatcttaatgaagtgatacgcagatctcctgcatgttctaaaaaaaaccatgtccaaccctaaaaatccttatattctaggacggaggtagtatatactttgacattgagcaacatgcatttcaaatttgaactttttaacagactattaagattgaccttggatagtttcatcataacccatcatatatatttcttataacctttgactaacaaattgttataaaaactatctgaattacccacactagatactgcagtatttacattttattttttatacaactctaattgctatgattgaaaatatatttcaactgaaacagatcagatgtcaaaatctgaccaattttcaaataatctagatttttctcctttttttttccaattgacataacagtttctaacctctcagaattgaatgtggtagctcctaccaagtcattttcatttaactgggagatggttactggttaccaatttaagattgcactatagagccacaaaatcacctgatcacggagatatcctatgacttgaacctcaaggttttcagcagccatgattgttatagatggtgtgcatgaggtctcatcccttgtagttgatcgaagagctacttgttctttcatgtatttccatggaacatacaaaaactccgatacaattaagacaaagtgatcctgaaatttttggaaggaaatgttacagaaaagtagcaaatactctaattccaggatagtcgccaaagttgcagtcagcaagcagaagcaaacaagtgttagaatgacttaaaaaaactgacttgtgtagctttaggcaggtattctgctatgttccagcttgagacgatgtcgatatcgttatcaccatctgagctgccctcagatgttgcattttgcattttagcctgaataccaccatagttatactgaaccaaaacaaaatatggaaggtgaaaacatactctataagggcaaaatgaataaaacaattcatttgtggcagcaacgaaatgaacaaacctggtccatgaaaagtaaggagtgccaataatgcaaaggttccagctccacccactcaaaaatatccctaaaacaaataactttagtttcacctaagagataccccattcaaatttgcagggggaggtcaaacagtaccttgtctgcaatgttttcagtaagctatcacagtatgcacgtgctgacaacaggtcaacttttccagtatctattattatcttagaaaagttcgcaaagatgacattagctccaagctttcgaaactctgccaacatgagagcaaagaccttcttcatgacctgattaagtttgataatccaaaagagaagacatgataagaaaagttagacaagaaaactaataaaggtaagatgattatgaatagaaaaagatatttattgtaaccagaacgacaagaagattcgcaatatcaacaaaagaaaggacagtgcacttagttacatagcttacattatgaagaagatgatggagagctgggtcatgaagtttcgatcgtgggctgaaaaaacacacacatcaacatgctaagaacacataaagttaaaaaaaaaattcactccctctggtcatgaatacatttcatattcagtatcaacgcagtatccaaagtccaactttcataactaattgatattgtatacattcataaaacccaataaaatcataatatttttagagactaatctctagatatgatttttcgtgtttctagcttaaatatttaagatattgatactcaaagtttcaaaagtacagctgcatgtttgttcaaatggcatgcattttttactagagggaataataactggtccagtgcaaacacataaataattacctgcaaagccaacggtagagatgttgcaatattgcatcagcaaacacatttccagaagatactgcatctgaaatgcatcgctgaatgagttgcttcagcacttggaaagcaggtagacataaggtagcatcatcgaattcagtttcagtgccatttggaccagcaggcatgtcatttgcaaagctaccgatcggccctccttccatttcatctacttgactgctctttaggagagaattgacagccaaatgatggatctggggaagaaatatgtgcacatgtaattcaattgccagaagatacaaaataagcatgccatactttattgtatgttgaaaaggcttaccttaagctcaacagcaactcgtctatacgcaccaggataagtaagagcaggctggatgacctgtaaaattaagtcatatttagtaaagcagcacagaaacagtaaatgataagcaccatgcaaccttaggaaataaaggcttcttacttcatcagcaaagcaagtatctccttcatatgtgcctcctaaatcgggaataccatcgtcagatatccatagtaccta

SEQ ID NO: 7024 - DNA, 11739 bp, Oryza sativa
tcgtatttcccaagaaggcgagcgagaacgggcgggcgcgtggggcttacgtgtgacaccgcgaatcggaacagcagctcaccgcgacgcgtcgccacaccgttggctcttctgtttcgcccgcgggcggcggcgagcgctcgctacgctacgcggcgcccccactcctctgccctccatggcgctgacgcgtcgccatcgaggagaggaagccggcgacccgtcccatcacccaggtgaacgtgaacccatctccccatctgcctctcttcctttccttttccttgattggtctcgctttttcgtctcgaacgcccacggggacccccaaatttagcacgagcagctcaaccccacccaggttaccgctatgacggatggatggacatggatggacggatgatgaagaattttttttcgttacctggacgtcgaactcgacgtagtcgacggggaatcgggcggcctcgttgaacgacctgagcgagttctccttcacctcctgcatccgccggtcgggcgacgccagcgcgttcatccccttcccgcggtgcccgatcaccgcgaacctctgccccccgccgccgccgccgccgcccgccgcggcgctccgagcacccgccgcgtccacctctgctgcataaccaaggaaataactaacgccgccgcggcacggtgtctcgacgccacgcaatgaatattgaataatccgtacgtaccgaggatggcggaggtggcgggggcgccggcggcgaggacgtcgagcgccatggggacgtcggcgacgcgcgcggccttgagctgggccattatattcggaggatgtcctagctgcgcgcgtataggaggatcgtgggcgcaatgcaatgcaacaacgagacgtgacgcgacgcgacgcgacgcgaggaagcgggagccgagcctaatttataacaaggcgggggaaggggaaagggatcgagtgttgggtgtgggtcgttggagaaaggaaggaagcgggaatggggaatattcggggtggggatgcgttcgccatggccagccatcgcgcgcatttgccaatttgctgccaccgtccccgcggatcggatggtttatcctccaggatattccggtccaaaggcacgcacccgacgcagacagacgcttccctctgctgctacaactacgagaacgaaccaacgaacgaacacatcaggacagcgctgtttccgttttttcacctgtcctttctgccacgatttttccccttttccttttttaccctccgtgcctcgttttttctctttgaccgaggctgtgttctgtgttcatacagatgttaggtgaaaatttttgacgtgtcacatcagatatatgaacatatatttgaagtattaaatatagactaataataaaataaattatagattccgtctgtaaactgcgagataaatttattaagtctaattaatccatcattagcaaatgtttactgtagcaccacattgtcaaatcatggagcaattaggcttaaaaaatccgtctcgcaatttacacacaatctatgtaattatgtcttttttatattgaatactctatgcatgtgtctaaacattcaatgtcacatagtgaaaagtttttacgtgaaaactaacagagcccgagtcgacgttgtgcgttcgcgtacgtgcaatcgttcaaagccgccatcgtggcaatacaacttgacaagtggtgtcgtccagatggtttggaacagctggtgggtagtactagcttttaccacggcttcgcccgcccaatctgcagcgaactcctgcagcatccgcccgcgcaacgcgtgcgtgcgtctgtgccgttgcttgcgcgcgctcgtcgatcgccgctcgctgcctagctagccgttggtcgagtgtgtcaagtgatatcattcgtatcagccacatcatgcggatgcatcgatcgttctggtggttccgcttttcgtcgtcacttcgtatgcgattctgtttgtccaataaagaagaaatcgtgattctgttccacgacgggttaaaggataagacgattggtttattcctgctatacgtgatggacacgacagattcatcacgagagcacaaaggagcaccttcttttctcggttttatttaggctgaaccctgagaatatgtgcagaggagattgcaagtttcagtttatatatatatatatatatatatatatatatatatatatatatatatatataaaggggaagggttaattaagggagaaggaattaaagcttgcaagttgctactagagtagatattttcttctttcgtgtgtagctgaattcggtatttcagtgccgttttaatttgtttattgtccatgtggtagcaggagtgatcctcctttagtttagtgattatgtccaattgtccattgttggtagttgcatccgattctttatataaaaaaactgcattatactgaggggtcaatgctgctgtcagatcaacacgcgcgagaacgcaatatctcttggaaatagaatcacgagttcatttcatataaaagacgtgaattaatagcagcttattcctcaaaacagccatagcacgtacaaacagcactatttattttgaaaaaaaaaaaggagaaaaaggactagctggctgagaatggcttgggctaacactcgactaagtacagccgggttaattaatttgattaattaacgaggaaaattctttaggccagtcacaatggctagtgtcattgcacggctacccaaaatattataccatcttctctcaaatgaaatcttttatgaaacaatccccacagtggaggggtttcactttgacgtttccaagactaagcaaagcatttaattgatacaagttgctgggatcatttgtacccaaaatccggcgcggcgcgggagaatgcagaggtcgcacggcggaggcggacgcaagagatccggtgaatgaaacgaatcggcctcaacgggggtttcactctgttaccgaggacttggaaacgacgctgacgagtttcaccaggatgaaactctttccttctctctcatccccatttcatgcaaataatcattttttattcagtcttacccctattaaatgtgcatgacacaccagtgaaacccccattgtgactggccttagaagacaagaactgctgatgacatggttgatttggttcgacacactaattgatcaacacttgcaactccccttcatttcatgactaatcctgtatatccagcatagcaacaacaaccttcctttttttctgaaaccacgtacggcaggacggagagagagacagagatcgactgataaagattacagaaaaggcagtttacagtaataattttacacgtcaacttaacaataaatcatcgtcaagtagtccaataatgggagacgcgtcacgcataaattcaggcaactaggccacaaatctcctgttactagtacttgtttaatccattattgcgcacacggccggttggttaactcgcatgactaagtggaatcacatgcatcagcgcattgtccattgcccctgatcgatatactgatctgaatatctgatgcccttgcttgtttggttggatctgatagtagtagaagatgaaatgcaggtgattgcaaattaggacgacggctcatgctgaggtgctcgtcttatcctgcatttgtttagcgacttggtcgatctcttaactttgactctctttttttttttagaactcttaactctgactcaccaccagcacagcagattgatccaacaagggggtgtttcgccaagacgccaagctagcaaggtataggtagcttcctgggctcctgtcctgtggtgtgccagtgccaggtcgatgcgcgctcgtgtctgtcgcctcctggcgtcgcattgactttggataaatggattatggatggatgccatcgcaaaaagcaaggacactagtaaaaggatggccttttctttagggagaggagagaaggtaagagatggcttttgattctgactgttcggtggtgagttggtcgatatcgatctagacatttggtgcgtgttttttcacatctacggtgtcgatgcatagctggtaactagttagatggcgccaaataatctacccatttcgtcatttcgctaaattaatcatgtctaatgttcaccattattgcttatccacgctacaaatgcaatgatagggctgtttttttttaagaacatgatagggctgttgagcctgtcttaatcttccagttggcacgacgaaaatgctgaggaaaaccttaccacgagaggagatatgtgaatttgtaagccatttgctcaatctgttgatagatctagaagacacaggggaggatcacgtgacgtggcggatgtacgaggaagaatattctctggtggttggacaggcaggagtgctggttttgccaagagctttgatgctgatggagtgatgagatggatataccgatagagtggttgctgcgtcggttccacgtcacttcaattcgtctgcatcacggcctcaaatacctgccaccgagcgaccttctctactcgccagtagttctttttgtttcttcctctcatgttttcctcaagcactcacaagttacaacctgcgtatggaagtgtttagttcccttcaaacatccaaaaatttcatcatatcaaatatttagacatatgcatgaagtattaaatgtggatgaaaaaaaaccaattacacagtttgcatataaattgcgaaacgaatcttttgagcctaattacgccatgatttgataatgtggtgctacaggccgtgtttagttctttggctaattttttttaagtatacggatacacatttgaagtattaaacatagactaataacaaaacaaattacagattccgcctgtaaactgcgagacgaatttattaagcctaattaatccatcattagaatatgtttattgtagcatcacattgtcaaatcatagcgcaactatgctcaaaagattcgtctcacaatttacatgcaaattgtgtaattgtttttttcgttcacatttaatgctttatgcatgtgtccaaacatttgatgtgatattttttgacaaatttttttaggatctaaatacacatacagtaaacatttactaatgacggattaattaggcgtaataaatttgtctcgcagtttacatgcaaaatctataatttattttattattagtatatgtttaatactttaaatatgtgtccgcatacttaaaataaaatttagcatatgaaactaaacaaggcccatatcaaaaaaaaagttacaacctgccattgtttgtacatgcgcgagcgcgacggtttagatagagagcgagcgtgaaataattgtgtaatatactacctccgttctagaataattacatttttaccattcaaattttattaaaaaaaatactccatccgtcctataatataagggattttaggtcaatatgtcacaatcccttatattatgggatggagggagtatttctaccaaagtgggatccaattttcctttaatcaagtttaataatagtaattagctgagtttattgtctcaatattacttttagtcaagtgtacgtacgaaatgtgtgtatgcagtgtcgttagtaaatagggttactgtgtttgttgctaatctgtctctattatcagcggatactcctctctattctttcctttcatcgtaaaaataaaaaaaacacaaagttaataaaaaaaataatactctcattcatgtgcatagagtttataccgtaaactttacacgcataaactttatacgcataaactttatctatagaaatattttatatataaaatatttgaatccggatttgaatttaaatcgtgtatgtaagcttttgacttataaacattcgctctacaaactttaggtggataaactttatatgtgtaaactttaggtgtataaacttactaaaagaggaaaatataaaatatttgaattcaaatttgaatttgaatcgggtatataaactttggcaaaatttgctacaggacacgcaaaaaacatgtaattagctgggagacaccatgaaaacgtgacatagctgatggacactacaaaaattatgtaattggctgtagaacactggtcgcattattttgttatttctgggtcaaaagaggtgagatattttcctaaatgaccagattacccccttctctttccttcgttttcacgtgcgtagtggggcgagggttcacggtcaaaatccctgaattcctcacttattagcgaaggctggctgcagctttgcttcgtcgtcctcctccaacagctcgccccagtaggcagcaggtcgccatcctcccgacgctagcgagcggcggcggcggcggccgcggaaccggcggcagcggtgtggctggagtagccggcgacggcgctccgtggcgcgacgacgacacaaaccgcgcgggcctcgcgaggctggagtggccaccggtgggctccccggctcttcggcgtgacgacgacgacgacgacgcgggcctcgcatggctggagtggccgccagtgactccgtgcctcttcggcgcgccgacgacaacgacgacacaagcctcccatccttgcggcttgcgtgtgactgtctcattctcctgtctctactttggattggatggactcaatgcttatcttctgatctagatcacatttctttaatttcgttgtttgaattcaaaatttgtttgaaaatttgttcgaaatttctgaaagatttccgaaatttcggaatttcgctgacccccgaaaatcttccccttctcgatagattgaaccctgcccaccacgcgccttcccagcaaaggagaaaacgaaggaaagagaagggcaatccgggcatttaggaaaatatcccacctcttttgacctagaaataataaaataatacaactagtgttctacagccaattatacattttttgtagcgtccatcagccgtgtcatgttttcgcggtgtctcccagctaattacacgttttttgtgtgtcctatggcaaattttgccataaacttttgacttataaacattcgcttcacaaactttaggtggataaactttagatgtgtaaactttaggtgtataaacttactaaaagaggaaaaaacgatcgctggcaacgatcgatcgcccgttagccttttcgatttagaaatgtaattattttggaacggaggtaagtaattttttttatgttgacccttatgtaaaagggaaatttaactatttgacactattaggtttgtcaattatccaaatacctcttttagatttagatttgctctctttttttttttttgcctctctaagatggtggcttcttatctttttaccacttctgcccatctgggatgccaacgtggcaatgtagtgtaaaaagcgacgtgggatgcacttgtcagtctcacaagtctcccttcctctctgcctccggcagtattaaaaatcgacgcggcaaccctctctttcccagcggcggcggcggtgcgacggctcgcggcagaggtaaaggaggagccaagtgacgccgcggtcaaggacgagcatttacacgctggatcggacgtgcgaagccgtgctcgcatcgtttgcgccaacggtggtcaaagtcctcgacgagtgcctctacagctacgagttggtgggtggcgccgccgtcgagacagagcagcgcaacgcggcctccctcgccagcacaccatgggaggaggagccaagcgccgccgcaaatccgacctccgcctcgccatgctccatggcaaccacggactccagtcggccgacgcggcgttcctccctccccagccaccctaagatgacgtgggcggctccgctgctgctgacaactctatcgctggaggcgctgagctcgccacgctcttccttggagaatccgctggtcggtactgacctacgccatctccgtctcccgtacttggctccctttcctactcctccgccgctgcagccaggaaagagagggctgccgcgtcaattttaattggcaaacctaatagtagcgaatagttaaatttccctatgtaaaaacttccatactagttaagtatcacataatactttcccattgtactaagacatagtatcatacttatatatcaaattatcaacaaagaattataagcaatattcaggttttatttggaactatactttcacaactttcacactctcgacttttgtgcgtatgcttctcaaactactcaacggtacttaattaatactgcgttaatatgttttctatgtggaaggtgaggttctcatccccttgattcgaaaatagtctaaggtacaattatgatggtgccccaataatatcacagtgctcacccgcatctcagacaactcagatgtgcaagcaaaacagttttaaaaaaagatgtgcaagcaaaagaaatatgaaaattatcctcaaaagagggggcaataacacatatgaaagaagcccgatactctcccatcaacgggctcactcataacgctatcatacggcctatccgtctcgctgacatgcagcccaaaccagcctacaagacctaatataccacgtgcgcgcgggagcctctcgcggagagggcttgcggcggcacggcccgtccagcgttcatgttcatggaagcacatcccgtccttattctgcgactgattaggattccgaaatccgagtcatctcaaattaatcaggctgccgggaaccctacaaaatcaaacgcccgaaattcgccgattattattcgtttattcgcggcacggcccgtccagcgttcatgttcatgtaagcacatcacatcttaattccgcgactgattaggattctgaaatccgagtcatctcaaggttaaccaggctgccgtgaaccctccaaaatcaaatgctcgaaatccaccaattattattcatttattcgcacgcaaatagggcaggtaggatgttagtaagtctgaacaagtgggataaatattgtgggtcaggaactggacacaaaaaaaaagtattttgggaactaaacaggttataagacagggactgagggtgagggacatagaagtgccggtgcaattgaaagctgaattgagaaaatctgaagtcaatttgaacacaggtatgtctaactcttttgccattttcaattcagttaatagagatgttttagttgatattgtcaatataagtaatattgtgttggagagaaatgagtgtgagattgagacaaatttgacagtcgtttgtgttagagaagaagcaaagctatgttgtttgctgcggaacagagtaagtgcaatgagcatctgagtttgttgagattagtgatgatgttgaagggatggttaaagaggaaggaggcaaggagaggattctgcagggaaggtggagtgatccaataaaaatcaaagactaaagaatacataggatctgagcagaaaaagaaggggaggaaaaaaaaagtaaatcatgagatttttttagaatgtgagagggattagggcgacaaagaaagcttagggagttaatttttgaacaaagaattgatatgatatgtttgcaagaaacaataaagggtttagggtttttgaggagatggctgaggggatggagtgctaatgtaaatagtgtccaaaagaagaggaagaaggaattggagaatgctttggtacagctggataagcagatgacagtggactttttgaaattgaatgaaaaatcagatatgagatggaaaaagaaggtggaaaacatttacattcaggtagcagattttggtgacagagaaaaaggagggggaaacttggattttacaaggagatggttaatacaccttttttccataagggctgcaaatcaaagaaaaaggaaaagccatattctttcttctctgcaagaagggatgttaatatcatagagctctcacaaattaaacagcacatctatgcatattataaggggttgtttggaaaagaaaaaagtagggaagttcatctaagtcctgaaatctggcaagataagctgagattgactggggaggaaaaagtttggatggttagacccttctctttagattaagtggacaatgtgatgaagactatgaaaaacaatacaactcctggccttgatggattccctatgggtttttataaacaagtgtggcctcatataagggttttagttaaagagatgtcagatgacttacacatggatgagctggacatagataggatcaattatggggtgatttctcttttgccaaaaatcagggatgcaaacacaatcaaacagtatagacccatcagtctaaaaaatgtgattcttaaaattcttacaaaggctatgaattttaggatgactgaagtggcaaacaaagtgattagttggtctcaaactgcctttatacctggaaggaatattttagaaggttgtgttattttacatgaggtgatgcttgagctgaaaattaaaagggatactgggattatcctcaaaattgactttgagaaggcttatgataggatgaaatgggattttttgtatgaggtcatggacaaaaagaattttgactccataatgatgggatggataaaaaagataacagaaggtgggagagtaagtattaacatcaatggtgacgccttacaggggtttgaggcaaggagaccccttgtctcctatccttttcaatcttgtgggtgacgccttggctgccattttggataaaaccaaacaaaggggagtccttgaaggtctggttccaaacttagtggatgggggtttgactcaccttcaatacacatttgcccttaagaattccgatgagaacatatttgcccttaagttattattctgctttgaagagatattagggatgaagattaattatcagaaaagtgatgtatatgtcataggggtggaggataatgagggattaagaattgctaatatgttgaactgtaagattggtatgatgcctttcacatacttgagtttgcctatgggggtttgtcacgtcctgataaattcatcctgaaataaaaatcattttctaaaaggaataatagaattaattaaaattcgaaaagaaattggtaaacactaaaatacgtgcaagaaaaattcgaatgtggcccggagaatttttgttaaattctctttggtctaaaaagagcactcaaattttacttgaattttcagagcaccggaaataattattaagcaacaacaacaattaagaaagtttattatatttaaaagaaagctaaaaataatcctccttcctcctttgggccgagttcagcccaaagtctttctctcctcccttgtccctcctctctcgggcctcctctcctccccggcccactccctcctcctctccttcccggcccactccctcctatcctcctcccgccttgacctgccctggcccaagccgagctgcagccctcccgcgcacacgcgccgcacgcgcgctgaccgcgcggaccggtgggtcccacccggtcgtcgtcctcctcccgcccagctcctcctctctctcccgtgaaccctagcgccgttcctccctcaaattcgccccattcaagccggctctttccaaattgattagggggaatgaatcccctttccttcctctctcattcc

SEQ ID NO: 7025 - DNA, 14842 bp, Oryza sativa
aattctgaatttcagttatttcttaattgtatttctatatggactctatactctacttctaatattccttatttttaattccgaattttagttatttcctaattgtatttctatatggaatttcagttatttcctaattgtatttctatatggactctatactctacttctaatattccttatttttaattccgaatttcagttatttcctaattgtatttctatatggctctatactctacttctaatattccttatttttaattccgaatttcagttatttcctaattgtatttctatatggactctgtactctacttctagtattccttatttttaattctgaatttcagttatttcttaattgtatttctatatggactctatactctacttctaatattccttatttttaattccgaattttagttatttcctaattgtatttctatatggaatttcagttatttcctaattgtatttctatatggactctagtctcctcttctaatattccttattttttaattccgaatttgaactatttctaaattgtatttctatatggactctagtctcctattctaatattccttattttttaattccgaatttcagctatttctaaattgtatttctatatggactctgctttttctttttctccgattaatgtgagaatttctaggccataaaagtgaacgtggaggctcctttttctatttatttaataatataatagattataagtatattctcccgtcttaattactgctaccatcactgactcgttcgagggggaaatatctccgcagtcttctcgatcgggttcgattgcaaaggtattttacattatgattacacgctttatgacggttttaaggcacgttttgcattgcggaggcatgagtattttgcgaaacggtccaggtcgtcccacatgacagcgtatctctctctaattgaaagcagcgatccagagaaaggaaagacacagaccggtacagtcattacaatactctacttccctccgtttcagaatacaagacgttttgactttgatcaaaattaagctgttttaagtttaactaaatttatagataaatatatagtactatatataatactaaattagtttagtcgaatcaataattaaatatattttcataataaatttatcttgggttgaaaatgttattaatttattctttaatttttaatttcgaatttcagttacttctaaattgtattcctatattgactttaaactcttcttcccatgtttttcttaatttcgaattttagttatttgtaaattgtttttttatacggactctaatctctacttttaattttattatgtttattccaaattttagttagttttaaattcctatatggactctatacttcacttctaatattccttatttttaattccgaatttctattatttcctaattgtatttctatatggactatatactctacttctaatattccttatttttaattccgaatttcagttatttcctaattgtatttctatatggctctatactctacttctaatattccttatttttaattccgaatttcagttatttcctaattgtatttctatatggactctgtactctacttctagtattccttatttttaattctgaatttcagttatttcttaattgtatttctatatggactctatactctacttctaatattccttatttttaattccgaattttagttatttcctaattgtatttctatatggaatttcagttatttcctaattgtatttctatatggactctagtctcctcttctaatattccttattttttaattccgaatttgaactatttctaaattgtatttctatatggactctagtctcctattctaatattccttattttttaattccgaatttcagctatttctaaattgtatttctatatggactctgctttttctttttctccgattaatgtgagaatttctaggccataaaagtgaacgtggaggctcctttttctatttatttaataatataatagattataagtatattctcccgtcttaattactgctaccatcactgactcgttcgagggggaaatatctccgcagtcttctcgatcgggttcgattgcaaaggtattttacattatgattacacgctttatgacggttttaaggcacgttttgcattgcggaggcatgagtattttgcgaaacggtccaggtcgtcccacatgacagcgtatctctctctaattgaaagcagcgatccagagaaaggaaagacacagaccggtacagtcattacaatactctacttccctccgtttcagaatacaagacgttttgactttgatcaaaattaagctgttttaagtttaactaaatttatagataaatatatagtactatatataatactaaattagtttagtcgaatcaataattaaatatattttcataataaatttatcttgggttgaaaatgttattaattttttctacaaacttaatcaaacttaaaacagtcaaaacgtcttataacatgaaacgaagggagtagtggtttttttaacttacacaatacaacacagacactcacaatacacgcacactcacccctataaacacacacgcaaacatacccctataagcatgttcgaagattcaaccggagatcatgtcgatcgagtgcatgggctgctcgtctacttgctactgctactagctacctgaccgtgtgccatcacgtcagagctagccatcaaaccatgactccatgagtcacgagaaggacgtatatgcgcgccgggctccatgtctcaactctcaagggaacgaacggcttcaagccctctctctctctccgtccggccgtcgcgggtgccgttgcaaaaggagaagcggccagcgaggggagacacgactctacgtggacgcggccggtcgctctctctctccccccttcgcccatccggcctcccaccggtcgatcgatccatccatccatcggccggggcgagacgtaccactgtacacttggatcgcgcggtctgactttgctgcaaaaaaagcgcaaaagctgcacgtcgccttgctgctgcccgcaccgcctcgctgcatccaacacacacctgtctctctctctagctctcgctctcgctctcccatgtgaacctctgcacgacgcgagtcagatttctgtttcattgtcttgtctgcttcgcatctctcatgtgaaaagcagcggccacaaaatttcatcccaaaatgttgttttcgtcatgcgtcagcgagatattcctttttttcctgaaccgtatatactgcgataatatttttagtgttataatcggacaatatatatcacttaaaaaccttatatttagaacagaactaaaaacctagcacatgctaaacgacctagaataataagtattctgagatggaggtagtaagtaggagctaaaataattttaaaaatatgttaatatgattcttttataaaactttcgtgtagaactttttataaaaaaaaaacatagtttagcggttcaagatgtatgtacgtgaaaacgagggaaaaaagttagaaaaaaaggtataaaagaactcattctaagtacaactatataggtattttgttgagacagatgatgggataagatgatagatgggaaagtagatgtttttcgtgatgacttgggcatggtttttaaagaaatctaagtgccccttctattaatgttggatgcttgtataaattgattagtgttgtaattattgatttcttattgttgtttgtaagtgacgtggagttcagcgaaaaccacaatgatatgaactggtgcctggtggtatatcagtatatgcatgtaattcagctcaaggctgagtttgatacagtggttaggtttggctatttagtggaaagtatataattaattacatactaataattaactactacaaactttaaaaaatgaatttatttgctttttaaagaaacccttgcattgaaagtttttcatgaaacacatagcttattagtagtgtagaattagttgggcgttcaacccaacttcactttagaacacacctttggtttatggtgtttgtgtttcagtcttttcaagtagcccaatttagagcgatctctttttcctttttttagcctctcttccttctacattggttttacatgggagtcgtcaggtgtgtgagttccgtactagtggtatgataattgtattagtagtatcatgggttaacaatttgttggttttgtttcggaaataggccagctcaactgtggcagtggtcaccggtttagtttcatgacgatgacagcatgttcggtggttgcgatgccactagggttttgtatctatagaagatatgcatgcgtgtgcctcgccaggcgaagtgcatgttagctagtactaaagcatggagaagacgtcacagaagactagtattaaggcccatggtagctctaactcatatactcccccgttaaaaagtaattatcaattattccctttgagttgcaaacttttgatcaacaatattctttttaactaatataattatttagcatagcatcccagcttgttttagctgcaacttataagccatatcgaattactccctccgtttcacaatgtaagtctttctagcattatccacatacatatagatattataatgaatctagatatatacatatgtctagattcattaacatctaaataaatatggacaatgttacgaagtcttatgagttttagaactaacttcgtgttttttttctgttggttttgctagcatcacatgaatcaatgcctttatttttttttcagtattgacttttgaaccactcggtcccatttgactcaggtcattattagcagggtaattagaaaattgattaatttattataatatgttgccaagttgaaaaggtggattttaaaaagtattcaagaatttttttttaaaaaaagaaaggttaaaacgtaccatatttggtagtttgagaagtatgccgatgataatcgagtacctagctagttgcactttagaacaaggcataccagtagaaatatagaatcttaacataatttttttttgttcttttgattcccatggcttaagccatggttgtgaaaatgtctctaaacaggtgcaaagttgtagttagctagatttgtgatcaaaagtaatttagtactccatccattttatattataagttactttatatttatcctaagtcaagcatcttcaactctaaccaagtttataaaaaatatagcaatatttttaacataaaataaatatactataaaaacatatggatttgatgataatttgttgtcatacatgttgctattttttctctaaaactactagtatgaaataggtggagtacttcttacattggaacttatggaacactttgttgtgcttaaataatactaactatcaaagttcatctattcttggtcaaaacctatgtaaaaatggaattaatttgtaagctggataaaagtattttagtctaaaatgtgactaagatgcctcatacttcctccgtttcacaatgtaagttattatagcatttctcacattcatattgatgttaatgaatctagatagatatatatatgtctagattttttaatatcaatatgaatatgggaaatgttagaatgacttacattgtgaaacggagggagtactaataattttagtcatgctcagctccaataccaatctaaaaacttgaagctgaagtgacagggttggtcctaagttaattgattatcatgtgatgactaatatgataggtgcatgtgtcattgatttggcttttagtactgtccataaaggaagtatctggtggagtaattatgctatttactggtacctcacaactaataagaaagtcggtagcacaaattaacagtagataaagcgtggcatgcatgcatacacggtgcatgcaccacttaagctaattaaggtgaaaacctttaggcatcttgagtgctattcatattgacatattgcgtgtcatttgtagcatatgtgtgcacgaggtttaatttagggatatgccagcaagcgtgttcatcagatgttacacttaacagcgaagtatgagtaacaacaacggtttggttttgggaaacttctgacgaaaggcagctagctggcccccgatgagatgatacacatgatgatttattatgatgacaatatttcatatatattctgttgacatagatatttcacagcacgattttttgctagcttttcgacatggtaagtcagtgttggtcgtgcattagttagttagtactcgctgtagatgtagtaacgagctagagtatcgatcacttgtaccgtgggtaccaatttggtcgcggcaccattaattgagaaaagattcgagtgactggccttctactgggttctctaccaacatatatggataccacaaaatcaaaaggttttggatgaacagtccacgtcgaccccttccaagatgggtgacagtacacaagatgtggttgatcgatcttaatagtactgtacaaccagctagctaaacccagatcactgtacactactaaagtgtgtgctctaaatatatacagcatctcaatcacactcacacattcacgcaccattaatactgttcgacgagcacgtactttccatattgatgaagcaacaaatcggttgccacacgcagctctccggttcgtgttcctaaaagaagagctgttcgatctgttggaactttttgtcttgcccgtactgatatttactccctttttcagcttaaagaaaaggtagtgctactaatctcttttttttttaaagtacagattatctttcacgtatgaactcatttcagacgaagcagagcaatgttatgtcaaacccttagtcacagtgaaggagccaacagcatcatcgttaagggcgagcacagcaaggaggcacgagggaccaccccctactgcatccaagtccattagatgcccatagtgtataccactcaaggcaagagggcagtcggcagtatatagagtactagttggcatgttaggaaagcaaacaacgttcgtatccaattgatgtttgatttatgttttgtctcctattttagtcactaccgtcgcgttgtctttttttttaatctcctaaattttaatcatacgtttgtcactggtcgtcgttgagtccagatgacttataaagtttcattgcaatattgatcagcttttatttatgtcgaaggcaaccagtagtagtgggaggaggaagtaggggagccactgcttaatcgataacaatatactttttccgtaaaaaaaaactcaatctaagaaaggtcacaacaaatttgaataattattatatagatttgtcgtatcaagaacggtcacaagttttgagttttttttagagggagtatggcagatttcgaagatacagacctggtctatcaaccatactcgaatgcatgcgtggtcggtcaatcatatcatcatattaagctgccagatatgcacacgatgattgatcagtagctagctctgcctacgcaagtgacatgtactacgtatttgcgattgttgattggtttcatcgaatgggcatgcagatgatcgatagctcgatactagctagcaccgaggaggaaataaccaatttggtcttaagctagaacgaacggatatatatccacgttgcatttatatttttcatctttttcatgagaaggccagagaagaggaactaattaacggatggacacatggcggtggccggcgacagacaagtgtccaacttgtccactgtaactgctggatgccggctatctagctacagtgctcatggggtgctggtaaccaccagtttgatcgatcttgagcttcagatagacaggatagtacagtggacctgcagtactgaaatctcccccatgagacgatgggtcctcccgatttgttggaggcaagcgtacgtggagcttcgcagggaatcgacggtggagctccctcccctcgtctggatcggtccctccaaggctagcagttgcacatggccggtaatgtcacggggctaggacagagtactgtgtgccctctgtgagccgagatccacacggtcccaaccctcccacaatttgatggttcaccagctaaaagaagttgggctgaatgtggcatgggaaatcttttgtgaaggcggcctctcctcgtcttcttgttgccttttgaatcgtagcaaaacttgaaaatttaaaactattttttagagagtcgattttgagtggttttgtttctttcatcgcagcattggtttttaaatcgatgaaaagatataggtataaaagttttgacattgcctactagtccatttctcaacggatagttattcataagtcaaacgagcaaagctgctagttttgttaaatcaaacgcatagaaaaccatacaatttatatcttccgctcctttcaccctcagaaattttagtgtttttagacaagttggtttatgtgcaatcatccaagatatacaagagctaggtgagcttaagattctgagaagtaactgtttgataaccatcttctaagaatctggaaacgttgggtgtccaacttctgacttctagtttattttctggattttataactacagcttcttagaatctggaccaaaagttggggtctgtttgggggagcttctagctgctgcagcttctcccagaatcataagctcccccaaacagtccagcttttgctccagattctgagaagctgtagttgtagattccaaaaaatgaactagaatccagaagttgggaaacctaacttttacagattcttagaagctaactaccaaccagctgcttcttagaatcttaatctctctcaaacagaccattggacagtttgggagaagctgcaacatctagcagctcccctaaacatcccttgtatcttattgcccatagggatttcaagatttgccactcatatggccccatcgtcttgcttatacttatgcttaaattttaaaacttagttttacagatgattttatgtttttcttattatggtttattttacaatatttggctttgaaacgctaagaacacatataaaaattatatttataaattattttttattgctaataagtcgtacatataatcataagtataagcaaaataatggggctgtatagtttcttttttaggtttagccattagggtatctataatgggaccataatgtcttcacgtggagtcccaaatcctgaattttgtcaagtaatattgggagcgacaaaaatgctaaaacaggcagaagccgaatgtttcggtgggctatcagttatcagttcactttctgggagtggtccaaatgattttgaaggcccatccataactcaagatcctcatttgtgctgagttatggagttgagcaactatccatctactatcacatattcacatgttggatagtgggtcatataacctggcagagaactggcaagaggtcaagaaggagatgggaaggaattgttaatgggctttatttgatttttgcatttatgcatggattgggccagccttcttggagttgatgactcggagtgatccgtacaaaaatatctccatgggccgaataacaaaatcctttttaaataggaataagttcactttggtcccttaactagttactgaatctaaggaataagatcactttgactccctcaactgaccaccgaatctaaatcgtatccctcaactgcaataccagaaatctcgaccccccgaacttgcaaaaccggtgcaatttgactccctcagcggttttggggtggtttcgctgatgtggcgccacgtggcacctatgtggcgatattgaccgagtcttcggtcaacgtggcgttggcgtggcagtagaattaaaaaatatgcgtgggacccattagtcattcacacaaaaagaaatatgggcccactgacatgtggggcccacatgtcagtccttcctacttcctcctccctctctctctttctctcaatctctccctttcttcccattcggccggcgggcgggagggtagcgagagcgagcggccggcccagctctgcctcggtggggaggcggtggcgcaccgccggggtccaccgacgatggcaacggcgcacggacgagtggagcagcggcggccatcgtggcgcagcagaaccggagcagcgacagccatcgtggcgcagcagaaccggagcggcggcggccatcggagcttcttgggcgccgccagcgacgagctgacggcggtcgagtagtggagtgacgcggcgcacacgagcaggacaacgccccggccttctccagccccgccgccccggtcttctccagcggcctcctcatcaccccccgcgccagtcgctttgtcaccgacgacgaccccgcgagccgtcagagactgtgccggtaaccgcgaggacgaggatgacgagcggcagcgcgggtcgccgccaccgttccccttgtcctcccactgccgcgagccactacggccgagccgccgtcgtcctagccgctgaccgccgcccctggtccggttccgatgcgcctcgatgccgctagccgccctcctgcacgtcggcctaatgggaagaaggggagagaaagagagagaagggagagagggaggaggaagaaggaagggctgacatgtgggccccacatgtaagtgggcccacattttttttgtgaatgactaatgggtcccacacatattttttaattctactaccacgtaagtgccacgtcaacgccacgtggaccgaagactcgatcaatatcgccacataggcaccacgtggcgccacatcagcgaaaccaccccccaaaaccgccgagggagtcaaattgcaccggttttgcaagttcgggggttgagatttctggtattgcaattgagagatacaatttagattcggtggtcagttgagggagtcaaagtgatcttattcctgaatctaattcttatccttgaactgcaataccaaatatctcaacccagctcctattaaaaccggtctaatttgactcccacggtaattttggagggcagtttcgctgacgtggcgtccgcatggcagtgttgacgtggtctgtggtgttaacgtggcgcttaggtggcattagagttaaaaacatataagtgagacccatttgttattcacacacaaaattacagggcccacgtgtcatcctctatctctttcttcttcctccctctccctctctctctccctcttctctctttctttctctttctctccccttcctcttcccctttggtcagtgacagccagacgggaggcgagggtggcagcgggtgggagggtgggtgagggctggagcggcaaaggcgagcccacagtggcgaaggcaaaggaagcggtgtgaagaagaaaagaagaccaaggagaaggggagagagagccatcctcatcaccgccgtcgacgccactgccctagagctccctggccaagctccatctcgtcgttgcgatcgaccaccataggtcgctgccccgcactccctcgctgtccccgcaaagaagataaggagaccggggagaaggggagagaaagagagccgtccccgtcgttgcggggcgccgccgcctagagctcccttgccgagctccatcccgctgctgccaccgtcgaccgctagtcaccgccccgcactcccttattgtccctcgagctccggagcggcgatggtgggacaactacggggatcggcgacggcaagggtgcggcgttgggggacagcgtgtgaaggcccacgcccgcgccatggttgaggaatgagaggcgtgcgccatctcccgtgcccatgcctgcgccatcgccgttgcgcctcgcgcgccttctcgcccgccgctgccgctccgatcctcgctgaccgaaggggaagaggaattttctttgtgaatgaaaaatgggtcccacacatattttttaaattctaacgccacactaggtcaataccacaacgttagcaaaaccgtccttcaaaactatcaagggagtcaatttacaccggttttaatagttaggggtcgagatatcgggtattgtggttcaggcatacaaatcagtctaggcctctagttaagggagtcaaattgaacttgttcctttgaactataccctgacatgaaatgcttgatcttctattttgagaaaatccgctatgtacctttgagaatttgttcaatcccttgtgtgccgctaaattttgccttatcccttatatacccctgagtttttattttcgtctcctctatgcctattctgttagttgaccattaaatgttttttaaattgactatattatccctctcttatatttatgtgctagtttagtaataaaaacacaattcttatataaaaaagatctatttgtaaaaaaaaacaaaggaaatatgattatttgacacttttttaaaaaatctaaaagttttaaataatttttaatttatctttttgaaattcatacattgttttcatcaaaatttgaacccaataaataaatagtttcggttaaaaaaaacataatttctagctaatgctcttatatggattttgtcaaaaaaaaaattgttcaccaatttaatttttctttttcgaatttaccataactaattattccccattttattttatcatgaattacagtttttcacattatgaattatgaagtagatatagcatgtaagtatgagaaatggacgatatggttattttagaaaaatctaacagttaactcacaatcaactaacagaatatggatgtaggatatcaaaatgaaaattcaagggcatatagatggtgagccaaaattcagagatacacgaatttcctctataattttagttgaacttagaggttcaactgttcaatcctaatgtagcaaaggagaagcgaccatttgttttcctcatgctctcagaaaaggtttcggaataaacagggtgctcaatacgttcaggatggcgacttccgttttctccagagctgattcctttggcgattgcaatggcgattgatcttcatggcgactccctcccccctggtggctgggatttttcccccggcaattagctaagggatcagtgctggcaaattcatggtactccggttcacttttcttcgtacttcagtccttctccttttcgtttggttgttgacgtttcgcgatcgaccttttgcttgaatgagaactccctggctttagctcttcgggcttgtttaggtggatctcctactgatttctatgttagtcatataagggatcgatgcttctctttctttgtgtatttataagcttagatcttttatctgccgccatttcatcttcgttttttcttgtggcgcaatggaagtcctaattggtcttatgagttcatgcgctgggaaaaagagcaatcagatgaatggactattgtcaagagaaagaaaggcaaatctccttcaaatcattcagtgatcccagtctcatctgtttttaatcgttttcgagtgcttaatagttcttcatctcgtcctgctggagttctgcttaataatgtttcttctaaggagccagaaaaggttgctcgacggattgccgacggtgatcatcgttctgatagtcatgattcgtcttccatggcccctaagtctttgtccaatgacttagtctctcatcagaagaccgataagcctgatccgacttccaagcataattattttaaaaaaaatattctatccacccctttttgggccatgagaaaaagcccatggatcagcccaagggagttaagccacaaccagtttcgtggaagccgcaaccaattcgcggaaaatttgggtgcaaaatctcctataaactctgtaatccccactgtgtcgcatcctctctcttcacccgactccacagtaaacccccctctttctccggcgacgaactcgagttcaccaatggcgaaccttcaacctcatcctctctggttcatcccgccggggcagcacttgcatccggctggtccaaatcaccgtcgaagggttgacacagtaaacttcattcctactccaatgcggcatgaggattttgtgctagctattgttcatcctgctttacctgaagacctttgggatgaacatagggctgagattagtgggttttttgaacaagtcagccatgttcgagttgctgcttcttttccacacccaaatgttgttgccctgtttcagattgattctccggatcaaagagatgcacttgttcttgggctgcctattaactatgatggaaaccatgaggttagatttgttaggcatgattagggtccaaactggcgtaatgttccttatgatcatagagggtggataatgatgcttgattttcctttggactatgtcaatttttataacatcaatcaagtggtgtctacttttggggagcttgactggtggtttagctaaggtttggtacaaggatctatactcagtgccccaatttgttgtttgggagcagcctaatgctccaaatggtcagtcttggaccattatgtttatattttaaatggtgaatttgctgatattttaccacctgatgatgatttgccacatggtgaggggcctgtcgatccaaatgttgaggatgcaccagcctggcagtttggaaatgaacagcagcagcataa

SEQ ID NO: 7026 - DNA, 7017 bp, Oryza sativa
ttcctagaaagtctttttactgcaagagaggggttaggcaaggagatcccttgtctcctcttctttttgttttaggggctgatctcttacagtctattattaatagtgcctatcaacacaatgtaatatctatgcctatcccaactcctgacaatgattttccaattgtgcaatatgctgatgatacgctactcttcttatctgcatcatcaaatgagcttttcagcttaaaggcaattttgaatacttttgcctcctcgacagggctgaagataaattttgagaagtcatgcctgattcctctcaatgtgcagcctgaaaaagtacagcacttatctaagatgtttggttgcatgattggtaccttgcgattcacttacttgggtttacccatgggtataaataggcccaaggtaattgatttcagccctcttgttgatagaattgaaagaaggttgtatgctacctcagctttgctatcttatggtgatagattaactatggtgaactcagtgctctcttctttgccaacttactacatgtgtactctctctttgccgaaaagtgtcattaactctattgatagagcaagtagacattgtttatggagaggatgagacataaattcaagtaagaagcctttagttctttgggatagggtttgccagcccaaatccaaggggggtttgggagtaatagaccttaaatttcagaacaatgctctgttgatgaaaaatcttcataagttctataataggcatcctgttccttgggtaaatctaatttggactacatattaccctgataaagttccacatgccttgtctttaaggggttctttttggtggaaagatgtcttgcagttcattgatattttcagaggcttatctaagtgtacagttggtgatggcaagacttgtttattttggactgacttttggaatgataatataatatcagtgtcttatcctagagctttctcctttgtaagaaactagaaagactcaatgctgcagacttctttaaaggatctatctcagatgttattccttcctttgtcagatctggcctatcaggagtatcttcaaattcaaatggcagaccctttggatcggctctctgatgagtatcataaatggtcctatatatggggcaatgacaggttctcttctcagaaaatttatgctacaaatttcatggatgtgcagtcccctgtatatctaaaatggatctggaagagtagctgcactatgaaggttaaggtttttggttggctccttctcattgatagattgaacactcgtgatatgcttgacagaaagttttatgctcctcaaggaagtgatttaacctgtgttctatgctcatttggagaaagagaaacccttgagcaccttttcttctcctgtcccttttgtactgatcgctgggagcaatttggtatagtctgaaatctctcctactcttttgagaatatgctaacacatgccaagaactcctatcaatcttcgcacttcctggaaaaggttctttatgcggcctggaatatttggaagtaacgaaataggttcatttttgagaatgttgtgccttctgttccttcctggatgtcgttcttaaagaatgatatgtcccttcttgtttttccgtctaagattagatgatagataagttttttttgttcctggctagacaatttgtaacttttgtaattctattttttaataaaatgttttaactgtgggggcttcccctacagtgttttcctaaaaaaaaaagaaaaggtctcggtgcttgacaacagattattatacttttattaacatattattatacgttattccccgcaaaaaaaacatattaacgtttttcactaaaaaaaaacttgcaactgttatttagcaatttcaaaaaaaaaatcttattaggaccagacctagttgaaaaattgtaaagaaacacttttatttcaacaaaaaacggattgaacttttacatccagaatacttttggtgcgactacgtggttatacctagacaccaggtacgtgcgaccacggcggcgaggtgaaatccgcagctcccccgccttgtcgtagctgagcccaaacacggtcacgtggagcacgcatccatcctccgcgcacagggcgtccgccatgtcgaggccacggcgaagcgcgcactcgacgaggcagaacacgccgtcgcccatgtacgcgagcgtggcgcccgagggatgccctacgtgcctcttggggtcctcgcgaagcagcgtctcctcggtgatcttggaaccgagcgcggcggccgatgccgcggcgccgcgagacgcgacgtcgcaggagcagaggcggccgtcgtcgtcgagcccgacccacgcgtccagatcgtcgacgtagtgtccctggccctggaacggcagcagccagtcgccgagcggcgtccacgctgccgcggccggacggcggcgggcgatgtcgagggcgtaggtgccctgcctccggcgttcgtcgtccccggcgcgccggttgtgcgccgacacgaagacggtgcggccgtccgggtgcacggcgtaggcggtgacgaacatggggtcgcggccggcgccggcgaacggcggcggcgacggcgaggggacgctctcccatgaccaccgctcggcccgcccggaaaacctgaacgagtcgcgcgcggggtagtcgtcgtcgcggggcgccggcgacatcacctggaggtagtgcttcgacgcgctgcgagggtccagcgcgtacagccgctggccgtggacgggcaccatgatgcccggcatcagcggcgccgtcgggcgagggccggcggccagcgacgacgtccccgtgtcgtacatgaagacgggagcatcctcaaggagagcatgcgtggcgatgacgatcttgctgccgaccgcggccacggccgggaaggagaggtccaccggcgcctctatgcggacggcggcgtgctcagggaggtggtggaacatggcggcgccggtgccggaatcggtgaactcgtcgacgtccagcttgtggatgacgtatcccatgtcccaatcaagcaccacgtagatgtgtttatcgtcgtccctccgacgtgaccttttactggacatggcggtgttgctgctgtgctgatcctgcaacgcccgctttgagctcaacatcgtatcttcctctgcctgcttcgcgcgcgcgagtaaacgaataatcggtggatttcggaataggatttataggcttcctcgccgacggattcgccgtgactaattccaattccgtttcggaagtccgagtggattgcaacattcccacacggcccgtttggttgggattccgagactggcccgcttcggagtcgctcccacccccggaaccggatcgtctgactttgcatagtaacgtcatgagcgtgcagttctacaatatccaccgtccattccatcctacggtcctgcttgctctatcctcgcactggtgcacaggcacccaagacggcaagacccaacgttaggcccacaaaatcagtggcactgtaaagtgggatttttggattagtcatgagaggctgttaattttggattagcactctcagttttggcaccgttgacagttggaggtcctactcttgctaaaaatcagttctatgcatattgcatatattgctcctatgtatatctataacttaatataaatattcgtatttttccggtcgtcacaccggtttttcgtcccgcttcgtcgcccctcatcccccaaaatcccaatccgaatccaatcaaacctcgtaaaaaaatcacaatcacaatcggagttcaatcacacaaatcatgatgcatgtacacatatatatccaaatataaaaaccaaaaattagatcgaagggagtcgccgccgccgctgtcgttgccgaaccaccaccgtcgccgtcgccgccgcagggacggctggctgccggcggctcccctcccgctggatccggtggtgggggagagcaccgccgacgccgtcgtcggtggtgggggaggactccgccgccgccgccgctcgcgggaggaagggcaccgtcgttctcgttagatccgcgccggtggtgggggagggtgccgccgacgccgccgtgggtggtgggggcgccgccgccgacgccgccatcgcagtcggatccatcgccgccggatctagggcgggagggaggcgagaggggagaagggagccgcagccgccgccacgaccgccgaatctgccgcgggagggagcctagagggggtggagggagccgccgcccccaccctcggatccgccgcggccaccaccaacccgccgccgccgacccgagagggagaggaggaggggggagggggggcgccgccaccgccgccgccgctcacgggaggaggggtgccgctgccgctcgggggcgcggaggggagggcggcgaaggcgaagtgagatgggagggagggaaatgggctagggtttcggcggctgagagggagagggttttgtttccccactatcgacgctcggccgtccgatcaaaaccctagagatcggacggccggtgtcgtccgggccaaaatcggcccaagatggatcgagagtgaggcatcttttctggcccaagcctaggttgcggcctggggaagaaaagtgagcccgcgcatgcgcaaaaggccgtgggccaaccggcatgggccggaaataagtctattttaagtccctcgggctgaaaaaaagagaataagttcatttttagcgctcattttttcagaagcattacaattatagttattgaatgtgtttatttcgaagcaaacctaaaaggaagtatttcctttctttttccaattaaataattgttaaatgatgtttgtattaataaaattagcaattaagctctgaaaattccaatataatttcaaagagcgtaactaatcatggggaattttaaaaaaaattaaatttaaccatgtcattttatttctcatacttgctctacttgtaaatttatttaattatacacatatacctacttaaaaataccaaatatttcagagaatttgtattttaattaattgcatatttttctgatatgtacgcttcccgttgcaacgcacgggcacttttgctaaaccaaccaacacttttggtcaatatacacactccgtaatcacccggtgtaatgcacggacactttttctagtagaatatatatttccttaatgcaacttcatcgaccaactttgcaagtacctatatacgtatgttgttttttccttttttcttttaaaaaagttgtacgctcataacacatacacattcatttctataaacgtgtaaacttacgccctaactttatgagcacctcaaaaaaccataccggtatatatatatatatatgtatatatatatatgtatatatatatgtatatatgtatatatatatgtatatatatgtatatatgtatatatatgtatatgtatatatgtatatatatatgtatatatgtatatatatatatatatatatatatttatttatttatttatttgagatcaacaaagtctacgaaggtaattgctaaatgttggatgggctgtgccgccgtgagccctcttcgcgagaggctcctgcgtgcgcacgtggcccactaggcctggcaggttggtctgggctgcatgacagcgttatgggtcgggctattggatggggtgcagtgcaaacacgggattgctaattagcacagacgcgccattaacttaagtcgcgcgcatttttttttggcccacagctctgcggcccatgtcctcacgcacagcccatttccttttttcccgtggcaactgtcttttttcgcgtcgcgaagctgccacacctgcacaaaaatcaggaaaaaacgtgattagatgtgttgtaaatcaacgcgcctattagcggatcaccggatccgttccctgtccttcccacaacagtataggcgtgagatgatgtagaacacccgcgcccatccctttgccgtcaagaacattgcagaagtagacaattaatacagatatagggtggaactctctcttcattatagatcttatctggagtacaagccaaccattagccatagatgtcacaccctccccctgtatatataggggtcttagtaggagatagatcttatctctactccggttcggattggtccacaagaaaggatctttatctccccgggagataatattccataacactcccccttagacctatccgcgactaactcatgcctcgtcaaaactcctaccaaaacccagtgggaaaaaggctaggagaaagagtacatagttatcgctcatgcattgcacgttgttgcctcgttaaaaacctcatgtgaggaacaacagcttcactcactcaagggaaaaagagtacaacactaaggactacacggtccatactgtgggtcatgttctagggtgctctccccctgaacctagtaaacatcaaagtcttctcatcccaattctccggaaaagcttccgagaactaactgttgggagagactaggtgatcaatcctctagattattactcaacttgaattgctactcacatcacctcgccttaggagtctgtgagatagcccacttgtatttggtgtcggtcaataaagacagatctttctatgataggaccttagaaacaggtctaagtgatcatcatcgagtcaatgctccgggcatactctaagacatttcaatgtctcgcaaatgacaatcaacacatagcacatactccccctgatgacaacctttgtcacagaccatgttcccatagcataaaacatctctcagacgtatgcgtgggcaagaatccttcagatcctcaaaccattagtcttaaaagacttatctcatttcatcactaaaatgagaatagggaacatagagagtaatgcattccatcactatcatataccacaataccatactgttgtgcaacgcaatcta

SEQ ID NO: 7027 - DNA, 30567 bp, Oryza sativa
  unsure (1)..(30567): unsure at all n locations
ttatcgttatgttttcgtttggtactgacatttgcatttgaggaggaatcaacattataggtggcatcgcacacagagatttgataaagttgttcccatccaacggcgagaccaacctctttattatcatgcataattatacatctattgtttccaaaagtacaatagtaaccaccattatctaaacgtgaaactgaaactaagttccttttcatagagggtacataaagaacatcatgcagctgaagtttgaagccagtatgaagtgtgagagtgaagtctccaatggcctcaacttcagtttcaactccattagcaactctaattcttctttcccctcttcttagggtcctcctcatagcgaatccctgcaaggaatttgcaacatgaattgtcgctcctgagtcaatccaccaagaattggtggcataatcaatattcagggattcatcaacaaaagaaataacatcagtacctttcttactgagccatctcataaatccaatacagtccttttggcggtgtccactctttccacaaaagtagcacccatccttttcttttcccttttcttctgtatagggatttcctccagatttattttgctgggattgattcgaagattgccctttttctttaaattgaataggcttaggcttcaaatactccttcttaaatttcttataccttttcttctcggagtgtttaaataaatttgcatggtcaactctttctgccttaagcctttcctcttcttgtacacacatggctattaattcatcaatgccccacttgatcttcattgcattataattgatcgtaaatggagaaaactcctgaggcagagatgacataatgaaatggacaagaaaacctttagagatttccatttccattgatttaagcttagaagccatgtgatatttcttcataatatgttccctcagatttccagtaaaatcatatctttcattgaccaatcttttaataagagtggtggcataaaccttagaagagcctttaaactgctcctcaactttagcaagatattctctggctgtctgagtatctggaactgctcctcttattgcgtcaataatggagctcttaataatcataaggcatttacggtttgaaatatcccattttgcctttacttcatcatatctcctttttagggtctcataattttcattttccggtataggctcaaccggaggatcattatggagggcataatcaatatccaactgagctagagtaatttccagcttctccttccatgaagcataattacttccattaagttgttcaatattgcctattattccggcaatttgtgaggcataagatgctgcataagagagaatcagcagctaaataaataccttcttttattgattaaatccaaaacggctttggccagagaaggaaatgaacaataaaattttgtgaataagtatttattaatcagctttggccagaataataaatacaaaccacactttatcagtttgtttaaaactccttttattaattcaatcaaaacagctttggccagatttgaattgaattaataaaatttttgtaatcaaataaaagtcaatcagctttggccagaatgacaattatttgtcacacttaattgtaatatttatttgtagcggaaataaactcataatgcataaaacaataataactttaagtaataaatataatataatgatcataaaacaaataaataaatgaaagtgaattttatcacataacaaagtcacttattattcttattatcattaattaaaacataataaaatatctttaatgtttgaacacaatgatcataatcataattctttaaaaggaaaaaagttaattgtaatattatcttagcccaatctttaattaggcccattactatacagcccgttactatgcagccacacatttttttaatggaaatcttgagctgggcctttctccccgagccaggccgcattcggcctggcccatcacagccgcgccgcctcccgcctgggctccaggcccatcaacctgggcctgggccggcgtttgctgcctctctgtgcggcctcatcagcccgcgtcgggagcgacccgatccgagccgtccatcttcatcggacggccgggatcgctcccatgcggaacaaaaccggcgcggcggccgcccccgcgaaaaccctagcccccattctctcctcccctctttctctcacgcccgcggcgacggtgagcgagacgacgacgacggcgaagcggcgcacgacggggtggagatggcgccgccgagccttgctcgccggggctgcgtgccgccatatccggcgcgcatccccgtcgagcgttgctcgacggtgccctaagtagccggtcgctcgcgcaaggaagacccacggcggcgacggcgagacgagcggcgacggctacctcagcgaggcggcgacggtgacctcagcaaggagcacgcgaggaggaggagccgggccggcacggcgggtcgcgaggccgctcggggaccaagtcctcgggtgcgtgctcgcctcttattgcgtcggggcgacacgaaggtcgccgccggccatcatgcccttaggtaagcccgccgctctccttttccccatgattttagggttagggttccatgatttggggaatttttggggtcttactgcagctagggtttcggttcttagggatttgtttgagatttgcatgaatttttgctttccccttcttctaatttcttcaacccgaaaccctagaaggcctaattccatttcttatacttcgggattgcatgatttgggctcaattcaacattaacagagggatttgggcatgaacacgaagaacaatttgaacataaacacttattgagttccaatttgaggccaacccggtgctctgataccattgttggattgctttggatcggtttggcacaaagtggaactacaaattgaaatgggattagatcatacctttatctcctggagttcccatctctctgcctttgttcttctttcttctcttctagtttggaagcacagagagaatcatgtcttggtttttccctgtgtttcagtgggttgcttgatcgggtagcgagagaaatctcttaaggtttaacacttaggtattgatctctatttatagccactgcaggggaaaccgacactagggtatggcggttatcccccgatcagggatgttcatgagagatcgatcactgtagcgatcgccctaaacaaaatatctctttgccgactttaggtttagccgcaagatcatattttgtgttcacactaacaataataattaattcggtttttatcttgtgtgcacgaaaaagagaaaaaagaaaagaggaacgtgggcccagtgcatgaagtacgtacgttcatgcacgtatgtgggccttttaaggatagattaaattggttgttttttttataatctagtggttaaaaataatgggttcaccagattaaatgaaaaccgacagttagattttctttaatttctctaaatttattagagtgccacgtggcggtataggagtatttgtagagtgccacgtggcggcatgagaatgtttgatttttaggatttgtttagtatggatgtgagatataccaccacgataatacctagagcatcatgttattgtttatattttgacaaatatgtatagtcaaatagttctaaaaatacaaaaatactttgagaatcttaatcacaaacaaattataatttaattagatcaacttgaaaaacacaactaaattgtgttgtttttattttttaagtatgtagatctaaagtagtgttgtatatttgtgaagtgatatttcacttcctaaaatgtgatgtgatttttttaaaaaaaactatcatacataggtcggcctcatgtgttggtgttgtggtgtattgaggaccataatataacttttataatttaattaaagaaatacaacatgatcaccaattggatatataagttaaaaaatattttagaaggtggtttaaagaacatttattgggtattttatatttttaattatagatcatagtttaactatatttattatatatatgtatatatatatatatatatgtatgtatgtatatgtatatgtatgtatgtatgtatgtatgtatgtatgtatgtatgtatgtatgtatgtatgtatgtatgtatgtatgtatgtatgtatgtatgtatgtatgtatgtatgtatgtatgtatgtatgtatgtatgtatgtatatgtatatatatatatatgtatatatacatatatgtatatatatatgtatatatacatatatgtatatatatatgtatatatacatatatacatatacatatatgtatatatgcatatatacatacatacatatatatacatatatatatatatatgaactaatatatttcatatttatattgtagaaaataaccgtccatttttatagatctatattttttggctgtcttttctatctacgttcttattgtttttccattccgtgaacagtagaagtttaaatggacgtgctaatcgtacgtcgtacatacgggagaatggtagtagcgcttgtatctaaacaggtggaatggtgtgtttagttttcgctaaattggaagttttattgaaattagaacgatttgacggaaaagttggaagtttgtgtgtaggaaagttttgatgcgatggaaaagttgaaagtttgaagaaaaagttggaaactaaaccaggccgaagttattatttttaatgatagatctaatttagtggtgtaaaataatgggtccaccaatttaaatgaaaatcaatggtgagatttgatagtgtcatgtgactgtctaggagtgtttataaaagtaccacatgacggtataagagcgtttatacgaagtttaatgtacttttagtatataataaaatataatagatagataataaaataacgaaaaggagaaaccgctggttcagatgcggctgtcacctacatccagcgtgcatgataatttctttttattaagatgctcatacagtactactggtttcgatttgcaaacaattctctgtgcagatagattgaaccgttatcagccagtggcatagatgcctgaatcacctttctactgctatctgttggccttttccgtgttcttgtcctagcctgttgggaaggtagtgtgtacaagggtgtatttaatttaggcccatttaaagtattgtttcctttttcctgatttctactataatttaaattatttatgtcaagttcagcccatgctagctctatgcaggaataagtctatttaacctccctcatatcttgcccttgatcaaatcatatcctcaattataaaacgggtataacgcctccctcaacttcaaaaaaggtgcaaatcattttcttcggtggtttaggaaaaggtttatgctgggtcagcaaaaaaaactttaaaaaatattagtgggatccatatcccccccttcctcgaactctctccatcctcttttatgtccttcctctctctctccacttctgtctcctccgatgttcttcttcatccccatcctcatctgtctccgccccgtcgctcctgcttctcctcttcctcgcactccttattggcctcgtcttcctcctttacccctccgcgcctgtcgcgtgcatggccgagcttcaccccgacctcttccacgtcaacctttcctcgttcccagttatcgacctcgaggttgcgacggaggaaggtgatgcttccatgtccatccatcctcgttcccagccgtcaacctcaaggttatggctgtggtggccggtgaggaaggcggtctgtagcaatagaggaagacaggagggatgcgagagagctgacaatataatgtgccatccatccctcgtcttcctcccccgatgtgccgtcattgtccgccacttcgatgcacatcacgtcagccctctggggaggctgcgccgtgcatgggggaggaggcgggctctcttgtgccacgcgtgtagggagcggaggagaagctgagtggcatctgagatggaaaaggttgaccagagccctagtacgtgatgccaacgggctacgtgaggagcggctcatccatggacaactttagtgactaaaacccgatgtctcggtgcatccttctcctcctccccccatgccaccggtgactccctcagtcggtgactccattgccggcggaagcagagtactcgcacggtgtaggctgttgtgcccagtgccctccaatacacgtctgccaccttccatccgtacggaggagctcgtagcgcggatctcctggtcgcaccttcggtagccagcgggaagagctcgtggctcggatctacggccaccacgcgttgtccgcaaaggaggaggatgaggcggcagagggcatatagtgcattggagtagtgccactgagcatatccttgcctacactctcacatacacgcggggaagacatggcctccgatgccgtcactaacatgtgaggcccaccacatatgttttgatgtctcactgacatatgggcctcacctatagaaatcgctttctaaatcactttaggagctaatttgcaccggtttttgaagttgagggagacgttatacccggttttgtggttgagggagggataccattcgattgagggcaagagacgagtgaggtaaaatagacttattcgttctatgcatgatccacatgggcccaaacaatatccattgtgcctcatagaaagagtattaggcccattcgccgaagcccattggcagcttaagcaaagcactgtatatccaaacatttgtttcttcttgagtccggtaaggctgtgttcggtgctttcccatccctctccctcgtttttccgtgcgcatgctttttaaactactaaacggtgctttctttgtaaaaaaattctacacgaaagttgcttaaaaaacttaaattaatttatttttgaaaaaaaatagctactccctccgtcccaacatagaagagatttcgggtgaatgggatgtattctagtactatactccctatccagattcatagtactagaatacgtcatatcgaaccaaaatcccttatatttagggataaaaggagtaatacttaattaatcatgcgctaatgaactgctcggttttctgtgcggaggagatggttcccaacccaagttacaaacacagcctagtggtgtttggattcagggacttaactttagtccctatatttagacactaatttagagtattaaacatagactacttataaaactaattatataaatgagagctaattcgcgagacaaaatttttaagcctaattaatccataattagagaatatttactgtagcatcacataggctaatcatagattaattaggctcaatagattcgtctcacgaattagtccaagattatggatgggttttattaatagtctacgtttaatatttataattagtgtctaaacatccgatgtgataaggatttaaaagttttagtcccatctaaacaggtcgtctaatactgagctggattgattggagtttttgcagtttttcacatgcatgcatagtcttaagtatcttacgactgcagatactgaatgtttgaaagaagttctgtcagacctgaagtatctaacaatctcaaatgccactaatttatgaaccgtactgaagaaatagaaaacgaaaaaaaaaaggacatttggttagcgagaggtcattgtcgatgtggagatcaggggtacacgtacgtcatgacgaacgggccaaatcaaacgagcggactacctacgttgtatgcatggatgattgatggagtcaatttgtttttatttcttccgagacagagacagagatagatggagagatatggtgtcaattcgttgtttccaagtcgtcctcacaaatagaaatttccaccacaagcttgaccacagaggctagttatattggtcaattactaactctcattttagggcgtaatatgttttgaaactaaagtttgagtacaatcaatatgttcttaacagctataaaagtagcatttctatccttttttaaaataaaaaaaatcaattatgaaatttgaaatcctgacacattttttttaatatgctatacatttgcaattcgactactgttggtcaaaactcaaaagcatggtccctctaccccaagtctccaactaacctcccctgcacctgcacttggtagaaaaatcagaaaaatggccggttgctagagctgctagctaacctaaaccaaaaccagcctttatctcaactgtttttgtctccttctcttcccacttttgctgcgagctggttgtgcgttttcctttttgaaagaccaagttgtgcgtttcacctgttccgttccagctcaagtacaccgtgtagatggtggctgcatgtggcaaatggcatgattatttggaagcatccgtcgagatgtaggctcgctcatagtgtggcctgttcgtgggccaaatccggcttggcttggttcttccagtactttagcctcgagacattactatagtcggcagtccccaaaaacacatgaaaaacaacacagtaatttttcctgatttctttaaaagcatatatttctgattgattcttttaaagtattttttattaggtaaataattttagaaagatgcaggggcccttcaatttccaggcgtcagcattagtcatgttgggcgggacagggtatggattgaggtttagaagggtatcaaatctgccaaatttacctagataaataattctccggatggatatgtttcatttatcatgtaagaaatggaaggattgaatggtggaacttgacaaaatcagatggatcaaggtttcattacagaaacacaaaaatcagattcagaatcgaggtcgacagtcaaaccgtgtgtgtcgacactcgacatccaataagaaggaagaccgattaacggaaatacactgcagattttgttaattacataacaaatgtataatcctggttttgttctctccaaggaaccaattctgatcctgggttagaacatggttttagattcttgtatgaacataagcaactctttgaccttgatcaagctatagcatgtgacctaatcaatcaagatacctatttgactttcataatatatttttccctatcacttgagcatgcatgcttttgaccatatatatgcaattaattatattttgtttggcacttgttctatcaagacgaatgcatcttatctacatatctgttgccctgtcgcttggttgtttggtgtggctacaatgatcaagtaaatagactttgatgatgcaagcatagtcgtttcaggcttgcagctagcaactggctaatcagcaaatgatgtacatagttgcatactactccctttgtcctaaattatagggcacctctttttaagaaaaattaagctcggtaacttttaactaataagcacactaaccatatatatgctaagtattatacatgttatttcacttatattcatattttaaagtactttcatgtaatattaatttcatatttgttaggaatataacatgaaatatattaatgcttaaagtatgtcattgaagaccgtgtaaaaaaaaatataggccttataatttaggacggatggagtatacagttgtaactcttaagcagatcgtcatcactaacaaaccaacagaatgacaagaatgcgcatagaaacacatgtttcaaacatggcattagagtaaaagtttataaattatgcaactctaagttttccatcaccctaagtatatcactagcatacatcatatttcatcttcactccagcctcagctcaaaagcttttgatcctaggggcattcttgtcttttttttaagaatttctctcattcagcaaattaccagtttttagagtgtcttttagccgtgacatgtttttacagtgtcttttagctgtaacacgtttttacaatatctaccagcaaattacactttttttaagagttctatagcaaattttgccacacaattattagtggaaagtagtagcgtactgtatttttcaaagggatatgaccagtagagcatatgaaattgtaactcatggtagttaatccctcattaaaatctatcagtacctatattaatagaacacttttcaagagatccgacgttaactaaagcatgcaaaattatatttcatggaagttaatgtcttaggagattctacgttaagtagaaagatctgaccgccaatcaagtattatatcatcaagatcatatatacattaattgatttaatctaccataaagaatggtgtgaatgttaaaagaggtgcctcttttgtagcgataactaaattaagtgggttccatctagacatcaattcatacccttgatttcttatataaatagtataaaataggggaactggagtctagaggtgctcctttgcaacttttctttcacccttgcaatgctcacggttggtagatcaacaaatgtgcaaagcgagggatctaatcgtccacttttgcgaaagactcttaacccttttttccttacctttaggtctacatggtaacatgtgtttgtcaggcatcccggatcagatggatgggtcaaaattacgcctccctgaggaactgatgcccacaacttttgacctttgcagtattttcgctagaaagaaatgactgcagaatccaaatggattcgtagatttggagcaatttgcttaatttcccttgttccgaggggcatcgatccagcgatttgtcatttgtccatggttttaaccaaacattttcgttggaacaaaagagcattatcctagtgttaactatagcaagtgaactgtgcaacaacaacgtgatctctatgagacattatttgactgttaattaagtgtgtgttgacttgatagtattcaatgccatatgaacaaccttttactgttaggagtacttagtagtactcctgtgcatcaacatggacaaattgtctctggagaactttcttttttacaacatgggcaatccataaccttgttgagtttaatttatcctaagattaattaaggccttgtctggtttgactagttagattttacatcatctaagtaacacataattcttgatacatccatctatcacttcttgattaaattgaagatatgagagttcttttttttgtcctaaggaaataagtagttatataagtttctattaatgtaagatatctgtataataagtatggatatatgttaaaaaataactctgaaaaataactatgtcttttcaatatctcctaagaccataaaaatattcagcatatatacaaagtccttaatggataaggggcatagtactcttttaagaaaatgcgcatgctaatctggtaatattagttactcctacttgggagttgaattcttaaaagaaaactaggtaaaataaacgcaagtgacatgaattagaagcaatttcaccgatcaccacccggttattacctcgatgtttacgtttagtataattaatcaactgcggtgataatcaattcataaactccgaacaggccacatgagtcaagtaattgctgagaatattcctctctcttttgctagataatttcctttcccaatcatgttgcccctgtatgaaggagccaaacacatgcaacaaagagggagagtgtggctttcttattcacctcctttttctgacctttttagttgttcctggtcgtcgtcttctctctttctaaaacatcctcttttctcatgtttctctccataagaaaaagccattccttctcttgtggcataaccaaggattaaaatctccggatatgccctttagctgctaggctttccatcagctacgaccagctatagctggctatagcggcagctaagcccattagctgttttgcaaaaactaacataaattttgcaattctcatacagttcaaagagtcaaagacacttgatattatattcaatagttccataccacattcaatatccgagaatcatataaaaatcttgcacatctcttgttaggaaaactagagaagaatggggagagatttgtgcagcccagcagtccccgccgtcttcagcacaaccgtcacgttcgcagcttggggaagaatggagaagtatggggagggagggattggtgcagctgccgcccaacacagtcgccgcttggtgccgggattgcacagccccgcctccgggcgtcgccgctgcggcctccacgtggagctgcagtcgttgttgctgcaggtcagagtcgccgtcgccgctgcaggttgcaggcttgcagccgccaccgttgcctccgggcgcagccgccacaaagctgccgtgcctttttttcgaggggggagggtgagagacagagtgattgagagagagagagatagagttagggttgaactgctgctatatggacctatatgggctgttgtttagctttaggccttcagcccaccaagttagttgccgctatctaagggcccatttagcggctatagccagttaagagcagctaatagcgccatagaatgtgtagcggcaaattggacatatcttagcggttgcttctcctagcagctaatagccggagatttaaatccatgggcataataacatcttggcctctttgttgtatcctatgtgaagttttattactttgtcctggaagaataaaaatggctggcgacgactatgatttgttttggaggagactggtgttgtattgtagtcaaatatttacagaacaccagatatttggcaccactgatcccctccataccaggggtaacaaataggccaaccaaatctcatattgtaacaaaaacattagacggcgttagagaaaatggcatgataaaaaaaactgtgcacatcacttgcaacagttcatgttacattgtagaacatttagttgcaagtagaaaaggtatacatgagaggctagataggggagaagtcctatttataatcctaaattcttgcagaaagaaactcagcatcaatctagaattacaaaaccaaacatttacaaccctaaactctctatccggctcactttgtccccttagagcaaattcatgttacagccctcttatccagttcaaaaccttataatataactgtagtaatttatagtgtgtttttctactctttctttacagaagatatggtgccataaatagagttaaacacaaaagttattgtttggttgatttaaacacaaaagttatttgtggaattaccaaaccaccggagaacaacggacgttcgcccaaattattaagaaatatggataacgaaggatacaatagcaacaccaaggcgatatgaacaaggtttacaacatctatgattatcacgatatctgggtgggttttatcgttgaggtgtggtaaaggtaacagactgctataatgaccaagttcaaaagaatttaaataaaaaataatttttttgtagaatttatccatttttcttattttcgcttgtaactaggcttattgcagagaggggaaacctctctctgatctataaggttaaacctagctgtggtgcggttaatatatagtggacgcctcgtaaagatagcataaaacctgctccaaaatgcttaaatgcaggggtatgtaagcataattgtctttaagccttgtgttagttattccatttgagggcgggattggaggggatcgaggagggttaattctacaccttaatagatgtggaactattcccgccaaaaccccctctatttctttgtgggtggaattaaccaaaacaaggtcttaatgtttggtgtggattgattaacttatatatatcttcctgctttaagaactactccctccatcacaaaatataatgtgtaactatcattaacatgaagatcaagaaagaattattatcacctcatttaaaccactcgaataaatacaatacttgcacccaataaaattaaagatattgagagtgtagtatttaaaaataaataaataaaagaggacaagggtgttatttaactttatatatataatgcatggatgcctttgtattatgaaatattggaaaaaatagttatactttatattttgggatagagggcatatttgcgctagtagtagtttgtcttgtaatccctcaatatattttccagatcccaacagtgctatatccctgagccatgtgttctcacttgtacggtcaaatagctaaatatatttaattcagtggttaaaaatgaaggattatattccctgtcacagagagtcggccggtatggataagcgtgtctcatacttctatgatatttcggcaggtatatatggagtaagatttttaaaatcactgcaggatagatgttgaaaaaaaaacccattaatatcaaaggcaataaccaataagcgtatctgcacctacgtacatacgtgtgtacaggctggagatactgaatgtacagcgcgcacagagtgtgcacatgttgtcgacgggaggatactgatggctacacgctaatacaactctgagtgattaattagtctggatagcttagctataatgagcctctctagctcgaacactcttgaagcaggagtacattatgtatatatgtatgtatgtgtatgattaatggctagcaaaatactccactacgtgcaagttgctcacctgacctagctactagctaattggctggctaatgcgtgtacgtacatgctaatattgctaataccagccatggaacatgttgcgttgaattaatgggtttatttggtggtagctagtcagcctcgcacaaagtagtggaccagccgtcgctcgcgtacgagaagagcaggcgagacagtgcgtacgcagctgctactactaaacacggatgcaattaaggcttgatttgtggcctcgtctccgtgctaattaatcgcgcgccagcccgtgtgcagcccactgttgttggcagacgtcctcactgggtgcgcatcatctgccgttctctatttctacggcaccgtgccgttgatcaatcccaaccgttactttgaatggatgatcaggatgtgcgaacccactggctgaaggatcgatgcttaatttcctcttttcttctttagttcttctgacctgtcccgattgaataaaaggaaagagcgacatcaccgttaaatgtttccatcattgagtaaacagaaacaaaatggtcaggtgacacacgtaaaagtgaaaaaatattggtttcaaaaaaatgaaaaaaaaagatttttctgttagcttgtcgcctcatgccacaaagctaaaattttgataggtaaatttgtcatcaatcgatgccaaggtggaagttacagaacaataaattcaatgtaaaataggagtgttcttcacttctcgtgggttattttgatcttatccgtccatttcaaaccaacggttgggattggccaacggcacgctgccgttgaaacagctaacggcagacgatgtgcacccgtcctcattggtcaccagccgctatagacttgccgtagtagctctacagcagcataaagagatggattattttctttctccagaacaaatataataataataatatctttataactgatgccatttttgaagaaaaatgcataaggatattccagctaactccacaaggtggtggattaaacgatctggtttcgaaaccttgtcgttactaattatttgatattatatcattccctattattcgtgttcttttttcatttctgaaatttactttttctaatttatataagtgtgatattgaaattggcattcaatagttaaattcataaatataaaatttcccgaccatttccgtacaaataatagaaaaataataccgattctgaccatttccgaccataattcgataataaattttagaattgatttagaactttttttttcatccctctgtatattttctagccttaatttgttggatcatttccgattattttatttattttccttccatataagccttatctcaaccaaccaataaggaacatctttttccgaagatcttccacccccgaacacgtaaaaaaaaacaatcggatctcaaattaccatacaaatgtacaaaatgagataaacatgcagtcattaactaccataaaaggtgttcaaggagataacaacccattgattacaacgaaacccccacgcaggcgtaggtaaggaaagaccaggacggacggccaagccagcaaataccaccaccacatcgtgtgaaagccgccgcagcaacgagcgagggggatgaaacccaaagacggggcgaagacgggagacggaacccgcaaagacgcgtattagttgggcggctgccgcgactccaccacctctcctcgctttgcttgcttgcttcctcctcgctctccctccctctcttcgcttccttcccctccaaaaacccaataaaaaacgcctttcctccccccccccccacctcctcctcctcgatcccctcgccgcgaagatccgatcccgagcacgagcagcacaccgatcggtgggtggcctcctccggcagcctgaggggtggcgggaatggcggcggcggcggcgatggccctctgacgcgacgcgcgcctttctctggcttttggctgtggtgggtgcttgtgggtggagagagagagggagagggagagagagatgggctgcttctcgtgcttcgactcgcccgcggaggagcagctgaaccccaaggtgggagggccgtacggcggcggctcctcctcctccgccgccgcggccgcgtacggcggcggcggcggttccagcgctggtcggcatggggagaggggcggtggttacccggacctgcaccaccaccaccagcagcagcagctgcccatggcagcgccgcgcgtcgagaagctctccgcaggtgcgtccgttactccctccgttcgcgttgggttgagttggggtggatctccgggcggcggcggcggttggtggggatcggatccgcgtcggggggacacggattcggtccttccttttccacgcctcctttgatctgattttagtattccttctcgtgtttcgtgatctctgcctaccgaattaccgcaatttgtcctgcaaaatttgtccagaaagcataactatcttgcgctgtttgatatgtagatgctgttggggttagttcatctacttcagatcattctgaaatgaaaaaaaaatatggtattatatgggagatgaattgatagaccgataggacaaggcctatgctacattcagactgtttatttggactctgtagttgtaaattctcgctgtcgcgtgaacatactggttagcttagtttttttttctcatgttttggtcaacatgggcaggggctgagaagacgagggtgaagagcaatgcaatactaagggaaccttctgcgcccaaggatgccaatgggaatgtaatatcagcacagactttcaccttccgagaactcgcgaccgccaccaggaatttcaggccagagtgcttcctgggcgaaggaggctttgggcgcgtttataagggccgcctcgagagcactggccaggtaacttattttggcaaatgggtatatgcttcattcttgcattcgcctgtggagagctgaacaaccggaaaattgcactgttgtaaaatctttactgttcacttttgtttgtctaagatctacgttctgaactgtttacaggaatgagaaatgaccatgttgagcaactgtttatttcatcttgtttgtttatgcattataatactatgctgctccctctggtcgtaatacatgtcattttggcctgggccgccttttttctttttaaatatatttgtcaaacccattaaattataggactatgcaagtacgttgaaatgcaaatcttctcatatgattttctttatccagtttaattattcagaaatattactatacccagaagttttgaaactttgacatgatgcttgtccaaaatacaagtatttctgaccggaggaagtagtaataactagtaagtgcaattttaggcaacaaggatctagtgttgtatgttcagtgtgttgtattgaaaaattaagagcaatatgattgaagcaccaaaacttcttctaaattaaaattagtttaaaagaagtatgatgattgaagtccctttttcgtcattgcaggttgtggctataaagcagcttaatagagatgggcttcaaggaaacagagaatttctagtggaagttctaatgctcagtttgttacatcatcaaaatcttgttaatctgattggctattgtgctgacggagatcaacgtcttcttgtttatgaatacatgcactttggatcattggaagatcatttgcatggtacgaattctatgtttattccctgtagagatactgttttgcatatgaccacaacctgtaaattttctgttaatggtttctatgtctgtacctgcaatactgtcctctgtcacatgtttccttaggtacagattgtccatcagcgattctatccatgcttttctatctgtgctctttatgtggcagaattagtgtccatgattattgtttttcaatatcggcaaatgtttatgtggtggtagactagtatttcattacttagccctaaaaatgtcaccatttgcattaacctgctccctgttgaagtgttgacattttgtctcttccaagggtctaaaataggcttgtaagagtggcaaatagttaatttttccctaaaatggtgcatgacagcataatgtgagtactatgtttgtcatgttttacagttcgctcgcatttctcatctgtgtgtactgtaattttcagctgcaatttttagatgtgtttggctatttgttgtaagttaaataaaagtcataaaacctatggagttacttataaagttatgtggagttgttggtctgcatataccaaaaaattacttataaagttatgtggtctactgaaaatggttcgtgatgtaaaaaccaatgaaatatttttagtcaatgatctatggaaggtgtaaatatattttttatgtcttgttacttctcaaggttctcttatgttcagaaattgtaccctttaactgtattgtgtgagtctaatatgtgattttgaattaagtgtcgatataaatatgtatgaataatgaccgtactaaacttcaataaattgtttatgtggtatagatctacctcctgataaggaagcattggattggaacacaaggatgaaaattgcggctggtgctgctaagggactagagtaccttcatgacaaagcaaatccaccagttatttatagagacttcaagtcatcaaacattctcttagatgagagtttccatccaaagctgtctgactttggtcttgcaaagttgggtcctgttggtgacaaatctcatgtctctactcgtgtgatgggaacatatggatattgtgctcctgagtatgctatgacaggacagttgacagttaagtctgatgtatatagctttggagttgtgttgcttgagttgattactggtcgtcgggcgatcgacagcactaggccacatggggagcaaaatcttgtctcatgggtaagctatgttctgattatttaggagcacatgctatctatatatgctaataacctgaaatgatttatctgtctagtatctcctaagtaattgtttggatcctgacatgtcgcataccatcaatatgtttggtagtagatctaactaatatctgctgcattttatcagaattaaaacatcttgaaaaatagctcataaagataagatatttcctggttactttctggaactgaaaatacaaaagcaaatagagtaaattattatgtcttgatgtccaccttccaaggaacggatgacatattagatgttgtaagctacatctatgatttcctgtcctccatgcttatactggtcaacatactttgatgggctagagcagatcatgtattgtgaggctaaatgtttttttttttttgggggggtgagaagaggctaatgacttgacccatgtactcacaatatttcatattaactgccaggcacgacctcttttcaacgacagaagaaagctcccaaaaatggctgacccaagactggagggacgataccccatgcgtggactttaccaagcacttgcagtggcatctatgtgcattcagtcggaggctgcgtcgcgtccacttattgcagatgttgtgactgctctttcctacctggcatctcaatcatatgaccctaatgcggctcatgcttcaagaaagccaggtggcgatcagcgaagcaaggttggcgagaacggcagggtagtctccaggaacgacgaagccagcagctctggccacaagtcaccaaacaaggacagggaggattccccgaaagagcccccaggtatcctgaacaaggatttcgacagggagcggatggtggcggaggcaaagatgtggggcgacagggaacggatggtggctgaggcaaagatgtggggtgatagggagcggatggtagccgaggcaaagatgtggggcgagaattggcgggataagagacgtgcgatcgagaacgggcaggggagtctggattccccaactgaaaatggctaggagcagggcagcgaggggttgatccatccacccatgtatgtctgtttatttccaacactatttgctttcctgtggcagggagaggggagggagggacggtgggttagatgtacatttctagagaaaaagagagaagaaacgggagctttgaactggatagtgaattcatgttgttgtacttgtaaattctcagaaatttttgtgagaatgaaaggacacttttgagttccctttgaatcatcctcgttatatcttcttatcatgttatgcgctcgtagcaattaataatgtttatatcggactcgttcctattagttgacttgatcctggtcatggacatgggatcattcttcgtcagcgatcagttaatgccggtgctgtgccgactggttacacgatcgagatgctgaagatgctctgaaagcaactctgtctattggtcgatccatcagcgggagagaagaggcaagacgtcaaaaaaatatcaagcagacgttttggtgtcacgcaccgagcacacggcaagcgtgcctggaaactgaccgatcggtggagcgggggaaccgcttgcgcgcacgacgcatgcatctcccggagaacattacaccaccgtcgccgcgcccgtgtcccctgccggccagggagaccccaaatataggctcaactcgctccctgtcacttgccatgtaggaaggcatagataggaagctgtagttacacgcgtacgccctgaatctcaccaggagaaagcaaagcgtgtgtggctggcttttcctgcggttgtgtttggctcaaatcgatctcgatgatcttgtttttgccctagccgtgctggtgtacccggctgcttaggacatcatcacgacgcaacacgcaaagcctaaacggacggagactttagacgagaaggcgacgctaccgtaggcatgaaccaccacggtccaaaagggtatgggtgcatacacaaaaatagacatacgcccacagtgaagggccgccatccaacatgcacttcagactcattagtaggcccaaaccagcacattttccttactactttgctgacctcaggccgaattctccagtgtcggttcaacccaatgataaacggaataagttcacttcaggtaccttaatttgtcatcgagtctgaaaatcatctctaaaccacaagaccggatatgacgcgtctctcaactttcaaaattagtgcaaataaggtccaagttggtttggacgacaatttcgattgacatggtgcttatacgtggctagtttgacttagttctcatcctatgtgacgatgaggtggcattggaagcaaaatagtcccaccctcctcttcatctccacagacagcggcgcctccttctccgctctcctcttatcgctatgggtccaaacactactagaaaattaatttttaggaggccaaaaaagattttagtaggcgggcgctccgtccatcagtatgcaaagacctgattttcacagacggacgtccagtccacctgggaagctgtatcttcgcaggtagaccgcataactaatccgcctagaaagatatatctcccaagcaggctgcagcacaatatgccatctgggaaaatgtgttacgcccgcttgagaaaatatgtagtatatttgaaattaattaattaatacataaatatatctaacaactagtatatacatgtaatacagatataatacacatatattgcattcattagtaaaaagtgttggtcatattagtaaaaagtgttggtcatatatacatgttaattacacaagcacgtcatttcgaaatatattgttaattacacaagcacgtggctccaatccaaaagagacttgtagtctcgctcatcgctaggctatcttcggggtcgaagaaaagtccatcttgataacagcactcgcagtggatgaaacacaggataatgtgggccccacacgattgtaggaggatgtgacgggccactagttaaactttcctatcattagccatcttcggtttcgaaggcttcgggtcataactgcccacgaccctaatgtttatctggtctccgataattgcgctgttgtggtggagagggcgaagctgccaaagcatccaaagggtttccaaggcataacctctccccgtgaaacttcaacctatactccatctcatttgaaatgctgatgcccaactcctctccttcaattaatcgccgccgccattcttctttcattcttgtccgtgatgccataggccaactgtcgtgtggtgccactcgaaaggtgagctcttccaccctcgcgcctacgcgacgatccagagctagagaagggagaacttctgataccagcctcccattggtggaggccaaacatcacggtgagacgggggtcgctgaagcccaaggaaaacgagtcgtcggaggtagtgtactgcattgactacgcagtggtcaggttagtactctcttcttatagttcttcacgcatgatagtgttggccattttcgcccatgtgtgcgagatgttcgtcgatggagttgttctgcaggtcgttcttcatcccacaacacctaatgaaatattggggctctaacaacccgaagcaagtggtgtggacttcatccccatagtgctgaagaagtgggagtaagccattagcatatgaataattgtgtattaattaatacaaactttaaaaattggttcatttgatttttaaagaaaacttttacataaataagaattttttaaaaaaaattcgtaccatttgatggtctgaaaatatgttaacaaaaaaaacgagtaaattgtttggagttgaagaaaacaactatgccatagtctatgatgcagcgggtgttggagggactctagttgtgtgatctcacccctaacgacatacaggaacggattaaagatcgaggttgagaggcttgctttgacacgtttggtatggcagacatcgtccggagggttgtataggtagtcccatacgtaaaatttagcgatctcgtgcgctgagatttttccgaactgcaaaagaaaaagaaaaacggaggaaagggcttcgtacgtcggcgtccggcattggcacgccatgtgtgcggggtgccgcgcgctctagcacccattcagacgcctctcccgttccctgcagggaaagaatgacaggatataataatattgcggagtcctccccctcctcccgcgttgcaggataaacatgcaagcggcgcacgcgccgcggttgattctcgcggagcgcgtgcatgatcagtccgtgtcatcaccgactcaccgcgcgcgctgcgacgacgcgacgctgtgtcttcctccgcttctgcacacggcgcgcggagggctgcttgctattgccgtctacggagtagctgagccggtaaaaaggggagctgccagccttttgccagatttcgctttgcacgggtcacagtctcacacacacacacacacacacgtcgtgtcgtctaccgcggcctgcaggcgagggcgctcgacgtggcgccccgtctcgcccttcgtacgtatcccggtctgcaatagctggggacgcgccggtcacatgcgaccatactatgcacgcatgcagtgcagctgcacaccaccacctggcgcgtctcgtctgctgcgccgctcggttcggttgaaaccgatcgatcgagcacggtagctgagctagctacagacaccggttcagttcctttcgatctcagacacgttcaatagcccgcagaggacaacaccgtctctgtgtgtgaatgtgtctgtgcatgcaaggcgcgcccacgaggagcggagagcgcgtgttgtacgtgcagccaaggcccaaaagcgaggaggggatcgcggtcgctacctcctgcttccgcggggacacccttgtccgcttctgcacgcctgcatatgccgctgccgccttatttgatcgacctccacacacttgtcccgctacccttcgcgtgcgtgcacccaccgccccgcttcgcgccaacgctttcgattcctctctctctctctctctctctctctcgctcgccattttgctatacagctcgttgatgtgaatgtaaacggtgtcgcacggtaagctgagagactggaaaatcatgttgcagtaaaatccaaattttattattgaactgcatgaatcgaatgaagctaagcaagagcatcgacgcgacaggccggtcgattgcacacccacacccttcactcccccctcagtagctaggttcacaaaacacgcatgcactcggtcggtcgggccagcttaattagcttgcttgctcggtcggtctctgcatgcaagctggacgaaccaggcgagtcacgcgccaatacagtccctactagatctggccggagtactactgtacgtactacgccaagaggtgtctcacctagtagctagtacgtacgcgatgaacatgtgttcgtgtttatgtttgtgtaccaccagctagctggctatacctcacatgagagaattactactagttctctaagcttaatcagactacacttccacaacaatggccatgtcaggcttgatgatctgctccgttctgaccatagcgtgatcgccgtcaccggccatctcgtccgtacggttcgtctcctcgtcatccaccttcacctccaccacctccgagggcatcacgtcgtcgatggggtgcacctccgcgccgcagctgatcctgccctccggcgctgccgcgacggcgcccttggcgacggcctgcacctccttgacatgctccggcagcttgatctccagcccggccgccaccacggcggacgacgacgacgccaccagtggcttcttgctccggtacgccatgtacagcgccatctgcgccacgccgaacacgaagcccagcacgttgggcagcgccacgaacacgtccttcttgagcagcccgtacaagaaccagatcaccgcgctaagcaccaggaagaaggatagcgagaatggcatgaactccacgctcttggtccggatcaccagcctctgcaaaacacaacaatcatcagaaccttgtcatcagctgctggttgatcgatcgagcgattagttagcaagacatcaagattgcattcgtttgctagcttacgatgatgctcaagggagcggcgaagacgctgagcgagacggcgacgcagatccagccgaggacgtggacgcggagctcgccgcgggagagcagcagcgtgacgagcgcgatgacgccgaagaggccgatgttgaggccgagcagcatcttcgccgtgagcatcctggcgctcttgggggcgtaggcgaggtacatggcgaggtagacggtctcgatgacgcaccccacaccattgatggtgaccagcagctcggcgccggacttgacgaacgcgtagtacatccacagcatgcagctgaagagcgtcaccacgtacggcgtcgactggaacccctccgtcgacttcttccggtacacccggtagaacgtcggcctgcacgccaaacgcacgcatgcacacacggttaagttattgttcaacctgctaataattagttatcaacaaactagctaacagcagtttctttcgtctgattaatggaagttaaactcatgcttgatctgtgtcgtctcaataatggaactacaactgcctacaaggacacacacaattactctgctaaaagtgacgtgctgagagattttttttttctttccaccttcagctgactattgtgagaattcattagtagaaatcttcagagttatgttgccttcaggtgtatgctgaattctagaatggtatagatgatggtgacccttcatgtgtatcattgacatgtgtgatgcttttttttttgtacatactgaactagtattattattttaaaaacctaacaaaacaatgttatgcatgtgcttgatagaaattgaagcaagttgaggtgcttacagtggcgaaaggaataccattagtgagattaagttacctgcaaaaaagatcaaaggcagacacgggttatcagtgatgtcagccaatacaaaagagagagagagagagagagagagagaggcaaacagagaaaagaaatgcatggtgcatggtaaaaactaaaaagagaaaaaaataaggtgtgtacgtttctaactaacatgcgtgatggctccctttctctgtttagagtaactacctgattagagcctaaaagttttgtttagcagttccatttattcaggacagaaacactagttcttttttttttgttcaaacactagctttgaaagatattgaggaagacacactggagtactaattaaggtgacagaagcaacaaaggagattattgatctagttaactaagaaaacttgattccaatgggtgttttgctgcggttttcagggacattgcttgtgcggttgtgggaattaagatcgatacatgctgccataatgtgtctccaacaatatgggagaacatgcatgcacggattaatcaaatcaaaggaacagagtaagctaatataacagctagaaagaccaccgtatgcatgagatgaatgcagcattcatgagcatgttgatgcctgtatgtacctaagatgccaaaggtgaaggcccaagtgctgcgttccatggacatgaaggccatatcgatctccctagaactcttcctccaacaaaaaaatctgaacaaaaaaacttgatactagtatagatggtagctagctagctagctgagcctcccttctcctcttgctcaatggagagatgcaaaacacactgagcagtcagtggagaaaggaggaggagctatgtaattaagctaagatgtggcttgggttcatggagagccttgaaggcaggctcctatatatagggagagagaggtgagaggaggaggagagatgctggagaaaggaagaggtgtggcaacagccagcagaagcatgtgggccccccacgggtcgatcattgcacactgacctgacctgtcgcgcgatgcgcttgtggcgggtacgtgtagcatacgtaccctgctggaacgggaaaacctcaccagacaccagccatggcaatatgttgtgcatgtacagtatgtagtaacgtactcctaatgtatcgaggggcaataggtttttttcaggtatgtgcgtacacactatgcccgaagagagtaagccgtgtttaatggcggcaacgccctgtgacatgtcaaacaccaaacctggagaggcttccgtgttaagccccccacagtatccctggccgtttccacctctactttcgagaggctctgtgtgcagtgcgattcgcggtgggtgatgcacccagctgtttgacatgcagagctctcccccgatgtcaccgggtgcctacttgtcctgccttttttttgttgctgcaacggccgggctctcgcaccacgatagatttctgcgaaagatacggcagcacggagagggacgcgtcgcgtgcgctgcaacctgcattgtgtgctcgtcacggttgacacagctgacagcccaacattttttgtacgtagcgcgcccgcgctgtcattcgagactcaccgcgaccgtccgtccttccgaaaaatctttccaccagctcgcgcgcgcggctcgtcccggccggccgacgcggtcacgtgacgcgtacgtagctactatagcttactagatcggtgtggcttgcttggttgattgctttcgttgcgcggcgcgggcaccgtgtgtgtgcgtacgacgtcggttcgatcggggccggacggagccaggctttcgggagttcggcggccaagggcgtgccgaaccgagcgaaaaaaaggcccaggcgctctttctgtgctacagatccgtcccgcgcccggatggttaactcaacgctagggctacctctccaactgatcccagaagcttctcgactctaggtttcctacctagcttcaaatgctcatcaatctcgatcggtggatcaatcttggcttgctttgcgtaactcgttttgcgtgttgtgcataagtggcaagattgaacgttaacgaggaaaagcctcggcctttttttctcgaaatgaactgcgatcttgcgagccaggctagcatcgcgcgacggttcgacgcttttgaggtaaaaccgcggcgcaagtcaaccaaatcattggtagagggctccacaaatgagaccacgtcgacgtcgatcgatcgatcggactgacgagcaagcaagcaaagcagagcagcaatctctgcatccggccccgtttccgcggacggtttccaaactgaactcctccatctctctgcatgcgcccgtcgttgcgagccagctcgatctgcgtggattgccttcctcgtcatcgcgcacgcagaccattaacgttgcaggtgtctggttggcagctctctcaacgcgaccgatcgagcccgcccggtcgaattcgggttctcgcctgcctgcctgcctgcctgcctgcgtgcgtggatgtgtgtcgtggcgtggcgcgcgggcggaccgtttcccaatcatggagaaaccaattatggacttatggttcggaggcggacgcgcgcgcgcggtgacgtgacgtgaaggcgcgcgcgggcgcgagcggggggagtggatcgctcgtcgctcgcgcgcgctggggcgcgtggatggctggaatgcgggatctcgcccgcgagacggcgtgcgtgaagtgtgagacgcagattagctttggcttggcaagaccggtatcattgcgccacagctgaatgattgtggcgctaattaatgacaccctcctcgtcatcagccgcgccgtagtagtactactactctactacagtgtaagcaaggaacgcatgatttgcaagcgattgggttttggctatgattagcgtcctcgaacttagggcacccacaataattatctataggctctacaagagatatatatcagcatattttcctacttggaagaaattaaatgaagagagagagcaaagctatctactaaccttgagatactctatagagaaaaacgaggcaattgattagagagctatagatacccatgtagacataccattaaagtagtttactattaatctagtctattgctaagatgtacatcttttatagatagcaccttactttatcattgtgggtactcttactagagttatgtagaagccacgtacatcaatcgtcgtttgtactgtatagtataactagcatggtggcccgtgcagattacgcggctagcatcgttatattttctcttatataatagtatatatgttttcttattttattatttaaatatattaaaatgacaacataattttaaattttacaataactttacaaaactactaatgtgtaatatttatattttattttatatacgtgttagttattaattatttttaatatcaaattttagttatttgtaaattatatatattcctatatggactctagactcgtcttttaatattttttttctttaattccgaattttctgtaaattgtatttctatatagactctatgctcttctttcaatattatttattattatttctaaatttttattatttctaattgtatttctatgtggactctaaactcatatttcaatattctttaatttttaatttcgaatttcagttacttctaaattgtattctatattgactntaaactcttcttcccatgtttttcttaatttcgaattttagttatttgtaaaatggttttttatacgg

SEQ ID NO: 7028 - DNA, 37526 bp, Oryza sativa
tcctatcctaggttgctacattataggacgaaaggagggtcatgtctaaattcgtagtcctagtatgggacctagattgttacattatgggacaaagggagtagcaaataatagtccttttggcctctatataaacagtcattgataatatgcctgcgactaacaatcgaattgggatccagtgcagtcacgatagggactgcaagttaacaattgcacacaacttcaaccatccatttttatgatcaacggttcatatctaaagctacagtacccatgtgaacagtattcaacgctacagtattactgctacagtactgtgaacagtaccgtgtgtgacctgagccacccgatttgtatatactgctactgcttaagctgcagtcacacaaatccctaacaatcatacaaactgcctatgatttaggcacctagcatgacctcttctgtatcatttgcaagtgtcctttagcactctggtctaggagatcataaataacacaaagatcataataagagaaacattttattaagctcaccgcatgcatgaggcaacggggacgatcgatgagctggcaaaaaaaaaatggcccatgtgggggccagatcgaccaacatgatagccaaggtacgtaatgataggttttataggcggcagatgttgcgatttgcatgggaataattttgatccacatccagaccgatagatctttccaaatcaacacttttaggccctccatatgtcatcatgttaattaaccacggtccttttgttatgtcagtaacagtaattgtacatgtaactacatctttggactttagcttttacatgcatgcatgcctataccttttccttgtacatgctacatttttatgcagcggtggtggtactactgcaaagtgagagtatcttcaaagtacaatttgtttggtcggataggagatcaggagagaccgtcagtacaagcaaaaggacgttacgcaagcagacacaggagacgtaaaacagtgcagagttgttacctcgaacggagagatgaagagaaaacaaaaacagaacgggggaagaaggcccagctagctagtgaagacattaagaaatgaattaagcaaagaaaaaaaaactatagtaattaaacgtggtcataaaagggcagtagtagtttagtgtatttgattgattcttgcactgtttgttgagccttgatagtcgcataatcaaaagtagcaggaatgtcgtaggagctacatacatgcttctgttctgctctgcactcattctgaactagattcgagaatgtttcattctttcagtttcagatggcgatgagaatatgctgactgtttctatgttgagtttaagtattcgaactgtaactaattaatttaccatacatactgacggatggtcaaagactcagatagttttgacgaaataagcagaattaattaaggggagatgaaataaataaaacactggtagtagtaatttcagtagctagcaatagcatgcagcatcaaagcaagcaaatccagcgcacgcgccaacaaacaaccacatgcgcgcgcgcgcgcgcgaagcatgcacgagacggacagaggcagtcgtcgtgaagaaaaaagcacacacacaccaacctcgatctctcttcttctagctctagctcactcactctcaaacacacactcactcacacactgattaattagctagcaccgtgtaaatgggctgtatctcgatcgatggatatcctattagcagcagctaaatcaatcaactacttgctagtcatcatcatcatcttcatcttcttcattagcagcagcagcagcagcagcaggtaaagctttttgcgtgctaggtatactaggggggctaagccagagcacgccaatggcgggcgggcgaggcctagagccagagcgcgccggcctccttgaggagggggacgagggagccgttgatgtgcgcggccatgacgcggtccatggcgccgacgagcttgccgccgatgaagacgacggggacgacgggcggcgacgcggcggcggggccgccgtacccgacgaggcgcgccagggcgcgctccagctcgcggccgcgcgggtcgaggtccagctcgtgcaccgtcgggtgcacccccatgccgcagaagaggcgcttcacggcgtggcacatgcagcagctgctcacgctgaacaccaccaccgcgctctccgacgccagccgctccacccgcgccaccgcgctctccaccatcggtgccggcgccgccgccggcatgtaccacgcctgctcggccgccgctccgtactgcattctcgccgacgacctggccggtgatctgatgcacaaatggagatgtgtgtgcttccttcgcctgaaaacgattagcttagctagagaagcacagagagctgagctagctagctgtgtgcttgtgtgttgctaagctagaatcaactgaggtgagcttgaacacttggagaagggagtgaagggtgctgggtatgtatatatagagaggagggtgaggggtacaatggtaaatttaggggggcagggaaggaaggctaggccacttccaagccaatgaggtccttttggggttccaacccaatattactcggttttacttatgtttttttggggggtagcactagctcaccactttgtttatttttcacctgtctagtttagtttattgtcaatctgttggtgatgtgaattctttgacttgcttgtatgccgctggtagcttgactcatgcattactcgttgtacatgcatgttttttcacctagctagtggtagctcctccattcatatatttgagccttgtccattgtgctccctttcctggttaattcagcccaaatgaacattgaacaatcccaaatcaagcacaatacgtattgatcatttgatcagagacatattctgcaattaacagaagcatctggtcaacttctatggcaaacaagtcattcactactaaagtttagtataggtgaatgttagtaagtactttccctttacctggaattagtcatatatattatatactaaaagttcattaaacttcctacaaacgcttctaaaccgccatgtgtcaccctataaacgctcctaagccaccacgtggcgctttaataaattagagaaaaaatatgaaaaaagaaaaatatctgaccgtcaattttcatttaaaacggtggacccgatactattaacctttagatcaaaacttaaaccccccccccccctcaccctttccttggctgtcaccacatgtgtacgtacgtacgtacaaattcctcccccatcaatctcttcttttctttcctaattaattaaggcagttaaaaatacacaccataatttgttaccgtggagtcaaaagatctgtttttccatagagttttagccgggagcgaacacacaatcactgttatataaaggagtggtctcgatgctaccgtaaatagaaaatgtgttttcatgggtctcatattttacaggaaaaaatatatatttgaaatatgaggatggcatgagctgtcaattatatgggattcttaatttgcaacgagcataattgtgacccattacatataatctgatgagtaatttcaatgtagtctagagtttatggattttaatgtagtctatgaagagtataattttaattttatatataatatttgtaacacaatatataatctatgatgataacatcagttatcttattaaaaataactttctaaaatagatataatctaacggtctaaaataatgggtccactaatttaaatgaaaatcgacagagaactttttaaatagatataatctagcagtctaaaataacaagtccaccaatttaaatgaaaatcaacgatgggattgtagaatgccacgtgacggcctaggagagtttgtaggaaatttaaatgtcctacaaacgctcctaagccacgacatggcattttaaattagagaaatttctaaaaattctaagaaataaaaacaaaacatctagccattgattttcattaaattaggtggacccattatttaccaccgttagatttatctaaagaaaaaaaaactccctaaccccaatcaagggtccacctaggcctatacgtacagtacgtacgtacgttttctttttacaggtaacaagtgcgtacgttcgtaatgtacttccaccccttcttccctcaatttttttcatattgcacatatttcttctattcatactttattagttacaaaagcaaaaaattggtgttaaacaattcagcaactataacatctaattagaactattttttgatccacttatatctttaaatttatttatgactaaatttacagctaaagccaaatgttcactataattcaactttgagaaaaaaaaagtcaatttggattttattttcagacggtcacgtgccattcaagcaattataaaaaatatgaaataataatgatattatagactcaatcatcgtgcataacttcataataattaaataatatctacaatcataaaggtaaaaataaacataccaaaatatattagttagaaagcaagagttatgctaaagaaataagcaactataacatctacatcatggatccctaaatcagataaataatatttctgcttatgtattttgattactatacatttaaagacccatatttggggttatattttctggctttgtgtgccattcaaacaactacactactggagaatgtctctattctcccggttcggaataattcaattagatatgtaatgacaaaagtaaaataaatctaataactctgagtattgttccaaaaaattactcctcccattttgatattataataaatccaaaataacattagtaaatctgtagtgttcatattttcagtatctcctatatacgaaaagatgagtaaaaatgatatatcttaatcaatcaataaaacttttattctatttttagttaataaagtaatggtaactaaaacactacaaatgtaaaaaatataattatatgtgggtgtactttgtccccttctactttgtgttcttttcctttctcactcaactcctccttataatttctaactaattgacaacataatacaaaaagatcaataattacaaagcaatataattatgattcttatgttatatattttttaagagaacacagcaggggaggcccccgatgttaatataattttattaaaatagaaaagaacatagttacaacagattaatccactttttcttatgttatatctgatttttagtttatttgaattgttattttatttataattaaataaaaaattcaagacgcatattattcatatttcactgtataaaactaaaaatacaccatttgagcatacacacctatctttgcatgataaccaaatagaaaaaaaatacagaatattataaataaaaaatgacaataggtttatatgacctcaaatcattgtgcattctctgtatgtgtcacgtgttatgtcttaattaaaaataaaacctcagaaactgtaaataaagacatctgaccattagtttccacttaataggtggatccatttttttaccagtagatataattttagagaaaatcttaagccgccatgcgctacgtcttaaaatttagaaaaaaaaggatattagaaattttgacaaaaaaatcatcggttttcacttaaatcatttaggaaaagaacacccctccacttcgccctcccgtcacatatgcacagcacaacactacccgtcccctctcctctcagctctaactcaccactctctcctctacccatcaattttttattgcaagaaataatcaataatattaaaacatgtatatttttaagctacacatttgatttttaatctgactattgctctatccataacccctatattttgaactggaataaaataaaatttacaatttaaaatatcaatagggactaaattgaactatttggagaaaatcaaataagtttgaacttttcactaaaattgaaccaaccattacatgttccatttttctaacaattattaaatgcttaaatattagtggtcttgcatctatccaataccatattattacgagtttgtctgcatattaagccacactaagatattaatatatagttggttatatttgttactattatatttaaatttttggactcatgtcgactatattttcctatagatcacacatattaaaaggaagcgaggttctaagatatgtttttgttaatttatatgtaagtatgtaaaacatgcatattgaaccaactaaaaagatgactaacttgatggtacaaataaagcatgtttactaacaataatagttctttaggatttattaaaaaaggccactaaacaatcaattaaacaagacaaaacattttactttatgtttattttgttaggcacgtttttcaaacaaattaaataggtatttttgaaacattgcaggtgtttatacagatcatacataattgtttataccgatggattaaatattatatattttaaaagctaacaaatagcatggaaaaattatctaagtaatgttgatgaagaaaaattacggagaaatagtacttttgaaacatggcatgtgtcatccggttgatattccgcgtatataagcttttcaaatgcaatctaaatacatgcccgcgcaatacaagtttttcaatcatggcaatataagtttttcgaagtagtacttttgaaaaacttgcaggtgtcatcggttgatattccacctatgtaagtttttcaaacacagtctaaaatacatagcgctaccttcctagttaagatgaaaagttgcatgcaattgtacatgcactgtttggtttctgaaaatgtatgtgttgtgctgcacggagacaggcaatgcaaccggacggattaaacgcaaggctttttctttcatggcaatgcagcagcaaacactgcgagtgtattacatcaccaagatgtttctttgtcccccctggcttttgtgcgtgctagcgtagtaccaccacttttccggggcacagcctgtctttatcaatgcaaaggagtggccggcgcccctgcgttgttgttctagtactgctgagaagagaattggctacgagatttgatttgatggtgacagagagaaattaaaagccatcctccaaaagaccggcttttgcttcagcatactactcccaggctgtgtttagtttagcgtaaagtttggcttttggttaaaattagagatgatgtgactgaaaagttgtatgtatgacatgttgatgcgatggaaaaggactaaactttaaatccaaactttgaatctatacacggctatgtgtgtttccagaatcattcctagtcaacaattcaaaaaagcttatgcgtgcatggatggaagcaaaagatcgatcacctcattctgtcatacatatccgttatggaattggttcctattcatactgatctactacttttcgaatcttataaagattcagattaaatactagcacgtaaaaaattattacgtatgattaattgagttttaattattataaacctggaaacgatatatttaatattgaccaaacaagtgcactaacgaccatgccattgcctaaaatatctcctatttataaccagagggagtaccaaattaaaccccgggtgaaattctgagcaaaattaagagctttcaaaggagaagatcgatttaacgaagaatttccctgcctttggaggaaagaaaaaatcaaacaactttgaaaccccagcagaacaacaactactactacggcctttggaagattcaacggccgggcatgcccatgcaatgcaaatgcaagagatatgcaattgcaactttgacagcgagagtgggggtaatagcggctgtcctcgtccttcctgtcgggacgagacgactgtaccgtgcatgcatacaggagtagtaggacctacaaagccagagcaagagcaactcacatgcgttacatatatatggccaaaacgagctttttggtcgacccccagccaaagcaaaatcaaacgaagccagccacgcactgttctctgttcgcgtttgctgtgctatagctgtgatcacccatagtgccccacactagctttggctttgctttcttccccacctaacatgcaaggagatatcatgcgtgtctctgtttgttttcctcgtcacactagggtttgcacagtgggcgttgtctccggccgggccattgcatggtgctctgctagcttgttgttggctttatgtggcagctatagcacacattcatgggacatagttattgtcttctgtggtgttgaaatgttgagaccggccgggttagaccataatatctgatggaataatagtagttgtggagatctatatatattgcgaaaacgctaagtaccgcgtatctgatcgtgcgctgaaaaatcggtcgccacacgcgccatgaggtcgagccgcgtggatcggacggctatccatcggactgtgacgttgccgttggatgttatccaacacaaatgctcccatctctcatttcttcaaaagatttttttcttgtaaaccatttatctaatctacgttctgattacaccattaaatttgttacaattaaatctttacaacaagaccacacatgattatatttcgacaaaaaaatattttagcttttttattgatatttttttagaatgctgcatatggttcttttgatgtttcaaccagtagttttacgatgtttcagctagtgtactcgtgatgtttcactaagtacgaatcaaatattgcagtggattttgatattatggaacgtcgttgtaacaaatcacccatatattttggaaaccctctattaagggaattcgtttctttttttctaccaaaaatgttttacctagtgtacccatgatgtttcactatgtattgatctaatgttacagtgaactgaaacattcttttgcaacgaatcacccatatattttggaaaccctctattaagagaattcgtttcattttttgttctaccaaaaatattttacttagtgtactcacgatgtttcaatatgtatagatctaatgttgcagtgaactgaaacattctttcgctatttgctgaaacattgtttttatgtaaggtgaaacaacgctcgatttaaacgattgaaacattttcgacctacttagtgaaacaattccgatatatttggtggaacatcgtgcaacatttaaaaataatttaataataagctaaacaaatttcatcggaatatatccatgtgtggtcttgttttgaagatttaattgcaacgaatttaatggtgcaatcgaatcatgatttggataaataatttaagagaaagttagtttaaagtggttttgcacgcatgcgtggtgctgacatcagacgtcagcacccgaattttacatgtttggatcgggttcccgatgggtagtcccctcctatatattgggcacccccatctcctataccccctgcccctaaaacagaatgtaatgggcaactagattactagagttatctccctcttggggttgctctcaaaaggaaaacaatatttaagttttaaacaaagtcataaaacctagctgcttccttagttgtttggtgttacagaatataagctacaatactagcttgtgcatagaatggagaaattttgaaatgctgttcaagttaaaaatggaatttccttttatttttgtgtgttttgtgtattcctcttcatgatgtttggagtctaagtagtactcgtgtatcttttggctagctgtatatcctttgtgaatataaagaccagattaatgaaaaattcattatctaaaaaatctatggcctgttatatttatataatgtgcaaatataacacattatatggtttgtcaaacgtgtgttgcacccactattttggtattataaatctaaaattgaaattatatgttacttcaaaactaatcattatatgatccttattttagattatatctggtagctagattaataaagaatacatatcaattacatctagctaattaataatttcaaaactaaataatgaagtgagaatccagtactacaggtacaactttatatttatcaattttaaaagtttaaatcactaaattttgaaagaagaaaaacataaaactagagagtccataatattaacaaagacgtgtgaatggtcaaccgactctctcttttgttgttttcttttgctacattaattaatcggtggcgtcaactctagatgggttacgtgctcaatctgatttggttttgagttagggagatcgtgtcagacgtcctgaatcgctgatttctccataaatgtagagccgtcagccgtgacctccacactatacatgccaaaaaacaattttagcttatgttggagtgggacgcgaattctggctcgggcacctgatgggaggaggtaaaaatcggatgctgatgtcagaatgatgtcagaacccgatttacgtgcaaaattaatttaaacttatttttctcttaaattacttatccaaattatgatccgattacaccattaaattcgttgcaattaaatcttcaaaacaagaccacacatggatatattctgacggaaaaaattagcgtattattgaattatttgtaaatgttgcacgatattccaccaggtatatcgtaattgtttcactaagtagatcgaaaatgtttcactcgcttaaatcgggtgttatttcaccttatataaaaacaatgtttcagcaaatagcgaaggaatgttttagttcactgcatcatttgattcatatatagtgaaacattataagtgcattaggtgaaacatttttggtggaaaaaaaatgaaacaaattcccttaatagggggtttccaaaatatgtggatgattcgttgtaaaagaatattttaattcattgcaatattagatctatacatagtgaaacattgtaagtataaggtgaaacatcttttgtggaaaaggggagggacaagtgggtgggtccagtgggggtgcgcacgtggggggagggggagcgaccgattttcccacctcccctggtcgaccgatcctatttattctccattggagtggcgtaatatttggcggggttacgcttcctatccaatttggttccaatgactaccgagctaactctccatgcaacacatcgtaaaagaatttatgattttgcctcctcctccgtactgtcatcccgctcgtcggtgtgcactggtaattatcattagagcatatcttcggaacttattaaaaataatactattttaatagaaaattgcaaaaatagagatcgaccgactaaaatcacaaatttaataccctatcgaacaatcattattcgataagataaatattgaacaactgttgtttgacagaggttacatgctaaaaagtaaaaatataaaagctcatcgtgcagtgcacatgctgccattgcagttgggtcgaaggacctatcgaacagctatagttcgatagacgtctcttttcatattttttttattttatttaaatatactaacaaacctgtcgaagaatagttgttcgataggctatctattattgtatgttcagtactaatcgtgccgtagttgtttgatatgtagttcgacagggtattaaacttgtgatttcagtcgagtgacttctatttttacaattttctattaaaatagtattatttatagggcaaaaccgttctttttagaagcgttatattgctacgtttgactgctcaagttcgtccactatggttcgtccctcctctaagttcggacgctgcacacgtcatcatcgacacttggtatcatacatcgtcaatgcacatctgctgagcccacaaacctccaccatcatataactagtgctttcccgtaaagtgatattttcttatgtttttggcaaaaatagggtggtgtattcttattataaagatgaggaaaatcgagccgaggatcaaattaatcaatcggagggaaatattcatcttgccagtggagattctctacagtaccactgatgtagtagtagacattgacgtgcgagtctatatccacatgtcaaccaaggctgcggcatcagtagtactgcaaagggcatgcatcctccacttacatgtttgagcatatatatttttatggcggtgcacttcatcgatcccaatgcaaaaataaaaataaaattgtaaggcgtatctctcttaaaaaaaggtccaatccgtggctacaaaatctgcatactccctccgttccatataaacatttttttagcacagtgacaagtcaaacatttttaattttgactattaataaaaaaaataaaaaaaagatcaatcatgcaaaattgatgttactagatttatcattaaacaacttactatcataatatacaactttttttatttaaaacattttacttctatagatatcgttaatcaaagtagtatcttagagaccggatcagagtccaaaaattcttagggcctgtttagatccagggactaaaatttagttcctgtcacatcggatgtttgacactaattaaaaatattaaatgtagactaataataaaacatatctcataactatgtactaattcgtgagacgaacctattgaacctaattaattcatgattagtctatatgatgctacagtaaacatgtgctaattatagattatttaggcttaaaaaattagattaattggatccatgccactgcaactttgccaaattaaaaaaaatacaccactactattcccgatatctactgggtgccatatgtattttgcaaatttttaaccatgccactgtatacgtcttggacccagttggaccaggttttttcataccatatttttgtaaggaccaaaataccctcagtccatagaggatgacaagtaggacccaccttatcatacttgttttcatcctatcttatattttggtatggagggagtacatactttggtcaagatttatagcatccgtaactttggttcgaaatcttggcttttcctacgtcctacgacgactattcttttgtattcaaacttctaactttttcatcacatcaaatgtttggacatatgtatggagcattaaatatggacgaaaaaaaatcaattacacaatttgcatgtaaatcgcgagacgaatctgttgagcctaattacgccatgatttgataacatgatgctacattaaacaattgctaataacggattaattaagcttaataaattcgtctcgcagtttacaggtgaaatctgtaacttgttttgttattagtttacgtttaatacttcaaatgtgtatccgtatactttaaaaaaaatttgacacacagactaaagcgcagccaaacacagcctttaatttgttcttcgtcagagaaggggacagtgtggaggctgcatgcggatctccatgcacacgcgctgtacttcctcccaggcgaactgtagtagagtagctattcgctcgatcgatctatagctagcatcgatccgtggcgcggcgggcgatgcatgggcgaaaggtgctctcgatcgcacgagaaaaaagcaaggcgtgagcaagtaacatgggagcctgtactacctagcactatagattctactgccccatgtctgcatttctagtccggtgcgctgactcagtttatactttttttcattccttaaatccctttgaacaaaaatttctttctatatactaacttttgcacaatatttgatcgttcatattattcaaaaatttaatatagatacttaatagtataagttaagattatattttatttgatgataaaacaaatcacagtaaaataaataatatttatatttttaataagacgaattgtcaaacattatatgtgaaaatcaacgacgtcgtccatttaaaaatggaggtagtatatctaaatcatttttccacgtcgtctatgtaacattatatgtacataaaaaaaaactttgcactgccaaggccaaaatgcctattttctttaaaaaataatgttaagggtacggtattctaattttatcaattaaagaatttaaaaaaaaaatcctcgattggtagatcgatcgagttggacgcaggtgatagatgcctgttctgaactttttttccgagggcggtgatacgtatcttccgatcgctcctttgggagtttatttatttggtttttgtccaatcgctttgtactttcttgatcctttggatgcatgcttgtgctttgtgctaactatccggccgggcctcgacagaaatggctaaaagcttggggcctcgttactctcatcgatctctccatctgaatcctgtccatatccaggttaagatcacgtccacaggcacagcacactagcacaggcggcgactgcatgcgatgcttttcgggctttttgactataccttcttgatcgatcactcctctgcttactttcatggcttttcatgtcatgctcctgcatactcatcgatcgacctctcgtagcatgtaatccttccgtctctaaatacaataaattttagtggagtgtgacacatcttaataaaacagagggagtactacgaagcgtagctatgctgccgtacgtgaaggaggggagagcgcgcatgcaagctagcccaagaagtgaaggggtgagaggcatgtacttggaatatctactcaaaaatatttaatatttaagataagatggtgttatacttttaaaatttcctatcatcaataactcatcaaatgcttattttaaaatcaaaagatgtggtacacatatatttcatttttgcctcgaaaagtactattgtaataacataaacttgttactccacccgtcccatgggattatgctatttcttcatacaaattgagacaccaaaaggacaagtaaagaaaatgattgtgggaaaatagactagtacgtataatagtataaaagttataggtgaaaaaacaatttctagcgatgaatatggacatagcctatatccaaatttctagtcataaattattttttattttttgatcgatggtgtagtacaaaagttggtaggtaattgctgaaatacctttgtcataaaataatttactttgtttatgtgataaacaagatttgtgcgatgcttttcttatatccatgccacaactagtgaatggacatgttaattatatagttgagccatcatgtgttgagtttaagcatgttattcacattgctagcgagaataaagagtttaaattactatcttttttaaatacttggggctatattcaattcgatgatctttgtccactcaactgtttagagaataaattatttgctagatctgaattgccatgtccttctgatatgattttgcatgttattggcaatttataatagtaaagcagaatataatgtgcatcgagtatatatttgttcgaatttaactatacctccttttcacgatgaatgtattgtctagagaaccacatgcgtataaataattctctatctagtttctctacttgtttaaatgagctatatgttggtttgcaagaaggggggtgctgtggttttccaagtggcaaaatttcagaatccaaccatatagcaatcaagaaatgttccttacctgatgttgtgatagataaagataagttcagtaggctcaataacaaggtgaaaccgaggacggtttccaaacaagaagatgagtatgataaggacacaactagatcagatatgaccatgactaccatatgtattcatcaaccaaaagtgcatatgttctatattagatttacttgttatatatttgaacaaatattgctacacaatgagtttagtgtgttttcttttgcagaggtacttgcataggcaaaagaaatgagaccgagcataagaaatgcatggataaatcaaataagttgattggggaccaaatcaataccttctccaagtccattcaaacctcaccacgtcacttttggtccatagatgataagagataaagttctacacgttttggattcggatttgggcctcttgacagcattaacttcaaacggagctaaccgctgatctagaaagaatctcggggatcatgagtacttgttggaaagcctatggagtctactttcagatggttttggtcccacgtcaaaattcgcaccaagctgtcgggaatcagcaaaacaagccacgtacctcatccactccgaatctgatttgggtcttgggcctcataacgatgtcgtgggttaagcccaagggggtgtgcgccatagggcaatcttaggacgtcccaaatcatatttttttaatagtcgtcatagtttagagtcaggttttgcttagattatttctgccatcacagttttgccgctagtttggtttgtgaaaccctaaattcgagtgcttaatcattcatatgcaattgtgttgcaatctatgttgttcttacttgtgttctttgattcgcatgcagagattagccttctcggcgaggtcaacctagcagtgcacggttgataaccaaagaaaacgtggtgctatgattgcaggatttgaatcatgttgatcagaagccggatcatgtttattaagttttcacaaaatcgagagttatcaatatctatcagaagatcgagacctactatcctcatcgatcgtattgtatagcacacgtacaaattgacccttagtaataattaagtgaaaaaagtgcggtaaaattgttaagttaatatatatagtaccgctaataataatatagtacaaattgaccctagtaataattattatgtaaacaaagtgatgttaaacttgtaatatactagtaccactagcttgagcccacaatagctagtgctagtctcatgcatggctgcagttgcctgtacattccacgcatacatatggacacatgcaatggattgttattatttgtacctgtacgagaacgtacgtaatacaagtgtgtacaaccatacacatacacaatggcaggttatgtgtggaattaattaagttagctttattgggcagagaaacaggcaaacagcagtgtggaccatcagaagaaatatcagccacaaaactaactaattaactgccggtaactaaccgaaaagctactagtctgaataaaagtgagagcagcctcctgtctagcacgcttcatcagtacgcgccactcaactccatgaaaaagatcacaaagttatacttactctccccttttagtaacgtgggtcaatgttttacaaggttagtctaaaaaagacgtttagaatgaagtgttacaatggtctattttgatataataagctactccctccattccataatataagacacaaccatttttttatatttcataatattataagacatgcatgcatgtaggcaattaactatgacctcttcttcattaaattattactttttaaaatcctccactctcatgttctctaactctattggatacatgcattgtatttattagaataatcgatctaaactacatgatgataataattattttcttggttattgggtaaggggtggttatgccttatattttggaatggagggagtagctcctgctgatttcaaatatagataattacttcaaactcgctataattggcattcgatcggtggttaaataatactttttttaaggagtactccctctgtttcacaatgtaagtcattctagcatttcccacattcatattgatgttaatctatctagattcattaatatctatatgaatgtggaaaatgctaaaatgacttacattatgaaaaggaggaagtaattttcatccgcagctttgctaatttatcaatcgcctgattctttttttaatcgtccgtcacctatactttcccaaggtgtcaagcaaagctgcacaagttgtacactaaatttgatatagaaaagtgtaactttaaaatagatgaattgcaacttctattttttctttttttattaattgatgaatgaatctagacacatttttatatatgcttatataatcatagaaaatttcctctattagcaagaataaatcagcaagtgcaatttttttgtaagtttaggttagaatattttttgtgtcaaaaagaagaaaaaaataatatatgaaatatttggatatatattgatctaggccatgttcgacagcctgttacaatcctactacaatgcaacgctttatggctagtccattcgcagtagcaagtaagcggcagcgggtctatcaagcagcgttgtactagtaacacatagccaagcactaccttactgttgattattgacaaggtgattgataatattcgctccatttcaaaatgcaggatatacactataaaaaacgattttgtcatagcattaccctttttattttttttcaagcggattaaaaatagtgccaccagtaaacatcacgtttatttttactagcggatgaccttaagtgtccgccagagaaaatcgattttcactggccgatgcttaagacgttcgttagtgaaaatcaattttagaaaaacatatatttgtacctaaatttttcatataaagtcagatgaaaataaaatttgtaccaaacttgttaattaatctcaatttgatctacaactttttagttcaaaacttttccatttgagatcacgtagggttcaaaatattcgttatacgattcaagatctattttacaaaatttcagatatatgaatcacataacctcctatggacatatgatctgagtcaaagttgtagatacaaagtagttcatgactttttttttaattcgaaatcatttagagaggaaaaaacgaattttaagtttcgaacaatgaaaatcaaaacaatagcattctgactatggataataagtacttcatagtaagatggtaatgtaatacatgtgtggagagagaggtctttgcgtttgaatcctatacaaatcacaaagttgtgaatttaatctaaaaatttgcctaaattgtcaattaggatgcatagttgtgttacagatgcccggtaaaaaaatcaaaatatttttgttattttatttctgattttcgttggtagctgcattatgtcgccgccagcaaaaattgatattcgctggcaatcggatgccgccagcgaagatagttgattttcacttacctttagttgctgacgaaatgtctggctgctaggaaaaatatgttttagccatcaaggaaaaatgtatttttacagcgatattttgtttcgttaggataacactttcatgaaggattactctattataatataagttttgaaaatcaaatttgatgttattatattcatcttcaaaagtaatttaatatgattatacttttgtactccctccattccaaaatataaggcacaaccaccattaactcaatgaccaagaaataattattatcacctttttgtttgaatcatcccaactaatacaatacatgcacccaatagaattaaacatattgatttaaaaaaataataatttaggagagagaatgtgctattaattgtcatgcatgcacgcacgcattatattatgaaacatctttaaaaaaaagtagttatgccatatattttggaatggagggagtacaacataagcaattgttgatcaaacctttatcctatcaaaaacaaattccgcaatatattttgaaatagacggaatacctccgttccaaaatatctataattctaggagtcgaagcacaaattaggagaaaggtaaaataacgtatatgtccctcattataagatgggtggatgaaagtgagatgggtaagatgtgaaaagaattgaataagaggtgaccaatgacacaactactactctagaattacactcctatggagggagtacttattttgggacgagtttaaatcctaaatttgtaattattttgggaccaattgaaacctaattcttttattacttaaaaatcagtcaactgaacaactctttgatttggctggggtttcagaattgaactttcacactgttaaccttgtggtgtggtggtgggccgggagcgtcgtgtgcatgggcaagatatgatcgatcaaaaaagggtttagcaaaggcgaaggtaattaagcacctggagagaataatgctccccgttaagagcaagttagccaactgttggcttcaaatcatctataaccaatttaatagctcattcatataatagttacctataaaaatatattacatcattaatacccgatcctacctctcatacactcgtaacgtattagagtccgtgttgcagccagctacaaatctgtagcccgctttcttctctctcttctcttttcttctcgatatatggttatagctggtttatagactgctattatacctgctctaagccaacctttggcgtaacagtagatggctaaaagaggcatgcacgaggatgttaggacgcgtttgtctgttggtcgcccgctgccgtcgtcgtgcatgcaaagttgcgaacgccgcgcgaaagcgaaagaaaagggcgcatccttgcatctactctctctctctatctttatagtttatctctcagttcactcatatagtaattaactcttcgttataaatatatggtccacctgactgtctcatagatttttttggttactgtgtctaagtcggttgtaaacttatagtccgcttctcatcgctctcctctcctctctcatctatctcagtattcagccttcttagagcaagtttaatagtatagcccactgctacctctaaatcatctatagctaatgtaataaccaatttatacaatagttacttactatactattcacatctggtctcacctgttatacacatattacgtcttggaattcgtgctttagctggctacagacttgtagaccgctatttttctctctcttcctttatctttttaaaatatgtttatagttggtttatagtctgatgttgtacctgctcgaatggatggttggatggatgcagctagtctagtgcgatgcccaagaaattaaagaagctagcatggcgatggccatgcatgctgcgctcatttacgtttggggagagggcggccgggagaccggctagcagatggggacgacgaacgcacgcaacgcggtgatcgatgatggtggcgagcatgcggcttcccgaggctgacgctatgccgccgcccggccggcctcacgctgacctataccttctcttcagtctcaggccaatagcgcccatcaccctcctcctcttgctcgtcccgtacgtacgcataccagggatttacttcctatgtggctccgtcttcatttttaaatctcttttaattattttagtttatttttaaagtaatcattacattataaaaataataaatagttgtattcagaaaagataaagtgagaaatagttgtattgggatttagtctttttctattactatattggtaatttggtatgtatgagatggactcaaataatctaaattctcatcccagattaatttcgtgaacatatagttataaaataaaaaaaatggattactgctaactctattaaaaaatataagtatttttgctttttttttgaaaaaaatatatatttgggcatccttcctaaatacaatcaaggttgtaggggttcagacggaagtctcacccggtggatcactaggccagcaccggctatgtcttaaggcgtcgtaaccccttgaggcactgtcgagggtacatctctttctttctcgacgattttctctaggtgaaaaccgcatgtttcttaaatgggcgatgtcgacatccatgatgtcatgacctatatgatggcaccattttcggagtctcatttttgtgatgttgtcataggctcggcatgatttgccacgctttgcgggggacgttttgatgttataggctcctctctctcagtggtttgtgctagcttgtgtggttagcgtgtggttcttggacatattctttggtgcacatataacctcgatagcttttgtcgtgtttttcttgtaacttttcttcttcttaatacatgtcgttgaccttatttggtcttatcagcaaaaagaaaatatgtttttggaaatccttccgttcaaatacattttgagaaacacacataaatattgtttatattttcaaacggagggagtagaaatcagaaacccatgttctcaccaactgcctcttaagaggtcttgatgcacaaatcttgtgattgtagatataagtaatttagatttttgtattttctttctgtaaagaaatgtcattctagtcgatcgctctagctaggcagagttggatcttacaacactaagtgcatgtgcaatcgtttgattctcactctttaaatatcaaataattataaaaaacactaaaagaattcacaatgttgatataataaacatataccattacgcaaaatctcatggccaaaatggcaaaatcaatctatacaacaaaaagaaaatcgtaagttttttaaaacctttgataggataaatcaattattagtcatgtatgtatataacggtattttcggtgtttttagaatgacctagcccgatgatatattgtagaacaaatgataaagtcgtcggtatattataaaataaataatattaatgataaattgttgaactgagacgaaatcaatggtatttgagtagattttctcttacaagtaatattaaaaagatttgtgatgtatactagctggctagatacgtatatatacagtgtgccacactagttttgatttttattatcttagatcaaaattattatcagttgctaagtgcttagtactactccactagctactgcctaagatgtgaaaggggaaaaaaagggcaaaggctgcgtacaatgtgttcccacatgttctttgcggtacccacaccttcttcaagcacaatgaaaattgtctttctcctctaccgatgcctttgtccctgttggcatcatatccatgtactagtagggtctaactaaatctatgatcaagatatttggattaagaaataaacctaataagatcgtggaacaaatggagtaatattctagccgttttagaagcttaggtttggatagggattatcttggtcggtttactgtgttgattacgtgtaccatttcttcagttctgattcctacatactatttcctccatcccaaaatataaatcttggtcggtttactgtgttgattacgtgtatcatttctttagttctgattcctacatactatttcctccatcctaaaatataaaagattttggacagatgagacactttctagaatgagtactatgaatctggataagtaagtgtctcattcgtctaaaatctcttatattttaagacggagggagtaatagacacgtacctacgtactcacctttttttttttgccaattcttgcattaaaattttgcaaaaggaaattatactctagagtactttttccccctccaaccacactcaaccaatttttctttcatcttatcccagaccgccgatgaatccctaataatttatcaattaaattccacaattgctttttttggagggagtaaaatatttaaaatcatttagatgacttaataacttgtaccatcttaattaaattaaatttttccaaaaataaatatcatattactatttctgacttttattattctagtactaatatagtgtgtttataacatagaacctcattgctaacagcatgtgtaacatactttgggaacaatcttaaactgatccatctgttctaatgaatatatataatatatatacttacccgcgagtgagaagtgacttagctaggagtaatattttctagagctggggatgagcgtgttgagtattctctcaatcctaaaataaatatagctgtgtaattcactcactgtctcatcaaaaccaacccagtatggaaagtgatatatcttattataacaaatctgatatacttcctccgtttcacaatgtaagttattctaacatttcccacattcatattaatgttaatgaatctagacatatatatttatttagattcattaacatcaatatgaatgtgggaaatgttagaatgacttacatcgtgaaacggagggagtactatctagcatacagctctagatcttttttaaaacggaagtaggattttgaaacagagaaagcagtaggagtacgtaattagttgcgctgtggaacagaaggtgcagtgcccaagggctgtgccctgcaatctctcgatcgatctacctgatcaacgatcatgggagcattatggggcaacagcgtctgggaattcaggaggagaccaaaaccgcatcgaaacggctccgatcgaaatgacaacgacagtgtgggggcccgcatgtcctttccctgtccatgacatcatgcatgagcgctttggactggggcccaccaccctctcccttcgacctccacaccggcgattgagatgagcgagagccgagagactgcttgctgaataaaaagtccatcgacaccatctaaaggtgcaggataagaaagcaaaggccatgcaaactccgctggacatgcaaacaaagaccaatatagatagttggtcatgcttcttgtgatacctatctgaattcgggtctttgactcaatatagatagttctcaaaaagaaaagaatcaatgtagataatcacactcatggctaataagttttagttatagataatataactatccacaatgagacgtctatcacgattttgttatttttaatttttaaacatatggatttagtctcctaaaaatatttataagatatgatgtatctgtgttcatatagatgagtctacttatgtgcacatgtatttgcgtttgtgatgtgttttggaaaacaaaaacatgacagattttgctttaacctacatataagttattaatagtagtttttttttattacgtgtgagtgcacacgcgaaaaccacactcacgcctacacacccgtacaccatggtcagtagtgtggtgcagcattgttgctaactaaagaattctgctaactattgcatccgttctattttaagtatagttgtgagtttacgtatccaatggttgaccgtccatcttattaggaaattttatgaaaaaaataaataaaataatcatacaaagtattattcatgttttatcatctaataataaaatactaatcatatttttttcaaataagacgaaataccaaacgttaagtataaacggtacaaactacagtcctttctagtacagaagtagggcaaaactatatgactattgacgttgccaaatggtaacctagtatcataaaacagtataaatttcttaaaacagtatcttaaaatatccttttaatttgtaatagttaatttattagtttgtactctcaaaatattatccccaaattggataatggttaaggtttagggttaatggctaaggttttaaaagaatcttatcctaactataaaatatttatggtagaagggaatagattttggatgcaattctgtcaagatgctaatcatagcctcaagctatatttcttacgggagggagggaaccaagtagcagcttgcagtttagcggttcaattatttacatgggcttttatctagctccggcagacagttgcactggaagtggacttctggaagagaatggaaaccgaaaaaaactggtataattcaaggtcatttctggactttggaccatacatggcagattggcagatgactcttaaagataagctaccgtggacaaggacgtggcctgcttgtaagttgtaactggtgagatcaaaatatgcttacctttttccgcatggatttcttgccttacatgtttgtgctgccaactgcgaacatacgaacgcatgagatctaaagatggagcatgctgtgaagcaagcaaagttaacccctacaactgatcattgcacatgacttcgagtaatctttagatttctaagataagctatttaacatccaaaatgacagtatattaaagcatgcaagctttggagaaaaagaggtacgataaaaatacagctacaacactatctagattctagcgcttcttgctagaaaatgcagtatgggcgcatacactgtttatgtgcatatcaaacaaatcataaacttagcaaaatttgagccttcgggcaggtgggctgaccgtactagtatccatgaaagataatcatgatttcaacttcttcctcgacacattatcaaggaaggcccaatcaggatatgggcattcgtagctccaatcaggaccagtatatcgcacacagtgcagccacaatgcctcctcatctgcatcataactgcccaaagaacaaaatattacgaaggcctgaagaattcctaactacaaacttgataactgtaagcactcaccctactggagcaagatttgggcaattcgtacacatcggatcgatgctgaactcctcatcggcttctgtatcttcgtttgtatcattgttcccaaggtcagcacaactgtcaggatctgaagatggcaatgaacaagctagcgtggttgctctgttgattcttgttccctttgacgaacgtggagaaaaattctcggaaaggtacacctcgtcattggctattgggtaaccaatgtgttttagatgtacccttatctacatttgtcaaacaaaaagctgtatcagaaatatagataagtaactgaaaaaacaaaaccataggacaagagggcatactattggcacaaagaatcagcagaaaaattatgaccacatctatctcatcttgcatcagagacatgctatggtgaacagatgtctgataatttgattattttggaagtaacggattgggcatgaagcatgttatcaaaacagggacaagggagctatgagtaaataaagaggcactcaacagtttgcgtgtcacctgtgtgcacctaaaatgcattttgccaagctctagcaggattaagatttccattatgattcagatagtgcagtaagtttaaaggccacttgaactttttctatgtagtaggcttttagattcatttttttttgggaaatttccaggtcgtttcgattgtttgaagtttgaacgagcaaatcaatgttgatgtgtataaggtagtgtgacctgatgagtccggccagtcacaggtttgcacaggacaatgctgtggattccatcagtacagatcctctgaaacttggtgcaggcttgttttccaattggagctttaccatcaccatcacaaacctgcatttcatttcagtaattgaactcagatatgttcttcaaaccagaattatatcctactgagtacacttgctctaccgaatttctgaaaatagttcatgcataaatgaatgcattgttcaatctacttgtacaagaagaactctataggacccatatcaactatttcttttgcttattataatcaattatctcttatttctttggtacagatagccatatgcactgttaccattaaagagcacacaccacattacactgtacaatcctacaattgctcagcaccagtatatcacatgcgggataaacctataattgctcaggcaaatacattgcatgagaagagaggtgcgaggcagtcaataattgccgaaagagatggcaatatcttcagtatatgcagtttcacacacaacaaaacataccaaccacaagcaggattactaattacatacctctgcagtgctccttccttcccgtgcgttgaagtgcacatttgcattaacagtttgctgaaaaagaattatttcagacagatatttgtgggaaatcagcagttatgtatgaaattatgaaatcaaatactaaatgaaatgcttttagttcacaagaaaattccacggagtcgtttcctaggtggtagatccaagccttcattctcacaacatgggaaaaataacaaaaccctacgggtgacttcagtataagaaatggtctacaagccttcgcagagtatattcaagttattttacattggcaaaatcttccgctcttggatccagcaaatttattgacatgttgagctgttgacaccaaataagtgacgtacctcaccatcaggaaacaccccaacaaccttggccacatattctttctgcagcaaactagcttcgatctgcagttatagtattcaattaagaaataagtgtgaaaagataaaagtgttaaagtaacatacataagttgagtgcagacagcagacacaaggaataaacaggacaatagaaaggtgaattcaaattgacaatgtcacctgttgcctgaaactttcagctttgtcagcatttttagcaaaaattaaggagacctgaaactaaccgatctagccgatgcacggctgtcaaaataataatggtggttaaggaatttgagtacaaatataaataaaggtcaaagttcaatcatacagggaagagaataaacaggatagtgaaaggcactagcaataatggcacaattgaggcaaaggatacgaaataggggcaccaatccatgttcagcttgcagaataccgacaacagtattcttgcggtattgaccacacggatgaacctacagaaagaaaacacctccattttttgtagttaacaataaacgactacagtcaaatatagctgaaccagatcaagttataactaaaccttacaaacaatggaattaacacttgcatttccaaagctactgaaatctcaaaggtgttgttgatcttaataggccagaaacatcattcaaccaaactgttcagattaactgctaccagaataagatctcacacttaacaacaaatttatgaattcaagaaggaaaaccttaggtactaatttcatctggtagagaatgttttaataacttcaaaatcacataatcctatagtagctatgcgtgtaccttgacagtttccattctacagatgtttcgcacagctcaaacaatccgtatcacatattaacatataactttcagggcacatgttggctatgaacctataactttagacttgatagttgaatagtcgatacaaccttacacttacaaagttcaggtaacatattttgactaatggatctaagtgaccaaaaaaattccggaagacttaatattaaggataaattaaagtgaaaacagttatattataaaaaggatggcccatgcatgtatatcttttttatacatcacatagtatttgaaggtttctgaacaaaatgatatgaactcactggaacagatgcaggtttgcaaactgtaacaacatcagcttcattttgaaggattgtaatatcaccacccaaaactggaggttcatgcctgtcagagtgacaaccatgaagaatttgacaattaattgtaattgaaagtatgtttctttctttttttacaaagaataaagagcttcagtagttagagagctaacgaaaccatgcaagcagaacgtctacacctagcatgggaaaataaaaactatagacaacattagagctgactcaggaaccaatcaagctattgtttctgtgcattttacagttcccatcaccattaaattaaaacccgatctattactattaacttagaagccaaagtatcagtaataactgcaaaaactgatgaagtaagtggagaaattatataagagatggttgtaattggttgagatgagggagtaggtggaaaggtagccatattttgggatgaagggagtaatatttttgtcaaatgaccatctcaatgtacctttgaaactgatgaagttgactcacctgtgcaagaaatggcttatcttttgtgatgattgcacaacatagtctgcgtgaaccatttggtcatccacctgaagcctcccacacttcactgcatgaacctagaattttgttttttttttaaatcaattctagatacatcagaattttgttttttttaaatcaattctagatacatcattgtagataatgccaaagaaccaagagagcttatctagttccaaacgtgcaagggttgaatcataagattaatttgcaattctaaatggcggaatacataaaacaggacgaaccacattcagaacccaagttttgtgtgtgtatttctacagttaggacccgatgactccatatgcaaaggtaaatcataataaagaaaaaggaacttataggacacatggtaatattcaaaagagatactggtggcatacataatattcacgaggccggcccttgaactcatcggtgaagaggtcaacaatggtcttcccagcccatctgtttttcacctgcaaaccaaatgaaaaaataaactactccctccgatcttgaaaacatgtcgtcttggaacattaatatctttttgcatatttaggttggatgcatgagaagcatatctatagaattgtttcaaaaaactactttcataaaattaaaatatcttcaggctacataaaccaatggtcaaaggtgtattttaaagaccatctccatgtccaaaatgacatgtttccaagactagagggtatggatttggttgaagtaaaactcgacaggatcgcttggagataatagaaacataacccaaattgccccataatgcagagtgacagcttttgtatattgcgcagtggtgtagaggaaagggagaacttggaggtgccaataagttacagcttgcaattaagtagtaatatatttgatggagcagataaaagattaagaaaaaatgttaggccaaaacccagtaacatctgattctatagattttcagtgcacaatatatttattctcgaaacaacaattttcagtagacattataactaataacaagcaggaatcacctgatccaagcaactaaaaaaacctatgttcccaacataaatatgtaataaaatgcaggcaaaaccgaggaggttggttacatgggagatgaactcgaagtagtagggcctcacgtagcgccgccctgcgaagcaaaatggggggggaataaccaaccgcgtcagtccggggcctccggggagggggtttggcgggcagaaagaaagatgcgcgcgttggggacgagacggaggccgggctgcgggttgctactaccgtcgcggaagatgtagtcctgccgctccggcgggttcgccggcgtctgccacacgatccccgccggccccgccgccatatatatatatcccgggcgagacacccctcgatcgggcttgtggcggcggaggagggggcggcggggcggctgctcagctcggcggttcagcgcccgaggagaggaaggaggatgggcggcggcggcggcggcggtgggcgaggagaggacggagtggttcggcggcgcgactggctcggcagtggaggattttagtgagggtgtgcttccgagggcgtatgaccgtaggatccacatctaacgttcgtgggctcctggcattgtcgtgctcgaatcgtttcggcccatttgcagcgttactcacctgcttatccgtatcacttatattggtaaatagtaaatcatttgtgagtgtaaataatgtaaaataaactatgatgaaaaataaatttaaaattaaattctaaaatttaaattttagctttataagtataagcataagtggcccttgaagtatttaaagaatttaagttcactgtaagagcatgcatagtgatttagacggtacccatctatataatcttatcattttcctggcaatatgtccgtatattacaacggacttgtacctatcttcgaagcttttactgtttttcccaaagaagagcgtgctacactcaagggagagagaacggatggacaactctcctttttaaatagtagagatgtgtagacggcacatagacaactttaaattaggttgtctatttagttagctatattagattgtacaatttcgctatgtaattttataccagctaattgaattggatttgttatacaactcctagtttatatttcaatatatgtaattatattgtatgtataatagatactaaaagtagggttgaatttaatatacaactctaactcttttcttcttcctcttatgtacagttgtatttcgtatataaattttgatatcaatctacactataatttagttccataacaatctaatggcttatattttttttagtaatgtaataatttttagcccttaaaaaacaaacatagtatcatctttatgattcaatacatctatactttttataaagttatagtccactaagtctaaagctcagcatgcaaccatgccacatcatcacccgctagcaataattacatatttaatctcatgcaagcataaaacatcatctacaatttatttaatgtacaaatcaacatgcaagcatgtccaatcatcacccctcgcatcatttgcacaatattttaacaactctatctattattcttataatatttaacatatacttatcaatatgtttcacattaaagcgcgggtatcatttgattggttcatgataaatagtgataaaccctgatgttcattattttttttctttttactcctagcttgattgtaaaaaaatatatattgagaattggttagtgcagggaatcacctagtttaataatatgacattatttaaaatgaactccatagaggacgccagatccagtaactcgaggaatgctcgatgacgccttgcttctgaattccaatccccctccctcttgctcgaacggcggcgagtggccagccagcctaaacacgtcaagatcctctgtagtattgcatgtgcactactacggaggtcccccaaactactcaatgtggtgatgaggctaccactattctctttttctttcttgtcttttagaaacaccctacaagtgtaatgcttgcaacatgcacacttgcccttataaacacacacatataccctacatctatgagcaccttcaaaagaccagaccgacatatcttaaaattaatgaagtcactacgagcgccatactatccacacatgtatgttgtctaccactgaaatactgtaataattagccgtaaatactagcatacatgccaagtctatgacttagcttgggtgggcaaattctaccacaaagaacctagcggctagttgcgctcacttcgattttttttttgtttttttgttactaggtcagatgcaacaaaatgattttataaagtgatatattagagctaaaggttagttccaattagtacataagttttattataatagaatattttgaaactacacagtatttctatatatgagatataaatgcaagcctcgccattgaaaaacgatcaaacaaacaaaatcccatctgtacagatgtttatatcaggccaccaaacaacattctgcattatccaagcttaactaaggctgagttcgtttggatgtttggaggtggcaaccttgtggcaggtaaacaagacaagtcattagtgtgtgtgtatatgattaattaagcattaattattataatataaaaaaatatgtttatttaatttttaagaagcaatttaggaaacatactaactgctatggctaagttcttatccctatttttctaactcacctccttctttttctgcgcatacgctttttaaactgctaaatgaggtgtgttttaaaattttctacatggaagatactttaaacaatcatattaatctattttttaaatttatttttattaatacttacttaattatgtgctaaaccctgcttcgttttacgtgctagggagtgagggttagtctacatgactaaacaggccctacatctcgtagcctaaatcgcttgtcaagcctttccttcaattgtggccgctaagcaaggcccgtgtacaccgcagaggcccagacctgcctaaataggcgggctctcctcgcctgcataattagctagcatcgatccacgcctctttgggctctctcgccgtgctgatacgatcgaccgacgacgcctcttgttgccacccacaagagccccggcccctggtagaggaccgaatcccggtgcgaagaatcgattgatgagatgcatggtcgacctagtagttctagtttgttctagctagggccctggaatctggatagctctgtgtctagggcctgtttgtttagttcacgaaatgataatttttaggtgtcacatcaaacgtttgatcggatgtcggaaggggtttttggacacgaatgaaaaaactaatttcataactcgcttgaaaaccacgaaatgaatcttttgagactaattaatccgtcattagcacatgtaggttactgtagcacttatggctaatcatagactaattaggctcaaaagattcgtctcgtgatttcttccctaactgtgcaattaattttttcttttaatctacatttaatgttttatgcatgtgtccaaatattcgatgtgatgtttttggggaaaaaattttaggaactaaagggggcctagtttgtagcagctacgttgtactacctctgttctaaaataagcgcactcgtgaatatccatatccaatgtttgaccgtccgttttatttgaaaaattataaaaattagtcacacataaaatactatttatgttttatcatctaataacaacaaaaaaatactaatcatatttttttttaaataagacggatggtcaaatgttacacataaacagcgtaaaactacacttcttttaggacggtgggagtacttggtactatttcatatgcttcggttctattgttgtggtgtcgcggatcgacagccctaacacgttggccaagacgtatagtacgtcccatttaatatttgtagttcttttatttcttttgatatatagtactttcttcactataaaaatgatttttagagatacccttttaatttctacagaccggctaaaataatatttatatgcaaaatgattttaggtgtctaataaagacccgtctacaaaatttgatttttatatgcgggcgtattaagtggtctacctacgaaaatagggttatttttacagacatatctcttaaaaaatctatatgcaaaaatatagcaccgaccagtcacacatcatctctctaaccttgtggagctacccggaagatcgctggacgtttctcaattactctcctacctctctgcgtcttctcacttctctctaagtcctttctactctcactctctctcttctccctcatctccactactctccttcgagcggcatggacaagaggcggtggtggaggcgacaacggcgagcttctaccgacgactgcttcgggtggtggagacggaggccccctacggcttcaggcgatggtaatagcagaatcaattaatggtagtgtccacatattgaagtggcggatctggcttcaaggagctccacgatggaggatccgtcgctaggaaacttggtgatgacgggtgcaacattgggagctctgtggtggcgggtacaacattgagagctcggcaacggcgggtgcagccgctcaggagatcgaagatgacaaatccgacactcgggagctcagcggtggctgatccaacaacgctggcctcgggagaagcaaatctgccaccagcctccaaagctggagggccttagcgacagcgatgacgatggtggatccgagctcggcgacaacagatccgacggcgccggtctcgataggggtagatttgcgaacgacgaccttgggagctgtggggcctcagcaccaatgacaatggcagcggactacgacagtggcaatgacggactgcagtgacgaggatgatggcagtggcggttgatcagagctagctagggttttaattttgggggttttttttgaattttttcgcagacagttggtttaactgatcacttgtgaaaatcaattttcgagcatactcattttcataagcaactaagcaagtgtgctgcccgattagaaaaatgcatactcatttttactacactatgggaaacgagtcacctaaggttggatatcgagctagctcggctcagggtagctcgttaggataacgagctgctcggctcgactcgctatcttaacgaggtaaaaacccagcttggctcggctcgttgattagctcgagctcgctcgtttacctcgtgagcttgtgactaaaaaacatatatacatgcaaattagtgaatcaataagagtataatacgagtataagacagtcaatcaacaagaaacaactgccaagttccatccattcatacattacttcaagtttcagcacaaatcagtaccacttccacaagcacaagtgctccaacctttggttagttcagaagttcagaaatatgcagtacaaacgatggacataccatcagtaaatcatcaaaaatacacatcagcaggggcaatgcttagctaaacacttgccaagtgcaaaaacacacgccattcttaagtaattaatcaggaaacaacaaaaattaacaagtttgatggctgaaaacaaaagatctgtctcacacttacacatgcaaaagcaatcaagcacaaaatagtccaacaagaagcaatcaagcatgaaaaaccagaaagattagtggcaactaatcagccatggcacaacgtgcaatagctgtagcagcgggccgccgcgtggagtagtcgaccagaagaggatgggagcgcaagatctgcttggagacaacaacagcggcgtgtcgaggtctcgcggaagctcggcatgcatgtggcggcgcagcttggaggctcgtggatgtcgcgcggaggaccgtggaaggcgcagccggcggctggctgcctcgccgtcgccgccccctggccgattggatctaggatgagaaaggggatcaggagagtgaaagactgagctaggttttcttctcttcttatatatgaacggttaattgggccgcctaagtgggctgtatttcggccatgggctgagggggatacatgtgaggaaatatgtctgcaaacttgctctagctcgttaagctcacgagcagttcgcgagccagctcgagctggcttgttatctctaacaagctgaaatgacagctcggctcgttaggaaaatcaaacgagccgagccgaaccgagcttgttacgagccgagcgagctaacgagccacgagctttatgtccatccctatagtcacctagccgtttgcggaaatggattttagctgtttacaaaaatcatttctgttgcagtgcttttagcttgtcatttacatcatagtctaataggaacatgt

SEQ ID NO: 7029 - DNA, 7888 bp, Oryza sativa
ccactaccccctaacaaaccattagagcccccataatacctaatcctaagaaggggctgagatagactttgtctgagatttttagaaggccctaaaggcttagaagtcccataatatccccaacaatcccacccaaccctaatctccttcctcctaccgaagagaggcggagactcacggagtggcggcggcatacaagcgcgagtgcgcgtgcgacggccgacggcttccagttccagccttccaggcgaagttgcggcgaccggcgacactgcagcagttagggcacgcggcgcgccggccgctggccgctggggcctgggggccccgagcggcaacaagggggtgggtcgacgaggggacgcggcggcgcggcgcggcaacaagcagggaagggggcaagggggcaaagggcagctgccggcagcagcaaggggcaaggcaggaactcagcaattgaggatttgaggaagtgaggtatataaaatttctaatttgtcatttaaaatcaatttcaattgtcaagtctagttgttattaatagttcaagttttcaagaaatcagagatattgaattgaaaattttgtttgtgattcctagtttgctacttgttatattgctagattgtgaagatgtcaaaaagaactgatgaggacatcccttccaacgatacatccatgcctaagcacagcaaggaccaatgactagagctcgagcttgtgaacgtaattatcaggtaaagtcattcctagctactcatataagttcttctcagaattgggtgctactaagtggttgttatgatctacttgttgttaggaatatgggagaagatctagatcacaaacaacactagcagcgctgatttgatgaagtcaatgctcttcacttcgatggccaattggggcaaatgagtacttgttggaaagatcttgtcgtctactttcagctatgtgtggtctcaccatcagattcgacccaagctgctcagaatgacgaaaatagttttcacatcagaaacttgggcttgggccttgtatctttacagcccattaggggtccacaaaaactagggtttgctcccacctcctctcctagtcattcctccacctatataaacccctagcagccaccattttgtattttgagttttgtttagatgtaagtttagcttcagctacgtccttgtactcgcgtgtaccagctagtaaacccgaatacttgtattcagaaccccattttcgtttgtttcaatttcatcatttgacaagcgccgtgagctatttccttgtcaacttgttcttgcttgttcttcgattgcttgtaggttcaaggttgttcttggcacggcaagaacaacaacaacgtggagtcggtgcaccggttgctaaggcgtagcacccccgtggtagttgtagtcggaccaccaacgtcgtgtcctcctccaaatcgaagtttatcctcgtctcatcgaaagatcgagaacccccgttgctgcatcaagtggtatcagagctcaagttgctcggtgagagatttttcaatcctttgtttttacctacagcccataaaaaaacctcaaaataggtcagatccaaaatcaccaaaacaagttgagcctttgttgttctacttagtttttgcttgctgagttttcggttgcatcgattggttgagttactggttctggtagtttagtcctttagagtttcatgttctgttgacaatttcgtcaccacaaacacttccaccatcacctctttcatcttcatcccgctgccaccatcatcaccatattcaccacgaatccaccttcatccgcaccaaattttcgtccaccacaaccaacagcaccctcatcactacatcagccacccccaaatgcatttattgctacctccaccaatagccaacccttttgcaactttgtaaagtgaattagcccttccaaagaaagcatttaagtgccctcacttttgacttgttggctgaaccaagtaactccaaccagcccatcattactccattgtgttgacatgttggctgaatgaaaagagaagaagttgttcctgttcctgctgttttgagtaatttcgaaattcattgggaaaaattttcagctttgaactagtttaaaaaaaggaagaagaaaaaggaaagaaaaaaaatcagaagtgaaaaacaaggagaagaagaaaagaaaaaaatagagaagaagttgttgctgttattttccttgtgttcttttggtgcaattttgagtggctacacttgtgagtaggttcgtctctctaacagggttttacctaggaccaacacaataccatcattgagcgattattcaacttgcttgattaatgtggttctagctgtaccttgacattacttgcagtcacctatagctccacaattttttatctactaccatcacaggatcgtgcttgttgtcggctctggtactactaaccattgttgttgttcttgctagttgccaacgccttttacatagcaaagtaagaacatgtaagaactcgtttgcacaagtttggtagaaatggagatggataacacctagctccaatagttgataggacatatctcttgtgaattgttgcttcctactccctccattccataatataaggcacaaccactttccttagatgttccataatataaggcatgcatgcaagcatgcaattaactatgacatcttctccattaaattattattttttaaatcctccactctcatgttatctaatcctattggatgcatgcattatatttattaggatgattcaaactacaagatgataataattatttttggtctttgggttaagggtggttgtgccttatattttagaatggagggagtattaaccatgacaggaggatcaggggagcatcctcaacattcaccacgtacgaggggcatcatacaacattttgagcaccaagtgagggagcatgctgaaggccttgatgaggatgttagggtcgccaatgatcgccttggtcaattggaggctactcaaattgacaccaactccaagctttcctcattggagacaccccttgtggctgtgaacacttctcttgcaggtatcttgaatacgttgaagagaatgagccaagatggtcatgatggaccggctaggcgcaaccacattggccatgaagctaatagcagcgtcgcagcaagggaagaagtggactacgctgctgacaccgagcttgatgaggaggtacttggtcgtccacaacgacaacagcgccaacagcgccatggaatgggcgctccaccacggcaggaggtacatgataatgacgattctttaggcaagatcaagtttaccattccttgctttgatggaaaatatgaccctgatgcatatcttacttgggagttagccattgatcagaaatttgcttgttatgattttcctgagaataaatgtgttagggctgctactagtaagttcactgattttgcatccatttggtggagtgaatttgttcgttccaatccaaataacactccacaaacctgcgatgcaatgaaaagagtcatgcgagctagatttgttccttcatatcatgcatgtgatttgctgcataaattgcaacaacttagacatggaatcaaatatgtagaagagtattatcaagctttgcaaacaggaatgcttcgttgtggtttggtggaaaatgatgatgctggtatggtgttgacggtcgttagcgatcagtttcgaccgtaaatattaccaaaatagaggagaaatagttatacttgcaatgcatatttatgttagaataataatattccactagtattaggtttactaaccttttgcagagaataaccataaagtggaggagaatcgacatcaaatcagacaataaatcaatcgaacgatgtcgagaatcagacttatgtatgaatgggccaagaactcagaattgacacgatgaattgggcaaaaattcacaagtcttcgcagagaagcaatagaggaggccacctgccgagtttgggttaggtcggtccagcccatggttcggccgaacctcccgtggcaccaatggatgtagggttttgatggatggctgggattggtccccaatgacagttggagggtattactgacctttccaaccgtcataatcgtcattacatgcctataaaaggagctcctcttctcacttcactcacacacctcaagcaaagctctctcatattctctcaagtttagtttagtgttcttaagctagtagagcaggaatagagtagaaatcggagtccggaagccttcgggtatggctctagtagctttcctttcctcttttgtaagctttgtacatttattagaatactcttctttatacatttctggtattgaaatactttccgagtatatgaatgccaactttactttatattcatgttatactgattgtactgctagcttatttgggagatgcataggtacaagtatagtgtttgcttatgcaattgctctatgtcatgacgatgatattagagtagtatctggtagtttaggagtggtgtctagattacgggatatcattatttggggttatatgctgcggatgagaggtggaccgctgatggtgacagctcagtacgtgtattcctccacgcgtgtatatagtcctaagttaatttccaggggagggtactcctctgtatttagccccggttgtatggtcatgacgggctgtcgtaaggaactcggcagtcaggggtggcttcttgaagtactaggaggacatcggatagagggtattagctagttaatcagataactagaatgtatgtatactatgtatactagaagtataggaatagattctctttctattttctttccacttagcttaggtaatttagtatgagaatgagtagttcctggcttgtgtgtcactctaccctttgattatcttaacccctgcttagactatgattattatctctctactatgatcttcctacgggattaaataaatacgatatccttggaatactctcaggtgaaatgctacaatggtatatccatgcgcttgcggatgaactctgtaaccataatataacaggagtatttctgcgccattgcctagtaatgtcgttaagaaataccaacatatggctagattcatgggtgggctaaatcgagaaatttagaacattctagcctacaaagaatataattcaattaaccgtttgtttcatcttgcttgtaaagctgaaagggaagtgcagggacgaagagctagcttcaggactaacatttctgcaggtcgtactagctcttggacaccttccaacgctgttgcaccgtcaactcgagcagcagcaccatcgtcctcaagcaacaagctacgttcctccacgacaaactctacaccatgcctgagtgaaccagcaagaggggttgctgctacaccttccaagagttcatcattagtggcatcatcaggaaggacaagcgatattcagtgcctacactacaagggctttggtcacatgtgcaaggactgcccaagcactcgtgtaatgatcgtgagagctgatggtgggtactcctccgctggtgatttagatgaagaaacctatgctttgcttgcaactaacaatgcaggggaaggtgacacgccccaccaagatgaagaacacattggggccgaagctgcagagcactatgagagcctcgtggtgcagcgagtgctaagtgcacaaatggaaagggctgaagaaaatcaacgccacaccttgtttcaaaccaagtgtgtgatcaacaaacgctcttgccgcgtgatcatagatggaggaagctgcaataatttggctagtgttgaaatggtggagaaacttgcattgagcacacaaccacacccgcagccctactacattcaatggtttaatagcagcggcaaggtaaaggtaacacaattggtaagagtacattttgtcattggttcttatcatgattcaatcaactgtgatgttgtgcctatgcaagcatgttctatgttattaggtaggccatggcagtttgataaagattctttatactttggcaattccaatcagtacttctttgtgcataatggaaaaaagcttgtgttacatcctatgtctcctaaagttattttaaaggatgaacttgctagagctagcaagcaaaaacttcaggagcatactaggagtgagcatcatattgtggctaatgaacttgagaagcataagaagaaatgcaccaactctgttcaaaataataaaaatgagattaagctgaagggatcttgtttcattgcaacaaagtcagatttggacgaagtgatcctgacacttctatttgcaatgcttcggtttgcaaagaaactttattttcactcgaggatacttctatttctttgcctcctccggtcactaaccttttgcaggaatacgccgatgttttcccaaaggaggttccaccggggctgccaccaattcgagggattgagcaccagattgacctcattcctggggcctctttgccaaactgtgtgccatacaggaccaacccaaaggaaacaaaggagatacaacatcaagtgcaagaattactcgacaaggggtatgcgcgtgagtctcttagtccttgtgttgtccccatgcttttagttcatggctcatggcgcatgtgtgtggattgtagagcaattaacaacatcacaatcagatatcgtcatcctatccctaggctaggtgatatgcttgatgaactgggtggttcacttgtgttttctaaaattgatatgcgtagtggttaccaccagattcgcatgaagttaggagatgaatggaaaacaacttttaaaactaaattcggcttatatgagtggttagtcatgccctttggtctcactaatgcgcccagtactttcatgagattaatgaatgaagttttacgtgctttcattggcagatttgtgatggtatattttgatgacattctcatatatagcagatcaatagaggatcatcatgataatttgcgtgttgttttttatgctctacgtgatgcacctttatttggtaaccttgagaagtgcatattttgcacagatcaagtctcttttcttggctatgttgtgactccgcaggaaattgaagtggatcaagccaaggttgaagccatacatagttggctggttccaacaacgatcacacaagtgagaagctttctatgacttgctgggttctaccgccactttgtgaagtattttagcaccattgcagccccactacatgagcttaccaagaggaatgtgatattcacttgggctgcagcacaaaggaatgcattcgagactttgaaagataagttaacatacgcaccattactccaacttcctgatttcaataaaacttttgagcttgaatgtaatgctagtgagattggattgggtggtgtgttgttacaagaaggcaaacctgtagcatatttcagcgagaaattgagtgggcctagtttgaattattctatttatgataaggaattgtttgctctagtacgaattttggaaacatggcagcattatttatggcccaaagaatttgttatacactttgatcatgagtctttgaaacacattcgaagtcaagcaaaacttaaccgtaggcatgctaaatgggttgaatttattgaatcttttccatatgtcatcaaacataagaagggaaaagaaaatttcattgctgatttgttctttcgtgagattgttcgcttgcatggagtgccaaacaccatagtttctgacatttttggaaactatagtgccaaacaccatgcaaaaattagaaactatagg

SEQ ID NO: 7030 - DNA, 26287 bp, Oryza sativa
ttcagatcctcaaaccattagtcttaaaagacttatctcatttcatcactaaaatgagaatagggaacatagagagtaatgcattccatcactatcatataccacaataccatactgttgtgcaacgcaatctatttcatccttcagaaggattatggggataaataagtcgcaacggcacgcacctcctcggcgtgactccatcaagaactaggtcttgatcattgcaactttctctgacgatgtcaacaacaattggggatccacaagatcaaccacaagccttccaaagacatgttgtaacgatcagagtaactagctagtctgaaaatttaagcactgtggggataacacacagccaacaacaccaagtatacctcaataggtattagaggacaccactgttcctaccatcgggtagaatagatatcacgagtgtacacactccagtgataatcgtgagatgcacatgtgcttacagaccccgtctgtttgatctcatcgggttcctcatttcaatcttatcaggtcataaatgggtcatcatccctccaagggattatacaatatggtgtgttcagacttactaattattttgtatctgagaggaaaattcatcaatgaggtctccccctcagagaaaattccgtcaatgtgattttctcccaacgggagatggtactcttaccggaatacccattggtacgagatttgcatgatggaacttcactaccgagtctattcaagacctcacggatttcctaaatccgttagctgcatatttaatttcatgccattttgccaatacctttatttagcggaacattcaacttacgtgggagaggtctcatctaggacctacttgaaccatcgcgcatcaccacctcattatattaataatgacccataaaaatccgaacaacgttcgcgattttcaattggctattcggttcaacctcaattacatttccatttgacccgatttgagcatcgtatgctcatgccatggactttttccggatccgggttctctcagagagaatcattagcaagaggcgacatagtgtcgacacatttattcccacttacacatttaaccagatctttgtcatttcccaaaacgatcgatccatggttgttccgtattcctagcaccatcatatgcgcgcatcgctaggaatgtcgtctccacgacgaccatcattatgaggtatatcaccttccaaaggtgaattctccaccaggagaatcagaggagtatgctcacatcttgtgagaactcttatgctttgactaagacccacggaccgtgttagcaggcgtccccgcagaacatgatcaaatgccataagtcttatgtggatacgatattattcccgggtctatccacatttaccacaatttggagcattactctatttaacaattatccaattgttcctcatatgattttgttggcaaaaactccgtgcaccaagcaaccaggagtatgaactaaacatacaagttcagctcatttagtgtgttcactcaaagaaatctccaggcattccaaaatgggcatttctctccccctaatgccgagatgtgtttcaatagcatactaccaatccccatatcgtggcataggattaaggaatttcacctcgatcacaaatgttctcccacgaatgtatgctacggtggtgatatatttgggaaatatttacgcactttaataggagagatttttcattatatgcagtgagcctggacatataccaatacagtggcatgaatattgtattcttccttcttccgaagggttatcctcaacctcctagttaggatatacaagtctgcaaaaaccaccattgctaccaaatgtatatgcaaccaacatgcaaatactttagccaaatgcactcgccatggattaatgctcacctagtgccattcaaactcacaatcgattctggatcgacgtgcattagacatcgcatgtcatatgcttaagaaggcaacctatggtggcaaaacgcattccgatgcgctcaacaaggagtatgatagcaaagtgcgcggccactagcctgctctgccaagcagatttttgtggtgcagagttgtgttaaagtccagctcgtctaatgcccaagtttgaccccaattactcataccaaactctagaattgggtcatagttaagtagcatgtattaggtacgatccacgagcgaattatcaaaccacatttgctaatgtcccctggacatagccatcgagagataatccatacctccgacaatggtaatattcacaataaaaccattatattcagacatatccacaaaaatagtggaatgtgtcggtgcaaccgtcgttggcataacgagctcaacgcatgcaacacgacgaacctttgcatggccggcacaagtccacacgcgaaaaacgccagtgtgcgacaaacatggtcatcaacccgtgggtgatcaaacaacacaacctgggagtagttatcgactacgagagcgcgataacacgcaatagtgcatagccaacatttgtctgaaatacagttacgtcgaactgtgtgagtggttgtaactcctcggattatacactaattgttcttctaaactaaagcattttatcaattccagcataaagataagctttagaatagaacaggaaagaccaagaactttatttatctgagaaatatcgatctaatgcaaagttccaaactaagcaaatgataaactgcttggcaacagtatagtcgaccaatgtcctcctaggacatgctctaaactagccatacaactcccgttgtcaaaacaactttattagacaaacactagcaacaattggtcaacaaccagaggtggccatttagcgctagatccacccgaggaccgagactgggtcaacacccaagtcaagctgttggcgctatggtgaagtgggaatcatacctattctcagcatctacccttgggtttattcctctagatttgccttctcttttccggtgtcctcgcaagacatcaggttccaaataatattgagaagatatgtgcacaccaagggcaaccatacgaacagtgtcattccaccacatggaaaacactttatatctttcaccgggctaggtgaaaaatatctcaaattattgaacctcgcaactccacgttgccagaaaattgaggtataatcgtttatctccaaatcagaaaagcgtgctctcaaccattgggaaagcaaaaaaatgtcgaccgtagtccgaccatactctgattgagatgttaagccattaggggaaaggcacaatgaatcccaaacacattgtctaattccacacatttcaacgactcagaatcccattcttgagtgtgatcatagggatagagtgatctacattaatgcccaaagccatacaatagtcattgaaggcctttacgtgaaatcacccacactatcatccgaatcgtttcatgcggttctcagagaacgcaacacgcaaacggatgatatgcgcagtgaaatcggcaaaagcatggatctcgtacaacaagtatacgtgactccatcttgtagacacatcgatatcaccatttatgtatggaggagtgtatcagtaaagagtggtcttatccatagccatggatatttaatttcccagaatttccatgcattaggtgattttctattatttacttggtcttatttggcattatattcccaatatttataccacacagaaaaccatcacacataaatgcatgaaaataaacccatcataatgcttccaaggggggattctacactatgtgaacacaatttatagaaacatcataacctagagaaccatctctagattatttagttggaattgcattaattttaaaagcaaagcaatgcttaaaaaacaccattacatggttatttacgagtccggagacccacatgcaaagccgaactatatagggcctaagcaacaagacatagacacacaaacaaaattaatataatctcttattaattacaaggttcaaactataaaattccattaaacagtgaactatagcgtaaaaacccaacactccaggggcttaaacgcaagttaccaataaaccgaaattaatcaggccgaattaccgttcaggccacgatcttatttgggctagcaagcacagtgtagcccaaaatgcctaatgggccgaatttcccaaactctaggcccatgaggatttccaggtttattatttttattaatttgtttgggttgtcttgttactgttgggctttattcggtcgggcggaggcagaccggcccagccggttcgcctaagtgaccgagagagggaaggggagggggggaattagggtttcccctttcccattcattgtccgcaacgacgtccaccgcccggcgcaccggcccctcaggcacggcggcggcattggaggccattgactgtcgactttgaagggatttagggcggtgcacggcgaggaggtcatcgacgacccatccactacaccgattggcaggacggctatgatgacatcactcctgtgtggcaatttggtgcggcggcggctcggtggcacacgacggagctccgcgtcgacccgcgcatcctcatgacggcggcgaggcgaactcaacgacggcaactgtgaccccaacaacggcaaccaaattgcatccggccatatcgtctcggcggaggttaatccggtagcagacagccgacgacccatcatcctcccaccacggctcgacggcagcgtcgatgggaggtcaacggcggcggcgcctcgcttcggcattaactccggcggcaacggcgatatgggtttagggctttttctgagacggcggtttcccgcgacggcattgacgtaaggccgacggcgtacccaacagcgacggcgaacgatggccaacatgtctctaagtccgactacacaggctgagaatatgtcaccgtattcccggtgtggcgtcatcaaaagaaagagagaaacagagatgcaagggaggcgggcgagacggccgattcggcccagccgaattaggtacgtctccagtccagggtttcccatcaattttaatgatttctctcacacggttttctctagttttcatcaaataaaatagatgcatatagatcaaaagcaggaaattaatctaccgctagatcaagagcaggatcaaaaatctactgcaagcaaagcatccataatatgataaaaacgagaaaatataatcaatctataaaaacagcatatcttaatagacacatgcctggatatatgtatctatgaattagtaaattagtttagaaaccaatcttactaattacccaggttcgcatgctcacaaaaatctttcacgtgcatgccgcctcctgctgcgtcgcaggtcgcctcaggaacggcgcggcgtcgatcggtatatcgcacgcatctgtacgtgcatgtgtacgacaacgatgacgacaggtcgtctcgcaagatacgctagctgcttagcacgcacagcacctggtgctcgtctcgcaaggaggcgcgacgatgattcagacctcgtcgaccggcggcatacatgtatgcaagcaaaacaaccatcaaccattaattaattaatttgtaatcagaaatcaatctactgatgtaagtgcatgtgtcgatgcatgcatgcagcatgcgtattggttgatttgccatcaatcttgtgcatggacgccaggagccaggtccatccatgcttgcgtgtggccagcacatgccatcgcgtggaggtgcggcgtccagtgtagccgcagccgcgtggcggatcgcgtggggacgaaccgacgaagaacgggccggtgcactaggagatcgagcaccgacactccctacgggcgcgctcgatcgtgcgagggcggcgggccggcggccacatcggacgacaggagtagtgcacgctgctcgcggcgtctccacggtttcccggctacctgctcggtttcccattgcgatgtctccgcagtcgcgtgatctcgcaaaggaaaccaggacaaaacaatagatcaatctgttgacaaaacaaaatcaacagattggaacgacaaaccggtgaacggagagctgctgataacgtgttgtaaaccaacgcgcctattagcggatcaccggatccgttccatatccctcccacaatagtataggcgtgagatgatgtagaacacctgcgcccatccctttgccctcaagaatattgcagaagtagacaatgaacacagatatagggtggagctctctcttcattatagatcttatctggagtacaagccaaccattagccatagatgtcacaccctccctctgtatatataggggtcttaggaggagatagatcttatctctactccggttcggattggtccacaagaaaggatctttatctccccaggagataatattccgtaacaacgtgaacctttacctgattagatccgataatcacggtcctatactttctttttttctcacgtaacattgtttttcttttttactaaagatttgaaacctatcaacttgaattttaaaaactttcaactacaaatttaaatttttaagtcaatttgaaaacatttaagtcagattttgaaaatttcaagtgggattttgaaaatttttgacttgatttttgaaatttttaggtcaaaatttaaaaactttcaacttttcatctcaaatttgaaaaactttcaacctagatttgaaaactttcaactcaaatttaaaaactttcaactcaaaatttgaaaactttcaacttttcatctcaaattttaaaaacttttaacctaggtttgaaaactttcagttcaaatttaaaaactttcaactcaaaatttgaaaattttcaactcaaatttgaaaactttcatcacaaaatttgaaaactttcaacacaaaatttgaaaactttcaattatacatttgcaaagaggtgcgtgaaagattaaaagaaaaataggaaaggaatggcgaaaaaaaaagaaaaacgcgtccggaggcgctaaaataaaaaaaaaaagtgtgaacagaaagaaaaaaaaggccgcgggaggaggcccagctagcgccccccgcgcaaacacgccagctccattccaggcgaggcggtgagcgcgtccgcgggagctggcaatgtcagccccagacatgtttttttttttgcgtttttgttttattttatttatttttaatgactttcaacttaaactttgaactcaaatttcaaaaactttcaacttaaattttaaaactttcatttgcaaattcaaaacttgagctaatgctaatcttgacctaaaagttttgaaatcttgatttgaaatttttctattctaagtcaaaagttttaaaatttgagtcgaaagttttcaacttgagtcaagagttttcaaatacaagttaaaacgtttcaatctagattgaaagtttataaatttgagtaaaaaactttcaaatcttaagtcaacagttttcaaatgcgagttgaaaagttttcaaatcttagcatcaaagttttcaaaatataagccgaaagcttttgaaatttgagtcaaaagtatttgaaatttgggttgaaatttttagaatttagttaattttatttttacttttcagtttaaaattgtaaacattttaggagaatttggtccttttttttttaaaaaaaagagttgttctcacttctcgtgtgggctttcttatgtgtgatttgcctgtggctggagaggaataggccatttgggtcacatctatgcaagtgtacaaaagctaccacatactctttttttttttttgataggaaccgaaactttattactgaggtggtccagccaaatcgctggtcaccaaacgctcaaggccaggtggagtaccggcccagctacaggggtctagtaaattacaacccaattttgccaactcatgcgctaccttattacattccctgagacagtaatgaaccgagaaagaaatgaaactgctagaaatgacattcttgatctccaaaatcacaccccccatggcggaaagattgaaagagttctcctggagtgcagatttcagcagcatcgagtctgtttcaagctcaatcttcatcatccccctttcacttgccgctcctacagccgctgcgcaagcaagaacctcagaatggaaagcatccatcaggtgattagctccgccagctccggcctgaaccaccactccattatgatcccagataacatatccccatccaccttgtttggtgctgcagtggaaagccccatccgaattgatcttcaggacatcaggaatgggttttctccattttgccgttctcctctccttcatcttttttttttttgaaaccgtattctcctctccttcatcttcccctctttccgattcaactttaaatattcctctcgctaaccttcattggatactgagccagctcggctcggctcgttctggctcggtatgttaacgagctgactcggctcggctcattatctcaacgagctaaaagcctaaaagtgcagctcagacttggctcgttagaaagctcgagctagctcgtttagctcgcgagcaaatggggacggaaagcgatttcgtcgcggccggcggctagcagtgcgcgtgaacaacaaggagaggggaggggactcacaagcataggacggggaagaaaacagcattgctcacgagcttgtccacccgtttcaagcgttttggaagtggatccagacagccatcaccgacgctggcgccggcatcagcttcggtttcgacggcttttggcggtacattcggtccttcttcgccagcgtcgtggccacgctcgccggcgcagctcacgagctcgtcgggtcgacggcaacaatggaagcatgcggccggccaacaggacctatgcatatgcgggcgggcggccggcatcagcacaagcgtgcgcaggcaagcgtccggtcggccgatgggcgagggagcgccgcgggatgggaaggacgacgacgcatcgctagcgctctaccgcgtacgcaagggaagcgcggcggcgctttgcggcggcgttgcgtaatttgctatgtgcttgttttggagaaagtacaccgaaggtccctcaacttgtcaccgagttagaaaacgctccaaccgcaaaaccagatattcggggtctcttaactaatcaaaaccggcaaaatgggtctttcggtgattttgaccctggttttaacctacttggcggttgaataggcgtaggacccacgtgagctccacatgtcagcgtggccaagtgagcctctccctctttcccctccattctcttctcccccccctctctctctcttctctcctcttctcttcttttggctagccggccggcagttgaggagcaggccactgggcgaggcggcggcggcggcggccggtcgcgaatggcgtcggcgacgctgtgtcgccgccgtcggtgaagcggccccgcgcggccgggcgccgcggcgttgggcgcggaggcggaggcgaggccgtctcgcttcgtttaagtccctgtctcgggcggcgaggaaggtgaggacgaggttgacgtcgaccgccgcggggtcatcgccctccgtcttggcggtggcgcgcgcctctcggagtcgctcgccgctcggcaccggcttcatcgacaacccgctcagcaccggcttcagcgccgcgccgtccctcgccgccatccccaccaaccagtccgtcggccaggcgtcgtagtgcaggcggcgacggggaaagagaaggcaggcggcggccggcgcgcgagagggcggcggcggtggggaaagagaaggcaggcggcggggagggaggggacagctatcgttgcacaatgtttttctggtgctggatctgctggaagacgcatgcgagtcattacttgacagcatcgttgcagagaatgcaaagcgtttctgctcgatctgaatgaagctatctggaggcaatgtaagcatcatttttccatgtaaccatgttcagtatctatctactatgttaccccgatacggggatacggacacggatacgcgacacggcgacacggggatacgacattttccaaaaattgaggatacggggatacgctaatatatatatatatataaattaaaaatacagaaaagtagtaaattgaacagggcaaaaatagattgtgaataagtgctagaccacaaatagtgcatagaccacaaattaatagttcaacggtacatccaaactcgcaatgaccatagaagttcacatccagcccacagggcacgggcacacaactagtttataaataacaagttcacagccacaaatagaataattaggatagaccgataaacttgttcagtactctaagttcaattcaataataactagataggtagatcaatttaattgctgcttgtatcaatcatggtaactgaagtggctgaaggttcagcatcagcagacagatccaatgcaccaagatcttctagcaccctctcaaggtcaggctcatcaagtgaaagagcagcttcttgaagaaaatcagcaccaccctcgaacatctcaaagctgtctcctccaacatcccacattcttgatggaccagtacagtactcttcagatttcctggaaagaagacgcaaattctggtgcacaaacaccaaatcttcagcacgtccagggtttagcctacaataaagcaattgtagtcactgatcagttccatgcatttcaaacatacaagaaatttactaagtaagagaaggaacagaacttgtttctcattgaattatggatcaaaccataggtgctccaatttctttcagcacaagatgatgatgttggttgtccaagtaattttagcgccaatttttttaactcaggggcagagttaccataaattccccaccattgctttgcatccaaatgagctctatccttgattgagtcaaaggaattaaacccatttccaaacagcgagaaatctgcaaactgctgcttgatcttccttaattcatcaccagcaaaataccttctgaagcatttgtttctcatttctgaaatttctgcatccatgtgaggagcttcacgggttggaacctcagccaaccagctttcgcagtagtacctacattttataaaaacaattaataggctaacaacgactacaaattatggaaacaaacatttaaaagtagaagcagaacattacttggggttcagtgagtgtgccaagcaatgcaggggggtattactttttgcccatcgagagtacaagatctcttgcacatgaaagaaaaaggaggaatgctcatttagttctttcccttcatgacgataaactatttttttcaccttatctatcattgaatcccacatctcataaaccaaatggaggcaaggtttgtcggtgtcagctgcacgaatcatggaatagataggatcagtgaaatctaggatatactgcaccttatcccaccacacatcatttagaaccttctctttgacttgctgtgcttgaacttgattgtcttccctaataagaattccatttttcactcactaccatcaagattagagattctttgatagcacggaacctctttaacattacaatggtagaagcaaatcttgtatcaacaatggcaagaaattttagcttactgaactcattgaacatggagagcctcattgagtggttcatgatgaagttttttatgaaagaagaatctgctgctacctcagtgatccactgaaattcttcataagcatccccacttgaactcttggctgcacatatgttcttcaaggccaggttcaaggtatggacaacacacggcgtccaaaaaatgtggctgtacctctgttcaactatcaacccagcagccctgcaattagctgcattgtcagtgataacctgtaccacattctttggtccaacatcctcaatgactgcaatcatcttctcagcaatatattccttcctcttaatttctccttcagtgttgattgctcttaaaaacattggcccatcttctgtcactgctagaaaattcaagagtgggcgcctttgagcatcagaccacccatcggacacaatgctcacaccttttacaggccatgtcgacttaaggggatttaacaaccgctcaacatgtgtcttctcttgaacaagaagagtagttcgtagcttgttgtaacttggaggggaatagcccccaagcgcattgttgcaagcaaacataaaagccttcctgaaatatgggtttcttgcaacattgaaaggaatgcctacagaccaaaccaaatgtccaaatattagtcacatttgtaacacaaatatgagaatgtatgagttaataaaacgtactaaactctagtctaacctgctgtgtagaacattctcgcaatcaaagcatcaaggttggaacgagtatctgaattgaagctagactcaatagctgaaacagcccttctcttccccctactcgcgccctctgctggcagtgggatgtccttaggcaagttcctttcagcaactgctgcagctctagccatttcatcatgaagttgactaagaacatcgattgttacctttggacagggagctacaccattagatcccaccttcaagagatgtgctttaactcttgagtagctcccatgcataatattaccacaaagcctgcatctaaaccttacattccctccctggcctttacctgttttctccattaactcaacatacctccacaatggcttgttttcattgtcattgggaggaatcacacggcaagcattcaagaggttgcttgcccttgctggaccactagttcctcttgataaatcagtagcagaattaggagccggactaccactaggatggctagatgcactagcactagcacttgagcttccagttcgataatccatgggatctaacaaaaaaaaagatagtacttatactaagaaaagatgaagggcattgcattcttgcagatccactaaaactctaaacgaaataagaagagcattgcagtattgctctgctgcagtgcatagaatgctaaaagaggggatttattattcacctcaacaagggaacgaacaggaaaacagatcggcgacgacagtgttgtgccgacgtcacagtaggaggcggcgaggcgcagcccagtgcgcggcgccggcgcagctcggcggcggcgacggttgacgaggcagcccggcagcagcgacggcactggagcacgtgaggggcgttggtggtgacgctgttgggccagcatcggaggtggagagcagcgtggcggtgccggcgcagcccgtcggcggcaatggctgatggggcggcggcggcgctggagcgttggggaagagaggcgagagtgagagttgagaggcggcgcaggctgggtggatatgctccccacgcgcgcgcgggttttggtaccggcggaatattagggttaaacgtatcgggaccgtatcagaacgtatcggaaacgtattaggaattattttatttattttaaaatcaggataaataccgatacgtcctggacacgtatccgcccgtgtccgatacatgtccgtatccgatcgcgtgtcggacacagacacgcgcctgctttgccgtatcagtgcttcatagtctatctatgccatttgattgcgattcagaaaaccagaaaacactcacatcagcatgcatgtacccatgttcatacaatgtcaggctgaagtcatacttatcctatcttactataaagttattcccactaactaattaagcttaacatataaagataccacatcattatccactaacaagatgtcacataatcatctactaattaataagatgccacatcatcatccgctaacaatcatcacatttaaacattatacaaacttgctatatctttatagtttttataatttaagagagcttttcaaatacaaacatgttaaattatcatccaacataattcacataatgtttcaatatatatctttattatgttttatgatatcctattacttatatagttcatcctcacttagttagtgcttaaatgattaaactatggtccaaattatctttctcgttttttcctctaattaagtcatcatatcaattgtttttatcctttagatgattaatctacggtccaaactatctccctagttttcttcttccataaaatcataccaacttactttttacgtttgaatcaccattctacatactatttaaatttaaattatcataaaccatattaatttacttaatctgatattatatagctatcttacacgttattttttttattattatcatactaaattcccgcagcaatgcgcggggtttaacctatctagtatctttcgtgtacaccatgatttacactgtaataaaatcaccaactcgaattagagaagctgaactgttttgttagtaacacattgcacatgcaggaagaagccaagccacccctcgctgaggagcagcgcgacctccgcgtcagcgacgacggcgaggtagtagtcgccgcctcgccggtaggctcgggggacgacgaatccgacgcgtacgtggcctcggcggtgtcccagtggatgcccacggccgtgtcggcggcggtggcgagggacctgctcccgcgcttcttgtgcagcacatgttgggcgcacctcgacgacggcgagagcgcgtcgtcgaaggcgacggcgaggcaggtggctccggcagcgttccgcgtccacgtgacccggatgaggagctccttcccggagtgcagcgaggcaccgtacaccgccgtggtcgccgcctgtagcttgcgatccagcgcgccgccgcacccagagtcaccggcggcggcagcggcggcggcggcggcgatgcctaccgagctgtcgccgaagcacgacagctcctgcgtcgcctccggctttggtttttcttccggcgagattagctgctgtttgctattgctgctgcaataaaagagagagctgacgtggcacgctgacacgtggggtccacgtgggttccacgatgactcagccgtcacgtaggctaaaaccgaggtcaaaaccaccgagagacctaaagcggacggttttgttagttgagggatgcccagtatctggttttgcggtttgaggacgattttgtatctcgatgacaagttgagagaccttggatgtactttttccgcttgttttagcctagcctagggtttggcatattaagggctgtggtgggcctcgtggatgattaagctgctactataggccttgtttgatgggctatccaccggtgggcttcagcttgttttggctcacgtgcagctcgagctggctcgttatgtctaacgagctaaaatgctggctcggctcgttacgaaatttaaacgagccgaaccaagtttatcacgagccgagcgagctaacgagtcacgagcttcctgtccacccctaatgacataggccaaatcagctgggtctgtggcttttcctccttccctttctccgcctccatagtatttaatatggactgcattgcactcaataggattccataaggtctcttaagttctacgttgcaaggacctttcaaattaatttgaattatttttggattttggctatctgtcagtaatccctttttgatattgtcttatggagattggaattcagtatccacatgtacagtttcaattatgatggtatcagtttgctgtatgcctttcttttcagtgagatttcagttctgtctgtatatgtgaatctgatcttgtgctgcaagaaaataatgcttcgttttgctaatactgcagctgaaggctacacacatgacacatgtgcatatttttgtacgagaaaaatgggcacaattgatacctgataattgcatgcattgatctataaatagcctattagtactggagcaaaataaaaaatgcataacatagaaggctgaagctcttatatgctctcacaagtgtatggtggcaaagaacacatgaattttggaagtgattttagaactcacagataatgttagatcaaagaacactttcatactatatatgagctcacatactgaacaattccacatgcacagcatgtcacatttaacaaaaaaacaataaggatctcgttactgcacaggttcaactaaaacacagctctgtttagctcattggctgttaacaatcagctactgtccacttctctcatcatttacaccatgcgtactcttaactggtttagctcacgcccgtcagaaatcagcagcaggtcacttcttctccttatcaatttacaccattgtatgctcaagttgtaagtcagcataatacgtggcaatgaacatcgcttcaaaaaattcatcaagaagcccagaaaattgttcgttgaccatattcccgaaatctttttcagagaagagtagtttcctgccctctaccaccttcgacatgaaatgctgataagtatttcttaccaatctcagcaaggagagaacatcatctccgtagatgattggtacgcccgtgatgggatctttccagtaaaaggtctcaatgaaataaacgttgtgaagatccatcgggctccaaccagagaatatcttgagacgttcaagcacaaaattgtatcctgctgggtctgttgttggcaatactagcagtttattgtacaatgatgtaaagacatgcatcatttggtgctcttccatcaaacagtagtgatagcatatcagatactgataagcagttggatctctcataatcatacttagccatctgtgaatatcttcaggaactggtaaagattcaaagagttcttcaatagtcttcacatattgataaaagtcaacctctgcattggcctttgtataggggtctaaatcatcagcttgaaactcatccatttcaatggtcatctcgtcacttatcagaaaatttctcaatgagaatcgaccagcgagtgagtttggctgactgtgcaacttgtaaagggacctaacacttcttcgtaacacaagtcgagtgctcattcttgtgatttcatatttccttgtccttccgcatccaggaggaatgatagtatctgttaacctcgttcttcttcttctagtatcaactaaagttgcaagagctgaggactgcagaattcagtaaattaggggtatgaccagattgattccaggacactatctactatcacgcccaaaccaggaactaagttgatgaaaatacactataagaaaaaaaaaatctaaaacagaaaactgagaatggaagatttcatatcaacaagaatatgccacaaagaaattaaaacttagtgaccgcattagtatcttactgaaaacacaagaacgatcataggcgaaaagaacaatatatgcagtagatgcacggatcataggcgaaaagaacaatatatgcagtagatgcacggtgatattattgaggagcaggcagataaaaactacaccctccatcccaaaatataacttttaaccttcaaaatttgtcccaaaataacaacttcacaagcattcctttcccaaccaatgacaaccctacatcattcaatttttccaccttcctccacttctcatccaaccccattaaattatacctactttcttaatgactgtatccaaccgtaaaaatccttatatgctgggacagaggtagtaataacttaactctaaagcttaacagcagcaagtaatcgcttcatttttgttggttgttcagtcacaaggcaggatagatacacaaaagtttcctaagttcagcaaaaaacagtaggacaattacagaggccgtcacgatccaatagtgtcaattgcatgcaaaacataactacaatccactattaacttatgatttagtacgcgcgtacaagaaaagatattctgctgaacagctagctgtacaagaacttgtgcgtgcatgtacacagtattatctgatgatctacaccctgaatttcataattcatatacttccatatttcaacattgttgaatgttaaagggaatcaaaccttatgatccttgcgaagcgatgattttgacatgcttgctctaggattttgattggagcagccaggtcgctttctttttctacctgaacgctgtttacaagagaactggttaaaatcatatatctaaccagacttggtagcaatgtcgagaatcaatataacaatcaaacatttcattcaacctaggaaacaaggttgaattgggaattaatgtattctaaaaacaagggaatacatggcactattaaacaagaaacttttgattcgacaattgtttcaactcttcttaaccacactatgacttcaggggcaattataggcagcaacccagcaaaaggctgaatcttttagaccaaacaagtatggtcagtagtttgcatctacgaggcctgacttaagagaaaccatgtccggtgatacaaccccaaatacacatccagacaaaagtttcctataaacagtccgataacactgaaagctgctcatatatctagcttcaggatttcttaccaaaatatcgcactagtcataatatcggcggaaatttcctcatattttcgcagtaaaaaaaaattgtgaatgtacacaaactgacaaacatgtggtccagattctgattttcaacattataaaagattacaaggagtcaagtctggtgatccgcatgaaggtgacaattgtgattacattcttttttatggatttcaattggacaacacgttcaccttcatcttatatccaaaagttactccacaacaaaacgtgttaaaattaattcatattagcagacttaaacccaattgcagggaagtaaaaataaagatcaagcattttactaggaaacaaggaaatatgggatgtatggagtttttcaacaactgattggcaagaacacaaaactggtgcttctgcaatttgtctactcttgccaattatgcttcgggccttcatagccaattccgggtgccaaccagccaaagtttgaatcttttcgaccaaacaatagtgcgtgataagtgattttgcatgtaagtggtcctttatttagtgaaactgagcccagcaaagcaatctctattccttagtacacatctggatgaaacattcaatgaaaatgaaagctcatacagtaggaatgaaatcaccaataaatcccccacatttttactgtcgattaaaatgcatcacattaaacagaaaatcagattaacacgagcaggagcaactaagtctcaacaattccaacagtcccagtgtcaaattccatagaagatagaaagaagacctacaagtagttaggaagtatttcgcaatgcagaaagccaaatttgcccccctaatttgcccagtcgattttgattctattctaagatgtcacaacatttcaaccaagatttcttcactcaagtacagcaaaaatcagccaagactttcacactggtaaatacaaataaagaatgccaagatcctagttccacattctaatacacaagctgattccctaaaaaaaaaacttttttttactgtaaagcaaacagaagaactccccatgttcctaacacaaaagatggcacaagagttaacttatgatttactgtgcacacaagaaatattgctctgaacagctagctgtacaaaagcttgtgaatatatatatatatcatgtgatctatcatcctgacatttcataattcatacacttccattttcaacattattgaaggttaaaagcaatcaaaccttttgatcctcatgaggcggtgattttgaggtgcttgctctagtattttgattggagcggtccagatgcttttgttttctatcgaaaatctgtttacgagagaaccggttaaagccacacatcttaccagacttggcagtaaccgcagagaattgatataaagatttaataattcagactagcaaacaagttagatagggaatacatggtattgtaaaaaaaggggaatatatgcgacttttaaacaacagactagaatgcccagaccagccaagaatgataagtaaacgtctccttacctttctcctgtcatacgcaagaatgctacttgggattgggagtaacttctcctcatgtggatttgaactattaatagaactaggagggagtgggtagatgatgtcatagtgagactctatgcgcagcaaggtcacgcaaggagcgccgcggacaatgtagtgcgtactttcgcaagttccatcatgaacgttctccacttggacggtcaccctgagagcttctgcacaagcttttactgcagcagaggttgcgtacacacgaggagcaattacgtgcttcgagcaccactgcatgcatccagagcaacaggtcagtcaggtgaaatgagtgtgaagaatatatagttgcattcagtttgtaacaggtcaggtctctaagggaagtgatgctgatactaacatcttccagattctgattttctccacaattagttgcacaccattcataattccatatgcgcgtgcacatccaggtagctgctactaatctgaggaaagcaaaaactgatacagaagaaagcatgtcagaatcaggaaagtggatcagatggaaggaatgaaggctcaaggtgttttctcactgtcatccgttgtatcataactgctgaagaactcaagaatcttccccctgtcatgagatgaaaaaaggcgcatgttcagtcagtgagatgggatagtacatttagaaacaacactcttccggaattgcagaaaaccaaacatttcaaaacctgattattgatattgggtgctcctgcatgcgcttccatccctttattttctctatcagcctctcaaatgcctgcaagaatcaatgatacaataaatcataacataccgctggcatctagcacccagagagtttaaccagcgtgttacaatggcgcttacagaatgatgatcatcaataaaacatgactagcataacttgtcggacaagcttccatagttaaacatcaagtatggagataatcattagaaagaacatttgatgagatagtagtaaggaagacatttgtgatttaggatcaagatggccaaaccatgaagcagcatgtgtgcagcatttcagtcttgaacataagacacctataatatttgttcttccccattatattttatcactattaatgtccaactgcaaaatttcttgcaaggttgaatattgttcaatcaggaagttaacttcacaaatttataattagaattaatgtcaacagggtaaaagactgcgatgtcatgccactattgtgaaacaatggtgtgtatctcctgcaaatgataaaacaaaggaagtaaaatgatggatacagattggtttgtacaatacaaatttagattagaggaatcatccattacaagcatgtttatgtcagaaaaaccaatataggggaaaaagcaaatagggaagacaagagattactttgtgtttctgggaaaattcagaggcccattgaagattttcagctttggtagccaatgctctaacagcagcaagaaggcggtcttcctcacgtgtgcctatactatcaacaacttgctcctgtcatacattgtcaaaactaagagagttataataacattgaacatacatcctatgctagggaatagggaggtggacacttaccaggtaggaaaatatgaaactcctatagaaacattcctcatctctatgtactggcctaaattctgaatagtgatggctgagatactttaaacgcaaaccaacttccggttgctggaaagaattatcaatgttcctgaaataatgatttgcagcttctcccatgggaattttctgcatcccacacacaaatacacaaataagggaactcaactaaaaatggtatatgcataagaaaacaacataactagaataaaatatattttatgttttatatgctccacttttctggtgtttatattctctgaaaaatgcttagaaataattagaattatcacttcgtttttattgattggttgttgtaaagtcataaaagacggaatatatgcacaagatttcctaaattcagtagcaggcctattccagaagccatcacaatccaatcctttaattgcttgcaaaacataaccagatttaacttatgatttagtatgcatacaaaagagatattctgttgtacatgaacaattgaatgtacagtgtcatgtgatctatcatcctgacatttgataaatggtgcacttccgttttcaacattatctaaggttaaaggaatcaaaccttgtgatacacatgagcaggcagttttgatgtgcttgccccgcaattatgaaacgggtagttcactggttctccttttctatctgaaagctgtttacaagagaacaggttagcatcatatattctcaccagacttggcagcaatctcagagaattagtacaaagaataaacactacagactaggaaacaagggaatatatggaacatttaaaaaacaggctagcaagattggaaaactagtgctttgacaattttgtcaactcttttccaatcatgctatgggtattctgagaaaattctaggcagcaacccagcaagacacggaatcttttagaccaaacattagagtatgctcagtgagtttgcatatacaaggcctatgatttggagaaatcatgtccagttatgaatcccaaatacacaccaagacaatttttttcatatatcactgtcctaagactgaaagcacatacatgcagctgcaagatttcttaccaaattatcacattagtaataatatggtgtgacagttcctcatattttcgccgtaaaggaacttgtgaatatacactagatcatgaggtctaggattctgaccctaattttatatgcccattttcaacatcatcacaggttaaaaggagtcgaatctggtgatcctcataaagtgaggataggtacttttttttgtggaattttgattggacaatgcgttcaccttgctttcatgttcaaaagctattccacaacaagatcgattacaggatagtaatatcaggatcaaacatttcacactaagaaacaaggaataggggatacatgaaacttttcaattacagactagaaatgtcacaaaactggtgcttccacaattttcctactattgctgattacacttcgagccttcatagccaattttgggtagcaaccagccaaaggttgaatattttagacccaacggtagagtacaccaagtgatttcgcatgtaagttggtcaattatgtagagaaattgaacacggtaatgcaatgccaattccaaatacacatccggatgaaccattcaatgacaatgaaagctcataaattcagctttaggatttctgagcaaaaaatcacactagacatgacatcacccaataagtcccccacaattttacagtgtgattaaaagtgcatcacgttaaacatcaaattacattagatcaagcaggggcaactaataagtgtcgacaatttcgatagaagatagcaagaagacctaatagtagtcagaaagagtttattcccaatactggcaatacagaaagctgaattgccccccaacatttgcccagttgattcttttttttttctttcttttttttttggtcataaggcctagttgatttcaactctgttataggatgccacatcatttgaacccagagttctccgccccaggtacagtaaaatcaagaaatcaaagattgccaagatcctagctccacattgcaacacaagaatacaagatggcacaagaaccgcatctaaggaacaggatagcacgttcgcaacggtgaaagatgatcccaagatttcacacgaacgacaaaaatgcccagccccagaccaatcaagaatgacaagtaaacttctccttaccttctcctcggcgtcgccatgatacgcacgaatgctactcctgagaagcttcactttgggggaatcagatgtcctctcctccttccttcgtgcctgcaagaacccaagaaatgctcaagaacaaatccaaaatactccaaggtacccaacacaaacgccatgacagcacaaatgcaagatgggaaccattacctgttcccgatcatcagagactgtaaaagatccttctccgatctttctctttcctttgcggtccaccaatgcagcggcggcgctcaaaccgtcgatgccgcggcctccgcctccgggctgctcacgggcccgcccctgggtgaagcgctcggtgggcgagcgaggaggcgagcgcggcggccgcgccggcccagagacaacggcgccgccctgggctgcggtggcgcgggagctggactcctgggagtgggactcgcgtcgcccgcgcccggatcgggattcggtgatattcccggtgatattacattgagtcactgacattccgagaatgtcacggagaatgtcaccgaatcctagtcccccgcgcccatggatcggtttcgtcttttggtgggttcgacgcggacgccatccacgcggacgggaaaaacttgtgggaagggcggaggggctgatttgctagatcccaattatgagagggggcggaccagaaatgtgtggaggttgtttcttttaattcttgaaaggcaagaggcttatctataaaggtgaaagtagttctgattcgtgagatggagtagctgataggggtagggacctggcatttttccagtttaccccttttaattctaaaaaaaagtttgccccttttaggggaatttaactatttatcactattaggtttaggggctgtttggacagtactaaaaattattttttaagtccctgtcacaaaattattttttaagtccctgtcacattatatgtttgaacactaattagaagtaataaatatagactattagcaaaactcattccatgattagcctggactaattcccgagacgaatttattgagcctaattaatccatgattagcctatatgatgctaagtaaatatgtgctaattatgaattaattaggcttaaaaaattatcacgtgaattagctcttatttatataattagttttgtaagtagtctatagttaatattctaaattaaagtccaaacatccgatgtgacatggacttgaagtttagtccctagatccaaacaccaccttagcaaataaccaaatagctctcttagatttggacttacaagagaggtgaattattaactatttgccacttttgatgacgtggcatgctaacatgggaaataaaattctcacccctttctatcttttgttatctccttcgtcctccatcgctgtatcgccatggccgacacgcacgctcatcttcctccttatgcccgcacagtcgattgcactaagctgtccacgtagctacctctagcatgcccaaggctcacgactgcttgcaaaaaggcaagaccacgccctacgccctatgccgcagttgcccccgtcaaacgcggctggcctcctaaggtacgctccatcactcttatcgagctagcctcctctaagagcaagaaggccaagtggacacttcccgaagctctccagtggcgatgacaagcttgttttcaccttgtctccctactttgaggccgagtgcaacaacagccagccaaactaaatcaccagattcaaaaggaacatgtttctttcctttgcttccagcaagtttacacctagtattcatgtgctctatgttctccttagtggtctcatgcagttttaacatcagttcatcacattgttttgcatcaaagttcaccctctctgaagttgggaggggcaaaagatcaataggagcacggggtagaaggccataaataatctcaaaatggcacttcttagtagtagaatgttgcgaacgattataagcaaactcaacatgagacaaacattcttcccacattttaatattctttttcaaaatagctctaagcattgtagataaaattctattcacaaccttagtttgtccatcagtttggggatgacaagtagtagaaaataaaagtttcgtccccaacttagcccacaaggttctccaaaaatgactaaggatttttgcatggtgtttggcactatggtgttcacttgcatgga

SEQ ID NO: 7031 - DNA, 56500 bp, Oryza sativa
aaaaaaaaaaaaaagcgttaaagaatgtgttacatacttacattgctttgccacctttatttctttttatttacaaggcaggtggcaaaacgaaagaatattatgaacacaaaaacctacaatacaccactaacttacaaacaaaattgtccagcaatggttcgaatttgacgggtgtatcacaaggtttctgcaacgaacagaaaaacgatggttagatggttcacaaaatcttctgagaaagaactaacaaaaacaagactgaaaatctacaagatctgtgacaactatagcatatatatatacttgccaaggactgcacataacattgaaaatgtcggaattcttgatggcatgcagaaacacatgaaactacagaaactaaattataatatttcaatatgtatataaagcagcctaaatctcctttcttagcacattgggaaacaaataaaagtaccaaaagattatggtaccatttctcatttagtagtacaaggtgatgcaattctccagtttcaatatattattctattttctgcacgtcaatctgttacatgtttattttcagggaaaagaacaaaggtgcatcgctaatactagttcataaaccagaaggatagctgatgacaaacaaagagaagcccatgcaaactaatgtcagtgctaaatgtccatgtccttcataaaactcaatgaagaattgaagatacaggcttttgtctaaactctaatatcgaggaaatatgtataaaaacaaaaaaaaatcctgtgtgacgaagcaattcaactattcaagcaatacaattttgcaaaaggaaaacaaaaaaaaggcatcatgagttgctagtcacttaccctttctccttgtgttgcctgcagctgccttccctgccttctcctggtggcacaaatcagacaatgacaatggagtcagtggtggggaagaagcatcactgccctccctgctatgcttagcctccaagagcttattcacagtgatgatgggcgtcctctggctgttggaaggtatggagtagctccttgccaaggccgcaggcggcctaggcagcggcgacgccgttcttgacgccttcggggaggcacgggccggcgtcggcgcgcgcttcgacaccagagggccggagtagccgaccagaccagaaggccggacaggatccacattggctggaggcagcggcagcaggtggagctcgctgatcttcagcgacgatgctggtggcaccggtgacatctttggggaaaccttgggtgacacagacgacgacgacgcgtgccggacgtgcggcttggccgcaggcattgcaccagggtaagccatggtgggcgatggcctgtggtcagcctgagagaagggcttgccgcctgacccggccttgatcgggatcggacctgaccatgactccctcttcagcttcttcagatcatcggtgcttgatgatgacgacggcttggtagcggcgttgtgcatggcgccattgtagtcttttgtcagaggagacgagtgccacagattcgtcggggcatggggctttgtttcgaagaattgcgcggaatgatgcagcctgtgtgaacctgatggtacggggttgtcagcaccaactggggtagggagcctgtacgagtgtttggttgaggatggcctcatttgccgaagcctgtcagtttcatcaagcaaattgccagcaaaaagtggagctgaatgtgtagcgaactcgggcttcaattgcgggaacactatttcggcctctgcttgttttgcctcttcctgcttattatgagataccaatcagaatttcagaatataaatatatgtactagcattttgttaacttggtacaaaactggagatagaggggtagaggctggtgaaggtgcatcatacatatatatttttttcgcttgaataattgctctttgagtagtgatagatttgggtgtaaacactcatatcaaccaccacattgaaaaataatagtttttccaaactcagtgagtgcatcaaaataaaacgtagtgaaatttggataagagaaataactaactaacgaaatcatattagtcgacccagttagaacacttctaatatgagtattatggagtggcagcacacctgcttgttttctttgattggctttggtgaagtagtctgatcacttttatcaaactggacacaaaataaaagaacataaattagataaaaatataaaagacagatcatcagtattctcagtagaattttatgaataaaaatgaacagaaaataaagtgagcaaattccagagataatcagtgcaaactatagaaccttagtgagctgattagacaaagaaagcataaagagttgaagcttatgccagttcaaatgctaccattgatgctgatttataagatccatatattgtaaaaccaattaagaggaaaaagctgaaactaggctatatatgtatgaggtggttaagtagaagcactagatgagaggcagcagcattaaaagggctttttttattatttaatggaaatgttttacatccatggcctctgctgtaaggcacacaaacaaattaaaagacagtaaccaaatataaatggaacttacatccattgaacctctcgaagtaagaaaatcttggtctctatcgtttatttcatagtcgaaactcagttctccgtcatcactacaagaatcgtaagtactgtagccatcattgtcagaaccatcatcctctagaccgctgaagttatagtcaatgtgatgtttctcagatattgctttgacacgaggttcaagtgcttcgagacatttgagtcctttcctgaaaaaacttaactgaatatatatacagttaggttatgtggcactcaaatctcagggaaatagttaacagtttcattgagttacctgagcagcatgatggcgagcagcctgtgttaacaggctctggaattgcccttgctttaatgatttcaagcgaaatgtgaaaagtgctgaatcctcttggtattcaagaaaagaagcgtccagttgttctgtggagaatgattcggttttggaatgccttgaccctcctttgtcactataggatgccctcatggtttcatatgcgtccctgcagggaacagaataggattgttcaagatgcgtctcagtgagaaatgaccaaaaatgaaaatgaacttgaggtgtgtttgaaccttttcatgtcgcattgttgtttcatttcctgcgcaatgcaaacaaaatgtataagcatatcatgctacattgatgtaaacatattgtttttcctgtggttcacaggcaatcctaattaaccaactaatgagtagccaataaacaattggtataaagtggtagcagttgttgttttcaattataagaatacataactgagcaaagatttcagaggaaattttgtatatcaaacctctaaagtttgcagctccttaagaagagattcagatggggttgtgattgtgtggatgatatttgttcgctggatagccaatttaaaagcgtgtcagcaccaacagattgtaacgtggtaaaaaaatttaaataactataatgaattccaaattgttgttttaaaaattcacagtaacaacaaaagtaacttacgtatctatccgcagatttctgtagttcatattgggccttaccgagcatcatcaacactctgcctgaaggtaaaaaaataagcataaaaacgattacagtagtcaacaaaaggaaactttggactgaaggaagtacaagcatacatggttttcatagtggttagaatctagtaacgcgatgttttacaccatgaatttctatatggttaataatggacaactcaccactatcgtcgtcgtcgtcatttagcacaggttttgcaagtaagcaacttcccagttcctctaaagcctcagcaaactctgcacaatattacactatgatcaacttaagaaatgatgtatagacaaacatgctatcaactgttgacagaaaccatgttaagcattagaatttagaaacaggaggtaccatatacgccattcgttgtagcagctgctgctgaaatgaagccatcataacagttcctcatttcttccacatcctgagacaaacgcaaaaccatatttcagttatgaatgcaacaatgcaaaggaaatatttcccattaccaatagactagtactatttaattgctggccagcaataaattgtaggcagccacaatcctaagaaagggtagaagtaccaaatacagcaagctgaacccattagaaagcagaataaattataagctgcccagtaaaacatggatcacacagtcctcttagacatatatctgataaggcgaagtaaagggaaaaacagtttctgtcatatcactgtcattgaccaacagtagcagtaggctgttgagaacaacttctccagcttaatggcgcattacattgcaagtgcttctcagtgtcatcattcagatggcacaaaagatatcaagattagttgcattgcctgtcactctgtccaataattggtggaaagtcagaaattgcaactaagctggcgtacttcagaaactcctctctgttcatggttcaactcccaattcagcaccagagaccgacgcggaatcggaacggaatatctcgtgcgtgttcttggataagcgttcatactttatccagagttccagtcaagattacgtcgaacagctgaccgagattatattaaatataatcgattgctatcttcgcagcaactttctccgatggacgcgtcgtcctctcctatcgtagactttgaccagacatgacccgcgagcagaatggctcccgggcaaacacgtaaagggcaaaattgcagagaagttgcacgtcgttttcgtggaggttagcctaacaactactctactttgaacatccgatatactaatttaaacgaggctcctactgtttggatcagggtttcaaaaaccgccgggggcccggttaccgccacccggcggtacggcggttaccggcggtaaccgcggtaaccgcgcaaaaccgcgacaaatttacaaatcgaaatttgaattcaaaaattcgggcaaaccgcgcggtttggcgcggttaccgcacggtttgacgcggtaaccacgcggtttggcgcggttaccgcgcgatgtgtaatgggttgcacagtaacgggccggcccatttttttttctttttccaattttcaaatttattctccgttttgctctcaaatttgaataaatattactcttttttgagaaatttcttcaccataaaacactataaatcaagcactaccttcactattttttttgatttttttctttttttttaaatttttaaatttggatgaattttattaaaccgtaccgcgcggtacgggtaaccgtacccccgcggtacgggcggtaaccgcggtaaccgcgcggtttccggcggttattcacaccctggtttggattaaataaaagtttagtccttctgcacgcttgaatcaacacggggcaagttcaaagctttgattattctaaacgaccaccaatgaccatcagaaaataattaaaaacgaaaattgatggatcaatttctatttaaacagttcgagctctgttcctccagccgcattgaataaccaaaatactactagtagtaaaatcattttgagcatccacacctaatcaataaacgagtgcaccaaccaaagaacagcgcactccacctggaaaacaacgcggggggtggctaaaaatcgcaatttcgcatagggctcctcccaagatccgattttgacgccgatttgatcacagaaatcccaaaaaaaaaaaaaaaacaggagatagatgggaggaggagaggaagaaatcaataaatcaatcaattaatcaataagtcgatggactcgcgcacctgggcggcgtcggcgagctcgtcgagcttggccggcgtcggctgcggctgcggctgccgcgacttcctctccctgtgctgctggtggtggccgaagcccttcagcctcagcaacggcgacttcatcgatcgatctctcttccctctcccctctctgatcgattactcctcctgtctaacaatccttataattttgtggggattaagcttatctaatcttttgctttgggcggcgatggtggaaatcgcaagaaaagaaaagggccttgatttcgcctctctctctctctcttgatctttcgttgttcctctatgaaaggtagactaaaaatggagggagattttatagttatagctgctgctgcttcttttataactttagcctaatggaaagatatagtggggcccccatgcccttggttgaccaaagaaaaagaagattagacaaaaagcagtcttggatttgatatagtagtataataataattgtagactgactgagagaaagcttagcttagaccggcaaatagtagtagtggtagcatcaaggagattttgctacgaatttttcttgatttgggttggtttttcgtcggagaaaagattaattttctactgtatttgttgttcccctttgcttttgaatttgatgatgacatctcgtcagatactaacagcggctgatgatacagtgatacttacctaaattaacactgaaacctgtggattattattttggtttagtaactatactactcctactttttgtttcagtcataccatatgaactaaataatgtctcacgctttgctgcgagatatatattgtataatggagaaatgatgaaatcatttagattgaaatattataaaaatgatttgagaatggttatttagcatgtgtatgtttaattttagaataaaataaattataaatataattactatatacttacatgttgagctttacgtgtttactggattgacgtggcatgcttgcgtgtaggttttagaagtactaataaatacaatgattgcatgttgagatttaggtatttagtgggtattagctttatagaaagaagatattaacattgaaacctgtggattattattttggtttagttaattacttctactagtttttatttcaagaaaattgcatgtgtaccctgaaagtttacctaatcttttctattcttctgagatttgctcgttcccttccatacttctaaatttcagttttgaccccttctatacccttttcgttagttgaccgttaaattcctacaataatatccatttttccatttggtatcaagaaaatataattttataaagtatattgattgagtgtataaatttattgtatgcgactattttatttatgagtttattttgtgggatattatttaacaaaaataatattttagtttcgcctccgtgaaggaaaaacaaaaaaaaatatctatgacaaagtttatttttagaaataacaaatataatatattttttaccattaaaaactgtatatatagcatattttgttacagtagtacaatatttttataagataaatctatttatgttcgaaataaataataaaaaattatttttatgtcatatataaaaataaattatcataaatattatttatgactttgttatgcaagatattatttatgataatttatttttttcatacaagataaaaattatttttgtaaataatatctcacaaaataaactcataatagttgtatataataaatttttatactccatcaatataaatcataaatttatattttctcaataccaaagggcaaaatggaatttatggtaggaatttaacggtcaactaacggaagaggtatagaatggatccaaactgaaatttaggggtatgaaaaagaatgagcaaatctcatgggtatagaagagattggatgaacttttaaggtaaacaaggaattttctcttctatttcagtcataccatctactgttcattagttaataggtactcccttcatgctaaagtctaagttatactatttcttttatcttacctcatccctcatataacaaagactaataaattataggcatacatacaaaccaataaatatattaagagcaagtacaatagcatactataagctagctataagcatatgcagaaaaaaaaagagatgagagagaaaaaaagtgtgttgcaaatttacactcagctgcagtacggattttaagatgttgtgtttgtatgagagatggaaccaattatataatggcgtagtatatatttgtagtaacttttgtatgaatagtctattagattaactatagatgatttggagtagttagatatactatcaaacttgctctaagatgattacttgggcggtaaaatgaaaagacgatccattcatttaagtattagatgtataatgactaaaaaatatgtccctctcattaaataaaaacaatgcaacaaataaaataggataagacttttggatggagaaagtaacaacatattatctctaatacacgaacctaagtgattttatcttttgttaattcactctcgtactatctcgctctctctttgaacttaccttagaatttatatagaggttgttatctatacgaagggtggctcgtcatttctcttcttcagctaattatctaatgttctgtgagtgtgatatttttacaggcaacctatttgctatagggaatatatactatgcacacaagcttcctatgaatactccgtgcacatcaactaataaatatcacaaaaaattttaaaaaaaattgtacacatacttcaaatagtattaaacctacatgtgaaattttatcttcaaattcattatattttagccataataaaaaagacaagattctgacatatttttacccttaagactgtcagattttcacctttttttaggctaaagtataataaatttaaatatgagactttgtagatatgtgtaatactaatatgagtaaatgttcaacttctgctaaaatttttcgtggtattttttagttggtgtgcacaggaaggttatgtgtatttctggtagaatttttcgtagcatttgttagttggtgtgcacgaagtgtgcacggaaagtttgtgtgcataggatatgttccctctgttctatgcctctgtaactcacccttttttttttctttccagaaagtgtttaactttttttaattatggctgcgaatgttaggttgatggggtgtgatgccctggttgctcggatagatacgcgtgggtgcgtgcaagcgcaaccgatgaatcaatgaagtggcctcaccgtcaggtcgatcaggaagcacttgcaaaatggcaagggcaccgtgacatgattcatgaccacccaagttgagcgagacatgaccaccaagcaccaacccaaaccgaggccacctgtccactttttaatggtgttcttttttccccccgaaccttttcaaaatttgtttatttttttctgaaaaagagaactcagcatacttatttattaaaaaaatattgtaatgccactatttattgcgtgacaatgataaataaattttaggagattcttttttatgttgtatatactaaatagaagtagtttttttgcgggatatatactaaatagtttaaaacacataaaaataatcattgttttttttttattttggggatttcctattgtttgcagtttacataagggcatacgggtcttcttcttaaaagaatataacgtcaaactgggtaatttttttttttaaaaaaaagggtcaggaatactagcagaacagtagggaaaaagagaagcgcaagaattcgatggcaattaggacataatatattttgagtaaattatacctctatttagacataatgtttgactaataaggagaatatttcaattgttcatccaactcagcaagattactcatactgtgccgctttggccttaagttaatttgcatgtaccatacaactttgtataaattaatgaaatgaacgttttacaactttatgtattaaaataattatattcatcttacaaattcatttactatcagtgtaatttattcatatatttttaaggagtgacaaaaataaaggaaaatatattaacatatgcccatgtgtacatttgtaggcataagtttggttcgtcatgcatggtttcacgagattggtccattattaaatttactattattctagcccaagattatagtgaaaatgatgaattacacattgaattgtgttcttgttagaaagacaaacataaaataattggagaagcaacattagtgttgtggggattcactgtttgcttccatctatttgagagtgggcacatttggggaagtatgagagtgttgtggtgcgtgcatacgtcttatgcataataaaaaataaataaaataatgcggtgaatttatacgtttgttgataaagatggataaactagtactatatgctgcaacactttgtttggtacgtacgaatataaaagcactcatttcatttgacaaaaaaatacctagaatattgcaaaattaagctaggctatctaatagtttcgagattcgtactgctacagtgattctacattatcatctatcccccaacccccttggttctttcctaacgctctttggatgtcatctgataatgcctagcgcaccgctgacgcctccccacccaacacgtcatcgctcggtcgaaagacgtcaacagcgtcggcgaggcctcctgaccagcctcctcctcaatctagtagcagcgaaggcctatcaagtgattccttgctaccggatccgccatctaggccaccgcttcctaccacttctttgctttgcctccgccgccaacgtcgactcgaccaccgccttcttccatcctcatggctttgacaccgacgcctctcatagccatcgctttaaatccgacaatctccctctacataccttcctaccatcatgtcaatccggggtcatggtcaaaccctaactctgggtcgtcgtcggttgccaaactagagaaaaagtatctagggttaccggatcacgaattgcaaaacacacaaatcatgagtttagaaatttacagatattttagccccaataatcgcaaagagttgcgaagaacaatctgagatgatctcgctcgccatacagcactttgtttggaaggcacgaaacatgcacgctagtcatgcatgcctgggaagaaaggaccatatgctgatctgcttcgttggaccgtgttaattccaaacgaccagcggttgctcagccacgaagaaattaaaccatcatacgtaagctatgatatattggtactaattaaacgacctaattagtatatatacttcttctttcatatcatgtcaaatccttagttttttaaccagtcttccgagtaataagactttctagcaattctatatgaatgcgaccaatgctagaaagttttataatatgaaacgaccaatcctagaaagtttataatataaaacggaggaagcaattactcgatcccttgatctcctcgatccctcgttgtaagcgaataagcgattagcgatcaaggtcagacgtgcggggttttgaccgtggaccgaagaacggcccaacaggtttaatttcgccggtcaaacggtggttagctagcgtatacattactagtatgtacgtgcatacatgtctcggcgtacatacgtacgtcgtcgtcgcaagtgcagcgccgccacacacagtgtgaactaacctacgtaagagctgacctggatgcatgggtttctgtgacgcaacacgtgtcttgtctgtgtgccagttgtcaaaatcaaccttaagggtgtgtcctgtcgtatcggaagagaaagtatatactacggccctgtttagttcacactaaacttccctcaaactcctaacttttcatcacatcacatcacatccaaaactttcctacttacataaacttcccacttttttttccaatctaccaactttctccaaacttctcccaatttcagaaactaaaacacaacctacgtatcatattggaggttttagatatatagtctatagttcaaggtggcccttcatcatatatctggtgacggagaggcacaaagttcaaggttaattaagctaataagagcttaaatattttcacaaattacaaagtatttttcaagattataatggggattatgaagctaggtgtggggcccaagctatagctgccccatgcatgtttctgcccctgattatattgttaaatgtgccacttaggttaaagctactgtacatggcattccttctcaatgcacagtggtttgaaggggaaaaaaaccaccatgatgatttatggaagagaactactggcataaccactactacacaaactagataggtattggttgggaacctagcatagatgtcaaattttccaaccggcacaaaggtgctggctccaaaaccggcacctttgaggtccaaaaatacaaacaaagaaaaaagctcgtagctgccgtcttcaccccaaaaaaagcggctcaatgcatcggctcaaagcatcgagcagctccccttcacccgatatcacccaacatttaattcatagaattaatcggcatcaagaactacccaaagaacatcaactcaaacacaaaacacaaagaacatggagaggatggatgacggcctccatggagaggatggagcagcagacgagcagcacatcgggtcccatcttgcatagctcgtcggcggtggcgaagaagcagatcccacagcacgtccgaaggcgccacccgccaccgccgcctcccctcccgccgtcgcccacaatcgcacgtcgctattgtcgcctcccctcccaacggatctggcagaggggaggggcgccgcctgcctcccaccgtcacctcccctcccgacagatctggcggaggggagggcttcacccgccaccacacgccactgcgcctgagagagagagagagagagagaaagagagagagagagagatgggagaggatgcggtggagaggataaggacatacaagagataaggaggagaggatatggatgacaaggtgcggtgtggtgcggttcgactccgctcaatataggggtgtcggttcttctttataacaggcacctatagttacttaaaggtgtcagttttttgtgtttttagtctacggagatggaaaaaggtctacatatgtcggttttcgcacttcaggcacctatagcgccgatctctatgtgccttttttagtagtgaacacaactccctccacaatagcttacgcatcaagtagtcttttcaagttgcttaaaaaaccgtatgtgtttttcatgagacatgtgcgcctctagaggccactctttaggctaaggtggcgacttggcttcaacataaaggtgcggggtgacttaccatgtcaccacacaatgtaattgtgcttatgttatagggacgccctctttgtttaggctaaacttattagcttaggcttttaagttagcttatcggcttatgatttataccaatggatttaatatcctaagtttagtggtggagtcgtacatctaccttatataagccaaaaaagcttctccaacttaggttttggcttaatagtgttagagtggcttaatagtgttagagtggcttatggcttaaaaaaagccaaacgaaaaagctgcttatttgtttagtattagactttttagcttataagttaagccttaaaaaaagagagaatatttcaagagagtagaagagctaatttttctcacctttgaatgcgtggacccttttgggattttggcagcttctagtatctaatcatgcggtcacgaaaaacctttttatgaataccaaggtgtgcctcgagagttgagaggatgtgctaaggtgagcatccgttttaaggctttttcggtttctcggatgttcggtttctgtatagtagaaaatcacaatatatagttgtgagaaaaaatgttgctttggtggtttattgtcaaagaggagcatgtctacagctaagccgagccactcccaagtcccaacaataatcaagtgcacgaccaaggttggatacttggtgttatgccactcacaagacaaaaccgcgaaagctatgtgtgccctgtctacatcaagcaggtgaaagacatctactctaaagatttaatcttgcatggtgtcggtttcttcagtaagtttgattcacactagaaaaaaggacatacgactacaaactaaatactgagttacatgaaaatagaaactgaggaaccaatcgaaaaaccaaaactttggttcggcattccgttcgtggtttgtttttgcccacatctactgctaccaatatgcgtaagagatactttggtcgtttgacactctagcttgatgaagagttggatgaattgtttttgaattcgattcaaaattataaatataaaatttatatatgtataaaaatttatatgtgcaaactttatatacacataggtacaaaacatatatgtataaattgtataaacttttttatgtgtaaagttttatatatagtctctctattccaaaaagaatcaaatcctagaggaaaaagtataccgaaggtccctcaacttgtcatcgagttacaaaatccattcgctttaggtccttcggtggttttgaacccggttttatccgacgtgatggctgagtcagcgtggaactcacgagggccccacatgtcagtgtggccacatcatctctcttttcccctcttctctcccttcctcatctctctctctctcccccttctctgctctgcaaggcaggcaatgcctcggcggcgggcgtcggcagtgatggcggctatgggcaacgtggcggcggtggggggaggagctgttggcgggcggcgggtggccgagctagagcaggaggctgacgcggaggaagacgagtgtgcagcggccggtgacgcgaacgacggcggcggtgtggagcggctgaggcggcggctcgcggccgaggggaggtggagaaaggccacgctggaggagctggagaaggataggtgcgcggcggccgacgaggccgagctggagcaggaggctgacgcagaggaagacgaatgcgcggcagccggtgacacgaacagtggcggcgcagaggagggcgacaacgtggagcgactgaggcggcggctcacggccgaggggagatggagggaggtcgcactggaggagctagagaaggagaggcgcgcggcggcgtcagcggccgccgagctggagcaggaggccgacgcggaggaagatgagtgcgcgacggccagtgatgcgaatggcggtgacatggaggagggcggcagcgtggagcggctgaggcggcggtttgtgacagaggagagacggagggaggtcgcgttggagcctggaggagctagagaaggagaggcgcgcggtggcgtccgcggccgacgaggctgagctggagtaggaggtcgacacggacgaagacgagtgtacgacggccagtgacgtgaatggcggcgatgcggaggagggccgcagtgtggagcagttgaggcggtggctcgcggccgaggggaggcggagggaggtcgcgctggaggagctggagaaggagaggtgcacggcggcgacgcgcggccgacgagaccatggccaagatagcatgcctccgccgtccgcgcgccgcctgccgacatctccttcccccactgccgccgcgtcccccgtcatcgccatcaccgccgacgcacgccaccgaggctgccgatcttgcagagtagagaaggggggagagagacaaggaagagagaggctgatgaaccctgagctccactcgagacactcaaggctgttgttggcccgatctttcagtgagttgagataactacgatttgagagaaatattgacgacccgattacaaccgtactagacattgttgtcttgcgccttagcgatcgatacacctctccgtgggttgttgatcttgccggtgcagatcaacgttattcctgcaagcaaatcgaagaaacaagcaagaataagataaaaacaatctgaattgcagatatgaattgaatacaaatgataggttggggttctgtaacgagtaaatcggcgatataactgatcacgggattacacggcaaagtaacaaagctaaactttaatctaaataaaacccaagcaaccctgaaggggtatctagctacttataggggtgggagaacaaccaagaggatcctagggtcgtgctccaccagattggggcgcaccccacataggccccacttgggccggggtcccaaacgaaattacaaacccaaaggcccatgacaggtgatgcagcacattgtttcttcatctgcggatgacttggatggaatttggtgatgaggccggatccgttggaaagaggactccgagagctttccatcaagtattcatgggccgaaaacggaggtcgtatgtagattcggcggccatttgaagttagcagggtagcaggtggccgaatctgattccagcacttggaagacttgatcttaatatcatcttgttcttccatgatgtgagcaatggttatatctgtagtgaccatagtcacatcaaggggaaaatagagatgatgtggccacgctgacatgtgcgttccacgctgacttagccaccacgtcggataaaactgggttcaaaaccaccgaaggacctaaagcgaacggttttgtaagttgagggatgccatatatgttttataagttgagggatgtcatatattatctggttttacggttgggggatgatttcgtaactcgatggcaagttgagggaccttcggtgtaccttttccaatcctagctaccaatgtggatgaatgtatatattttgactgggccaacatgcatgttactagtgggctcaaggcccaggaaagaaagaagacacacctaggctgtgtgggcgcacgttgactcgctcttatcgcgtttagcaactcgcgcgttagacctccccccaaagaacttgactcttttccttcggaagtacaaactgataataaggaatgacaattgatttacttataattaaatgatgccaacccatagctaggattggatatgtatataattggtgcaaccgcgaataaatatgcaaatgtctaaattgaaccccgtcagatgatcgagtgacaaacatgaataaacagttcattactttagcgaaaatacagcggtttagatacatatatatggtatacaacaaggtagttgccttctctatgtacagagcagatcactcaagaacaatgcatagttctcatccatggaaacggtttggatatcaagagggtatgttcttacgcaggcacagcgaagctcggttcagaccagcgagttggatccacaacgaggcacggatccgacttcttgaactcagccacctgcagatcgagtgcattcaaaagaaagttgaaaaaaaaaactgaaagaaaaagctcaatgggagaacagcgtttggacaagacgatggcgaaccttttccccacagctggggcagtagtggtatttgtgccagaggcagtccatggaaggacaaaggaagcagacgcccatcatgaagggcatcatgcaagccacaactgatgctagacttggcttcgacctgttcaaagcaacaacagccatgagtgtgtttttttaagtaatgaagcttcacctaatgatatgtttggtatggtattggtgctactggtcttgaggtgtggagtaggaaatcataacacacaaatcgacagctacttacaactaaaataatgcactaagacccaaatttatagtatcaatatggggctcaggcttaactatggtgtgccagttcatttccctatcaggaaaataaatacaagaaatgtgttattcgtgcccattcttgcatcgccaactttagcatataaaaccattactcactactcagcagtcagcagtcaaatcttgcatcaccaagctgacacatgattttcggttcacaaaaaaatctgacaaattgtctcaatccatagctcatgcaaccattcagagttaactagaacagataatgcaggcaaatatttagatggtctttggttcttttcaaagcccaattcaaaactagtaacaaaactcatatagtgccacttcatcatatttagtggcaccatctgatttgcgcctcataaatgcaaatgcaattacgaacataataataataataaagggcagaccccactagaaaggtatactgcgcctctcttgtatatatggttgaaacaagtagactgtttttgatacagtttgtcttctaatacttgtttctatataatcccaaaaataacacctttcaaacataaagactaatatcgttcaccaaaagttgtttcagatgtaaggacttaatgcaacagacacttagcaatgtgggcagcaatattgccaggaaacatacgaaagacggtcatttaaaaacagagtaacactcaattcagatataaagctgattgcaaacaattccaagaatcatgcaagctcagatgagcttcagtaagccttagcacagccaattagatggtctcggcagcagttcaaaaacagaaaatgagcttagctcaagatgtaatttggttcctttttttcgcaatgctataaaaatatgctataatttggttcctacagtggcaggagatatatacctgtcaatagaggtacaataccttccaattaacataaaaaaaatacctctgccacacaatacctcccatggactgggaaaaaaattgtatcttcggacctgttcattgagtacagaggctactaaataacacaagtgacaagttagtggaagtagatggctaccatgttacaattcacaaacatccatatatatagatctaatctaaagtagtgaaagaattattctttctcgagtggaggatttgccacatcatcaaaagactaatggccgtcagatacagctttgaaacaaaatttaccgttggatatagagaccaacaaagaatcaaaaggtcaaaataaagaaggggttgtctggaggcttcaagaggcttccaggagaaaaggagagggaagagttccaccagcgatggaaacaaagcaatttgttggtggctctgagtaatcgatggcccaaacagaataatgggcttaattgaaccattataaattccttcctaatagcagccggaaagcagaaattccatcctcttttcttcatgtgactggagcttaaacagactgatgattatccattataccatgaaacccaactttaaaagaaaaatcaaaataaacttttctactaataaaatatgaattctattaaaatgaatcttcttctttcaaactgaaagacatttatacacttgataagttaaacatttattcaatttaagatgaaaaaataaaatgaaataaaatccatagtagttctttatcaagttcttcatataaaaattgaaattccgcacatatatccaatagacattactcatagaacttttacatacttgtcaatgtgggcatcaaagtcacgcaacgtgcgacaaagtggctagtatatatgactgccaatttctgttattgtgttttattacgatggtcatgttatatattagctaaactaggtgttacatgtcctaagtgcatgattaactctagcgctcgagactcttcattagaagaagaaagctaaatatgttcgtgtaacttttagcttccagtacaagctctgacatgttatttcaactgacctagaagggttcagaacacaaggaactcttcaaagtgttttctaccagatggaagaatgcctttcttctactctctccgtccctaaatataagggattttagttgggtgtgacacatcttagtacaacgaatctagtcaagctcttgtccagatttattgtactaggatgtgtcacatccaaccaaaatcccttatatttaggggcggagggagtagtatttgtaagttcatgttttcagataatggaatcttttattgaactcatccaattacatcaagatgatacaaaagcactggtaaggattatgttgtccaagcagacttaggcccttgatttgcatctgttgtaaaccttaaaatgggagagtaattacaagtttgtaactgatatactatgaacctattatattctcttcctcatatcatcagattcataatttaacaataactcaaattctcacctcccctatagaaactcaacttaacagaaagccaatcgtgaatgcgacttggataagagcaaacgaataacaagaaacagatgacatgaaaaacatggggaactccaccagggcttgagcttctctggtttcgacaacctagaaagtatcgatttcttcttctcccttttcacggtgcagattagactaccgaacaatctagtactcgttgcagatcaatacaccgaatgctggcaatctcgacctatcaaccgctcgaattccacatctatcccttcgaatcgcaggtaaaggccacaataaaaagactgcaggggggcgagtacggcgggttctcaccggagggaggagacggccgcggcgccgcaggcctggcagtggaatggcgcgggggtgtcgcggaacatggtctgctgcaggggcacccccttgggcgcgccggcgtagatcgcgttcggcgggggcatccccgccgcgtaggggtccggcgcgtagtagtaaccgccctgggcccccgccgccgccggatggtacgggatgccgatcgccggctcgtcgccggccggcgcggggaacgccgccttggccgccatggtggtggtggtcgtcgtcggtgacggcggttgggttgggttgggttggtttgaatcttgacttgtctcgccgcggctgtcaggttgtgggctggaagcctggaaacggagaagatatttatatgtgtatgcgtttgtacaaggtctgaaaaaaaaatattttcgttggaaaattttataggattttatgtgtaatcgttcgtaatactccataaaactcttctagaaaatgtagttagtcaaaaacgtaacaaagcaaatgttgaagataggagaaattacgagaccttgtttattaccggcgcattccacacaatcgggctttttttttctaaaaatgctcgaaattactttaatccgggcgactggcgcaggggagcccgatctggcgctcccccgcgtgcccctcccccctccacatgcgtgaatgcaggccctaggtcccaccgcatcctctactttcacctgccattgaaaaaaatcctttggatacctcctattaagggaatttgttttattttttccaccaaaaatatttcatctagtgtattcacaatatttcactatgtatagttctaatgttacaaactgaaatactccattgcaaccaaaaaaacccacatattttggaaaccccctattaagggatttcattttattttttattccaccgaaaaatatttcacctagtgtacttataatatttcactatgtatggatcaaatattatagtgaactgaaatattctttcgctatttgctgaaacattgtttttatataaggtgaaacaacaccagatttaaacgggtgaaacattttcgatctacttagtgaaacaattccgatatacctggtgaaacatcgtgcaacatttaaaaaaaatcaataataagctattttttttcatcggaatatatccatatgtggccttgttttgaagatttaattgcaacgaatttaatggtgcaatcggatcatgatttagataaataatttaagagaaaaatcagtttaaaatagttttgcacgtaaaacaggtgctaacgtcagcgtccgatttttcgaagatttggatcgggcgaccaatccctagtcacctccagaaatgctacacatcacacgtataattttagaagagaaatcatatgaatttctagccttcaattcgcttaagccatgtcgagacggccaccttggcatggccaagagtcgaccggcctggcctatttcacgacagtcattctaatcgactttagatgaaattcaatgtttgtaatgttcatcaaagatgatataaggccatttccaacccaataactaggatagtgtccataacattaaataaactgctacctaaaatgaaaaatgatgtggcaaataaataaatgagaaaagataatgaaaccatgtctcgcatgagatatggtttctacacaacatttaagacattatgtgagataagtaacattaaatttaagtatggaatagtggtgtttgcattaaaagagtaatgtcagtttatgaaaactatgttagtgtcttgtgttggaaatagcctaagacatcaaatgagtccgctcactaaaggagtgctggtcgttgggaccacgtgtccaggcttggcccggcccatcctatttgcctggccgacctgcgcgccctttttccacaattatattatctagatacgacgatacagatacggatacgccatcttcctaataataaagatacggggatacgcgtatatatatataaataaaaataaaaaaaataaatcgtaaactaggcaattagcaatttagcatagcagagcatgccaacaccaagtcaccaaccattagattcatctcaccaaaatacaaataatataaggctaaaccagtgcatatgtaagtgcaagatttcaaatagtacgcaaatcacaaattaatagttcatcaacatgcatagtttcacacatcacaaccagttcacagagacggtagataacatcaacatcatcatagagctaattcaaatagaattgtttaggacttcaaatacaactcaataaatcaattgctgctttcatccattgtaactgaagtggctgaagcgccattatcatcttgtatatccaatgcaccaagatcttctagcactctctcaagatttggctcatcaagtgacagtgttgggccctctctaggcagcacccgacagtgctgcgccctctggaggcggtggcgctgtgcccagcggatggcgccgctgctaggcgatggcaaacagcggaggcacggcggtggacggaggaggtgcgacgcggcggcggcggggaatggcagtggcggaggatggtggcggtgctgtgctacgacgcaaggaagagagcgagctgagttggggttggggaagcagcgccgttgatgttctttggcttgctcagtgttcgatggttttgatcgatgattttagggttagaacgtatcgcgaccgtatcgggaattttttttattatctgaaaatcgtgaaaacaaccgatacgtacgagatacgtatcggggcatatccgatacttatccatatccgatatgaatacgtggcctgggaggcgtatccaggtaacatagccccacgacacccctctcgtgttagaagctccactttgtttatttttatttgctagaatgtcaggaatagtatactctagtttgtagaggagttcggttgggaatcggcaagattttgaaggaatgtctttgggacttcagtagtgattcttgtatcttacaagttatacatttaggctaacatatatttgctttatattttttagtatttattttccgcaattacattcactctttatttatgttacagagtatttctctaatcaacggattggtcactcatcatgtggaataaactagaagtctgtggtgtagagtttgcaggtttcttggttggatttagttcacctagctggatttgagagtgctctcttctaaccagcgggagtattttacgagtatacgacctagtccgctagatgtggtgccttggatgtatagttcaaggaaagggtagttagaaaaattgatggatgtaatcgtacaggtggtgatagcccaaggcgtccttaatagtcgtccacgttagttctagtgtgttggtgttagacatcaagaagggaaattccttgatagtgagaacatgcgccctgtgccttattagtacaagccatgctgagattttctcatgctgaaatacatctactccttagtctcctttgaaactcctaaattggataggttgggtccctaagtgtcatctgtagtttaacttcagtcatatcttttattagatcttacccccatctctaattagtgtagatttccttacacaagcaacatagaatgaagaaaacattttgtgccagcagtgtgtcctttggaaaatataaatacaataccctagaatactccgagataaagtactatattgataattccatgcacgtgcggaactattttgtgagagcataagaaattcaacaagcactttttcgcgtcgttgctaagaacgcaattggataaaactttcattctttgtacattgtcttgatgagtggaagtttattacttttctaagcgggtttgcatttcctcatgttttttgttgatctgaagacatgacatgtttatggtcaattttgatctcccaaaaaattgtcaaagttatcatgagttgttcatgaataagtgaaaaatatcattatcataaacacatctcatcatcataggccaaatcataggagaatatcctgttagttcttccttcaccgcctctaactcagcctccacggatcattatggccgagaggaaaattcaggactattccgatcctgttagcaaagtcccgcaaaggccgaccatcaatgtcaaggcagagaattttaagccaaagctgatgtttattgatatagggcatatttggcagggctccaactcctaaatttaactccaagagctaggtctagagtggagttgtggaacagccaaaatccagctcctccttcaagtttattttctgaaagcactccagctagctccactcccattttggatggagctgaaactgttttggctagctctatcaaacatgcccatagttgctcatagttcatgatgtgaccatgcctactgtgcatatatataaccattattcacattatgggttaactgaaggcattgagatcaactcgcccaaattctggaatccaaattgaccgcctctaacagcgttgatttcaaacagccactaaatgtgcatacgagctccattttgagtccatgagtacttggtgaaaagctcttgaagtactctttccaacgtatctagccccatctccaaattccaaatgaatcatccgcaattgaataaacaaggtgtggcaccacctgtcatgggcctttgggtttgtagcttcgtttggggccccagctcaagtcctcccacctctgtaaatagctatgtacccctttagtgtttctcaggttttgtttagattaaagtttagccattggtactttttcgggtaaagtcatgatcggttagatcgttgttttctcattacggaaccccaacttatcgtgtgtgtattcaattcatatttgtaatgtcagattgcatttatattgttcttgtttgtttcttcgatttgcttgtaggaatagggtcaatctgcagcagcaaaatcaacaatccacggatagatgtatcaatcgctaaggcacagcacaacaacgtctcgtacggttgtagtcggatcatcagcgtttctcccaaatcgaagtattatcatcaactcaccaaaagtcgggcctatcagagtcgtgagcatatcaagtgaagctcagggttttatcaatccattatgtagcaaaccattagtaatatggttgctcataatccattctatagcaaacctttgaagatgcaacggacacctccaacagttcttaaaggtttgcaacaccttcgcctattccccattctctggttgagaaggcaaagtggtgttctatccatttgatcaagaggctatctttatatggatgagatgctccaatatatttctttctatatacttgtccaccaaaaagccaaccgcactgtggaacaaaagattgggatttcaacagttgtatgatgagtcaattcccgatgcatgggagaatttccaatagtgcatccaagcctgcccgcatcacgacatggaacaccggcttctcatccagagtttctacaatgtggtagtgcatccacaacgtgggaactgttgtatttcttaatgtcacagataaattccgcaagtgcacggagaataccgatgtagcacttcaccgggagtattccaaggtattgaattcatagggaacgtgtgtgttcagctcctcgtcaggttcatccaaggacacgaagcagttgtaggcaaaggatagagaggatttttctagtgagaagcagtgtctacggaaagcttagtttaattctaacgtggtactttaggcactagctagttcgctgctaccagatgtcgctctactccgtacccggacagggaggacttaaagtgattctgagggctgttaccacctctacatccacctctaatgtactgtggggtacgtagcaaccactgaaaattaactacctaaacaccacgtttaagcaattaataactactctagtgtttataacttactaaagcaataactatattttaatggactatagtgaacaatgatcccatatgctgttaggaactaaccaagaataattctcacaaagtaaattgtaattaatcggaaagatatttctattgaactagagtaattaacaaggtacaaaaataaggataggattaccgacaactcctgaattcctctggcttcttctaccttactctctccccattctagtatacaataaagtacaatagagtctcttataattctgctcaagcttggagtgtgtgtgtgtaaagtgaaggagttaggtccttaaataggttggtatgatggttatagatatgcgaaatgtccaaaattccccgcaaccgccatcaagagagcatctggagcgtccatgccaaaccccagaaccaatggtggagatcagggttcggggcttggcccaactagcccaggatttggcctgggcctcctcctcagcttcctttatacatttctctggtagttgggctcaatttctggtgtttcgatggagtttaggagcccaactcttatgtggatataattccccttaattttagtctagatttcctcctaactttggcggtttattacctgcatctaaatatacaccaacactcgtggaatatgttagaattaagccctaccactatgttggatgttttattatctaagttttatgcaagtattggcggcataaaatcggcattcaacaggcgccaacaggaacctcgacatagatgcgggaggcaccatcttctcactttatatcaatgttgcccaagcgttgatcgagaagatggctgcccaccaaggttgaggcaaggagcataatagtactagccctaggccaccaccgctgccatcttggtcgccatggtggtcgtcggtgggcgatggtaggttagttggttggtatggtttgaatcttgactcatttcgcaatggctgtcaggtgggctagaagcctagaattgagtgacaagatatttatgtatatgttgtcaatgttagaaagtatgacgctcatctagaaaacattttttaaagtaccattacctccatcataaaataaaaaaagaacttctaggattggacacgggtactgaggaagtaaggatattaattgagtgaatgttgaggttagatgagaaaagaaagtaggtgaagaatttgaatgtcagaactttgaatctgtatgttaaattgcaacttattttcattcatttgtatccatttttactgttaacatgtcacgaactccctatgttaacaaatataaacactctaaggatttaaaattaatttgtttcaaaatattaggattcttatagtactggtattttttttacttaaagtattgccagggctttgcctcgcagtgtaattttcatttaaaacaaaaatatttacaaattacaaggaagaaagaatagaaaaacattaggaattacaaaagttataaccgataaaaaaactatatgttttaaagggtccattctgcacatatgcagaagaacttctttcttgaacaggattctccatgatccaaaggaaggttgctcatttcgaaaatttttcccattcctttgcttccagatatgctaggcagcaacaaagaaaaatttcatgaaacctttttgcctaaactgcaggcgtgccgatacaatcatttgaaaaaaagttgagattggatcccacagaatgcccaaatactgctaacttctctgactgaatggacaaaagaggaaaacatgctctcttgtttccctaagattattaacacgaagttcacaagtgaagtcatcgttctcctttgtatagtgatgacgatcaagcatatctctggtgttcaatctatcattgaaaagaagccagacaaagactttttatcttcaaaacacatcgtattttccatatccaaacaaaaggtctaggtgtttgcacagtcatgaaagtgagcttgtaaaacttattagcagtgtatctatcagaattccatagaaaactccagtcatctcccttgctatcttgtaaattaagaaaggaaatctcttcctccaaattgagaaattcttcataagattgacttcttaaagccaaagggaaacaatcttccaaaggatgagaggacagctgctgcacggactactttttatccaaggccacactaaacagatttgagaaagtcaaacacctaacctcttcattccaaggatcatcccagaaaagagctgaagaacctgttctgacagtacatcttgaaattcctctgaaaatgtctgacaaagcaataatatctcgccaccagaaagagcctttattccaaatcatatgaggcaccttaatgccatagtaagaattccagattaattgaacccaaggcagatcttctcctttgtaaaacttcacaagatgcttcagtaaaagagctgtgttctgaactctcaaattaataattcccaaacctcctttcacctttggtctacacaccatttcccatgaagcaagggattttctagatgagcttgggttgtttcccctccatagacaatttttccttgcagtatcaatagctttggctacagaaacagacaactgtagggaacacatgtaataagttgggattgaagataagacatagataattaaagtgagcattccaccctgtggcaaaaaaaagagaactagctatcaatcttctctcaactctgtcgaccaaaggagcaaagtccacaactcttggcctagttgttcccatgggcaaacccaagtgggtgaaaggcattgtaccaatagagcacccaagtaagccaacaaagagcttagcattctcttgggggagattgattggatataagctcgaattatgataatgatagttcaccttgagtccaattgactgagcaaaagagttaagcaaagctttgaaacaaaatacttccctctaagatgctttaagaagaaccaaagtatcatcagcatactgaatcacaggaaaacccttgccatcttgttcattaattggtttggacagcagacgcagagaaaaggctctgttgataactctttgcaacagcttagcaccaagaacaaaaagcaagggggaaagggggtccccctgtctaactcctctcctacatttgaaagaatttccaggaacaccattgagcagaacagaagtatgagatggagaaaacaccatctgaacccattgcaaccacttgttattgaaacccatgctttgcatgatagaaaggagcacagagtgctcaatagaatcaaaggccttttcaaaatcaagcttcagcaggattatctccctcttggattgatgacactgatgaatatattcaaaagaccatgctaagcaatcttgtattgttttgcctctaataaaaccatattggttttcatgaacaagcttgagcataataccctggagacgatttgccatcaatttaattaaaattttcaaactgacccccaccagagagataggcctaaagtcattcacagtttctggaaggattttcttaggcactaaagtaatgtaagagctgttaagaggctgcaaatcagtagaaaaaagcatggaaatgggctgccagcctgtagaaatcttgagaaatgataggctaatatttctttagaaagaacccattaaacccatctgaaccaggggccttctctaggggaattatcttaattaagttgtcaacctcttgggtagagaactgatctaccagacaatccaaattaattggataagggattaaaggccattgagggagaagaagagatccccattctgttcttaaagctttggaagaaaagacttgccttttggtcatgcaaagaaaccacttgaccagattgatcataaatctgagagatggaattcaatctaaatctttttgtggcaatagactggaagaatttagtgttctcctctcctaacaacatccatctgtttgtacatctttttttttccagtatagcttcttgaattctagaagctttatcgtctgcaacttgataatctctttgaaattccattaatatatacccaagggcctttgttcctctatcaagtccaaaaagttcaacacattattacagttaactagaagagtagttaactttgacaaatttttactccacttcaacagacttttccttaaaaattttagcttaaaactgatgcacttagctggattatcaaaaccaggatccacagacaaaaccctgctgacaagatcagaaaatccctccatttcaaccccaatgttttcaaatctaaagattgggtactttggaattcttgtatcaattttaacagcatagggaacatggtcagaaatatttcaagcaagaggaagcacagtatttgtctcaccaatcactctcccatcaccaaccgtataaccctcatttaatgtggagcatcaacattttttttttcattttccttagtctctccgaaaagtatctagaaatactttttatatttgtggatgaaggaactattgtattatattgttttattcaacatggacagatttcccattttctccccagacaagctataagtaaagaaaagattgttggcttcggttgacaaaaaaaataaacaatgcaacggaaaatgattttagggtaggattttgtatattcattttcttagtggtaaaaaaaccaaggctgaagaaaagagaaaatgatgaaaaatagtctagaatcatttaaaattaagtttggatttaaattttaattagttacggcaacaagctccaagcgatgagagcacatcttttttcttcctcatgtgctcttaggatagatcttttgattgcttgaacgacaagatttcccagcgcagttagttaaaattggatttgttataaaactcttagatcctatttacatttatggaattatattttgtaacaataaatattaaaaataggattggatttcatatacaaaccattttcttctgtttctataggtagtattaaaactacaactattgcaattaagctacaccattataatttgatatcaccacgatctaagtgttttttctaattaatatgttcatttctaggccttcatatatagtacgtgaatatgatggcttttcgagctcttgcagatagattatatgggcagccagagagatccataggtgtagactcacttttaagttgtacacgggccaaaatagtctaggttggcctaggccttataggactggatccaacaccgtacgcactctccctttttgcaagaactgacatgatacatgggctgtaaaccaaacttttttaaaaaaactaaaaacaacggcggaacctaacggcgaacatcaatgtcgagatgctgaaaaggcagcacaaagctttgactttgacttcacgaggcacgtgtcatcgttgcggagcttgccgcccagcgacccagcagcttcgactccaaggcgatcccgccattggtgtcaaaggcacgtggagtcgttttgccgtgaaccatggttcacggcgatcccgccatcgttttgtctgcccatgtacgccgtcctcctcgcacgtcgccacatccgccgcctcttccgcgctcctcgttgggcgctgcgcctccttcccgtcaccaccgggtgaggcgcctgatccagccatgcggggaccggatccagtcctaccgctcgagcagcagcaaggtggagggaaggagaggaagagtttggcagcggcgtgcttgcttgatcgccgcccgtgccgccctggggctgagcggaacgagggccctctgttcggagacctcagagctgaagctagcaaactataacaatactttgagatgggtatcgttagaagttctcaaattctattagtctttgatatcagcctcaaggcatcaaggatttgcaggggtatctcaggagcagcgaggcatgctgccaaggctcctggctggcctatggcgagagccgagagggggccttttcttcaggtgttgtgggttcacacgagagagatatatatagaaacatgccgtcatgttttttttttaacgactcgcactagacggtgtgaaattctattgatagagcagaaaaaaattacaagattacaaccttgcaaggtcgtaaccagaaaaaaagaaaattataccaccacccacacaccgacagcgccaacacacagatccaggagaaggctaacaccggatcggccgccgctaagcgtgaccgaccgccgctaggccaacaacagaacactgccgagatcacccaaaatccgacccatacaatcaacacaaagccaactctatccaagacttcaggattcagggagagagggtgagagagaagatggaacttgtagaaactaggacgccgccacaagaggatgagaatctagagtgtgcttgcaccaattgctcggggggtttcggcaaggggatgcctagacgacgtctccaacgagagaagcgacggaacaccaccaccgccatccgtcaaggtctcaaagagaaccaagactaagctttcactcggcagccatccttgaggggcgagacggcacgacaacgccctcaggaggggaatgacactcgaacgtcatcgttgcctgtccggccaaggccgggctgggttttcacccgccgtccaccacctgtcgatctaccacacatgtaccattgctccaccgccatccaaaacctccgccggagcgtgggcaccactgcaccggcgccccccaccggccagtctccgcgcgctgccaccggtcgtgcctcaccgggccactggcctctcctcccgccgcatcggccactgcctccacgccgggcagcctcgtcgcgtcgcaccggcacctcgaccgcacctccacgcaccagggccgcctccgccgccacctgccgagcctcactggcctctgctctcgccagtcgcacctcgtgcacgtgctgccagccagccgacgctcctcctcccgccagcgccgcaccagccatgtggatgtcatctatttgaacattatattacgggtctagattaaggcgtagcctcattattctccttaatggtgatggtgattgataaatctatcgtcacccatatcacgagaacgtgggttactagacagtgagatactccctacgtaataattataagtaagtcgtttgggataatatttaagtcaaatattagaaatataaatcatgaatatttctcaagttgttgagtttgaaaatataaaagttatatgaatagatttgttttgaaaaatactttcataaaagtatacatatatccatttttaataaatatttttatataaacaagaagttaaaattgtattttagagaccatgtcgctatacaaaacaacttcctttacgagtatagagtgagtacgtggacttttgactgttccctgatcctaagttataaaacaagaaaattttattttaacgtgggtataaaatgatgacagctatgacataaagatatttttatggcgattattttattttatttttttgagactttaaagtgtacaattggattctatttttggaattgctcgacaattgtgacaattttttcgcaaaaaaaaactttcacatttctagccattggatctcctcgagattcatgcaaactttctcatttctaataaccattggatctcctcaagattcgtgcagagctgcaaaaaattcagtcgcgcgcatgagtcagagtggagtcgaacccacatcctgttgaacacatgcttgcttgatttgttaaccatctcacctcacacatttttcatctagttacattaagtaagctatagtgtagtcataatataattgcacttaattatactaaagttatttttcaaagttttcatcaaaataccgtcgaatgttctatatagctgctcccttctaattgtttttttttcgaaaattctcattgcaaagtaggggtattgagctagtttaccaaaggtataaaatgatcgtagtagatggccacccaggggcatgcaaggagtactcctttcatcctataaaatgacaagctattatctctattcagatttatagtattaacatatgttatatttagtattaggttggttttttaataaaatgtggaattaggatacttcttaaactactgctacgtggcaattgggaggaaacctttttttgggggcatggtgagtccaaggctaaacacctccggtcaaagcagagagcacacacacatgcattataggccagaacctagctagatagagtacgtagagagagaaagtatggctgtgtgtttagttaagcgcaaagtttgaattttgattgaaattggagatgatgtggctaaaaagttatgtatatgacagattgatgtgataaaaaatgactgaagtttggatcttaaacactaaacacagcctatgtgtcgtctcacatagagagagctggcatggcaatggcacaagtgccaggccagctgcgtggtggggcccgtggtccatgcagggagggagctaggtaggtagccagcgtgattcgattcctacaactatacagggctcgcgagagacagccgggacgacagtgaaagaagcttaataagctggacatgcaaacagtgcaggccgggccttagttcagctcatcaaggccctgaatcataaggccatgatgccatattgcccccccccccacccccccaccactttccatgtttagctggatgcttgcgtaccatatgccatgccatgccatttcacaagcacaagcaactgcatgctaactgctgtaaaattgagatcaatataattaagcttattcctgtaaaattgagttcgtgccaaattcatatggttgacttagcgctgcactactgaccattcagcccgggtcctacttggggagctttcggtagtagttcctcacagaataaaaactcctccaacaattcggtttttcttttagattctgagaagctgtagttgtagaaataaaaaaaaactactacttccgttttaggttataagactttctactattgctcatattcgtatagatgttaatgaatttagacacatatttttttttatatctagattcattaacatttatatgaatatgggtaatgctagaaagtcatataacctgaaacggaggtagtagaagtcaggaactggttgttccagtttcttcagattcttgctaaccggatatattactaccagctgcttatcagaaactaaagctcagatccccaaatagaccatatgcgttgcatgcgcacatgtatactctgataaaagcatgtacatacatttgatggcagatgaagcggcagcccaatgtgcatgcacagtatatatgcatcaggctgttcaatctttcactgtaggtaacgtacgtacgtgatctatatatcgtgtccggccggctcagcatgcatgcagggctgggccggacggcaaccaaacacaagaccaacctagctagctagctgctagtctatcatctactccctccatcccacaaaaaaaagacaaacctgagtttttgtgtttaattctgactgtccgtcttatatgaaattttttcataattcgtattttcattgttgttagatgataaaacatgattaatattttatgcgtgacttgtctttttaatttttttcataatttttttaaataagatgaacggtcaaatgttgagcacggaaacaaggtttttttttttttgacagatggagtacttcacattcgtggttaatttgctgcaatatataatgtgtgggccttaatttgcttgaaatctcgatcgattgatagatcatagatctgcaaacattaattgtttgttagggcctagctagcgaccgactttcccatgcagagcttgcaacaactcatcacacatctcatgcacaaacaaaatgtacgtacgtccatgcaagctattctctctccatcttaaaatataagcatttttagaatagtatcaagttaaacatttttaattttgatattaatagtaaaaaaataaaaaagatcaatcatttaaaattaatgttactaaatttatcattaaacaaactatcataatatgtaattctttttatttaaaatgtcttattttttatagatattgttagtcaaagtagcatatcaaaaactatgtcaaaatttaaaaatacttatattttgatacggagggagtagctagctgtccaaggtgtgttgttggctggacacctctctaattaacatgctaacatgtacacttgtagggcacagtttgagtcaatgatcaagagggaaaaagtgtgtgtggcactgtatttgcataggaggatctataaaataaatatatataattgggatcactgatgaaatttggaggtgataatcgatttgggacaattcgggtgaaagtgcattaatcctcctagtgggttttggtgattaatgacaaatgtggttaagtgactaatgagttcattaagtaactttcaggtgcattagtccaatgtgtgaaagatggatgcttggagaccccccccccccaaaaaagtacaaaatcaaagcggaccggaacttgagaagtgcataggatagtttatctattgaaatcaagtttttaggaaaaaccatactattaagaggggttctaggtgatgctctgatatatgtcaagtgctcttagtataaaccaagtgtcaagtttccctaagagtaatttttgcaaatactccatatgtccaaaagtgcaagtccggaacttcctgtcttccaggtccgaaagttccggtcttgtgaaaaatattttcctaagtgtagtccggaagttcctgtcttccagatccggaacttcctgtctagtttccagtttaaaattgtgagtaacggctagatgacgtcacctagccgttatacatatacagctcgtttccagcttgttctttggccattccactttcacttttcgaacctagagctgttgctagcctctcccaagtgtttattgccttctccgctcaatctagagcctaattcttgtgagaaagagagattgagagggagagaagaagatttggagaggtgtgaagactaggatcttgggtgagcacttggagtatctcgtgggctgtcatctcggtgcttattactcttggagatgatctcctagacggttagtgtcgcccgcgagaatccgttgcatattgtggatgtcccgggtaagtttgtgaaggatctcctctcctccgaaagggaacaaggtaagttaatgaagttcttatgctgagattctagaggttttccaagtagagcaacctacacttgtgacgaatttctagaagtaggttgagttggatcttggtggtcactcaattctagaaatttgcctaggggtgtttgtggttgaaggctgtggatttcctctagggtttttgcacaagtaaggcaaggggttaattgagacctagctctttggagctcctcaacagagagtaggatcgcaagatccaaacttcaggaaaaaaaccgctcttgtctctttctgtgatgtttctatggatgattctgtgatatatctcctgcttagaatacctgtgcatcatcttgagacgattggcttagtctcctgtttcgaaatttgaatttcatctttcatctgtaacccggaagttcctgtcctaagaacaccagaagttccgggcctggcaggccggaagtttcggagttccttaccaggaagttccgggtctgtttgaattttaccgctgtgatttgtttataagtttttagggacagcctattcacccccccccctctaggcttcatcagtgcgttcatcggggatgattgatttgagatctgtggacgggaatggagtgaaatcaatatattacaaacaatgaagaaaagaaaaaaaaataaaggagcaaccggatctagcccggctccatctttagtcctaaaaagggcttcatctttagtcccggttggtaacgtcaaccgggactaaagatagatttttactcctgattatttcacccgggactaaagatagcgatttttagtctcggattcgtagtcagggtgttactaaccgagagtaaaaaaccacttctccaccggtgaaatatatgatggtgtcaatgcctgatcacaagagaaatttcttcattctgtaccgtacttttagggtgattggtagagagtcagtcattagttcgttcatctgactccgaatgcatacatgcatgcaggatccactatgtatatatatttgtttcaattaacgaataacaactagtaatttattactccctcccgtcactattatttatcatttccaacaatgaaatgatgccaagtgtaagttcgttttgctgtctgaaacgtcatttatttccgtccgaagggagtagtacatgcatgtttgatataaatgccacgtgctaaactgctaaggcctttcacagtgccacgatgtggtgagttacctcgttgctgaacaccgaccgacgtggaggagaaaggaggtgggtcccgtgccttgcaaggttttgcccctcatatagctagggtctgggtttctcacgcccgaaaaagaaagtgcgatgcggtcccctctctgctgctcctccgaaatcctccccattcttccccccaacccgcgcttccaggccaagatccgagtgggcttggagctcgccggtgacactgccgagtgccgacgagaaatgggacattacaaaaaaaatcaaatagatgtcgtcactataggtgccggtagtgctaaaaccggcatctataggctttttcccacctttgtaggttgaaatcgcaaaaaaaaaggcacctttaagtaattataggtgtcggttctaaaataaaaatcagcatctattatactttgtgtcggttttctaaaaaacagcacatttaatatattataggtgtcgattaattaaaaactgacacctataatatattataggtgctgttttttttaaaaaaaaccaacacctatgtaaatcgagccgagctggccggcatcggatgagccgaccggtgcgccccaccacgacgagacgagcattggataaggttcgatcgtctcgctctctcccttctctctcgtcacgctctcttcttctcgtctcgctctcttctctctcccccgcactgctagcgactagctggcggaggcggtagcggcgaccgcgccctcccctccgccagatccggcgggaggggaggcggcggcggcggcggtagaaggggaggtggctgcggcggcaagtggcatggctcatgggcggcagcagcagcgacctcccctccgccagatccggcgggagaggaggcagcggcggcggtggagccctcccctccgccagatacggcggggggtaggcagcggcaacgacggcggcgggcccctcacaggcgacggtgagcacccccaaccgtctccttcgcttgcggctgcctgattcaaatgtttgattcagtgattcaatgatgtttgatgtgagatgaatattgccagatttgtttatgagatgaatgttgcatgattcaaatgtttgattcactgattcaaatgtgattcagtgatttattttgtgagatgaatgttgccaaaaaatttttgttgcggatgtgggaggggggactgctcggctcgatgcgtcggctcgatcgatggagccgatgcatcgagccggcttttttttattctacgaacctaaaagatgccggttctacacctttttgatttccaatcagtgccgcctcccttgtgccggttgggaaaaccggcacagaatacctattctgtagtagtgggagaagccgaaagatcagaaaaagcggagggaaaaagagatagataaccagcatactccatgcggcggcggccggagagctcgccggctacaactcggggggagcgccgcctctcgatctgcgctacccaaagctcgccgaccacgccgcccccgatctggcctaccggagctcaccggccacgccgccagattgatgaagagtgagctgataatggaatttttcttcgataaataggaaacttaagattaagatgctccggaatggaaatgaggtgcttcgacctctctttctacggttggtttctgacatcaatcttgatctatttcacaacaagtgaagtgggagattgacggttggtttacagactgcaatcagctcgggagaaaaagaaagaagtatctagctaaacttctatctgagcctttacgagcaggatccggagtgggttgcgttcattcagcaggagctgaatcacaacacccctctggagccatctgtcaatcaggcccctgctacttcggagccgtctgtcaatcaggcccttccttctgtcaaacaggcctttgtcttgctaaacacaaatccttcttttcttgtatagacgaaatacaaataagaactaagtagagtcccagagctttttctggtccatatgcagcctgaactgtgctgctctagctaattgcccaccccttccacgtgtgatttctatgttatgtatggccgtgcctaagggcatatcggttgaagtagattcttcttttctctcaaaaaaacccccctatccggacgccattgatataccaattccattgtataccatcaaaattgttagggactggcgccatttgttagacacggtaaaatgacaaatgctcccctagttaccataaaactaatgctacctatagctccatggcacaataaaaggtttcccttttgttttaattacacaaatgattgtgcaattgaaaaattcctcagtttcatgtgcacaatttaaaatccttccttgcatattggcatcgaggaaaaactcacttccatggtcatttatgggaagaaaaatagttacactcaatgctataaaattacatttgccgttgtcattgttgaatttagcatataatgatttaacttattccataaataaattatgacactgcatatgtaaactagcataatcgcataataagatctacacatgtaaactagacagtaaagcatgaacatatcaaatatgcgcaacatgtcgaacacgtaccgagggttttagaaaactggttgctcgtggtactgtgcattgacgatggcgtgcagcacgtgagcgaagaggaagacgagccgttgtggacgaacagggagcagtcgcataaagcgtttcccaaaaaccttattgccaccttctcccggtgtaagacgtcgaagacgaaggtttcggagacctgctcccccgatcaccggtgtatgccaacgagcgggatagagtaggactacgagcggtgggcatctgtgcaaggatcaccggtgtatgctgacgagcgggatagagttggactacgagcaacggatcaccggtgtatgccgacgagcgggatagagttggactacgagcgacgggcatctgtgcaagggtgaggaaccaatttcggggaccattcgacgtcgtcgtgcacacgcgccgccatgccatgccatgtgaggcgagcgagcgcgcgtgtattcccccctaatctctccacctcacatgtctcgagcggctatgagagtatcctcccttataaggaggtctccctctcatagaatacgcaaagtggtactaagctcttcatccatattatcccatgaggtgagcttttatgattttttaaagaattaattttcgaatgggctaaggcccatctattaatttcaacaatccctcaccaaatttcaaaatttcactgaaatttgcctttttttttcaatgtattgtttatataccagtggtttgatggagaacaattagggttgaacatctacctagaactcaaaactaaacttactcacaacttgaacaattaatggactacgctttgaattgcaagtcttgtacaagccagtttcactcagagtgttatctggtaatagaccgtcagtagactactcttcgggtgaaacatataagtcgtactccttgatctcttaataagcttcctagaagattcacccaaaatgaatctcttatatttatatcaactttttcctgggaaatctaaaatgaatcatgttttggttcgtctgctaggtggatccatgaggcatatatatatagcttcgattgtgaatatctatcatttgatggcccagctatatgccagcttaattggcaaacattttgtttctagctttacacatggactgcatgccaactatgcatgccaagtggctcagtcgtcgttgttcagtataattagtcaggattattcctttggtccatccatgcataatataaggtatttgttctatttaagctgtttgttctacgatgttaattgaatgaaaggatttaagattagtaaaattataatatgggtccttgatttttctgtactagatcttaggtatttgcatacatagataatgaaaacgagaatccttcgcctcaggcgaccggcggctccccccccccaaccgcgcacgtgaccccctgggccccaccatgtgtcctgccctcacctaccacgtgtctcaaaaaaatgtttcacctagtgtacttataatatttcactatgtatagatctaatgttgcagtgaattgaaacattcttttgtaacaaatcacccacatattttggaaaccctctattaaggaatttcgtttcattttttgtttcacaaaaaaaatgtttcacctagtgtactcataatgtttcactatgtatagatctaatgttacagtaaattgaaatattcttttgcaacaaatcacccacattttggaaaccccctattaagggaattcgttttattttttgttccaccaaaaatgtttcacctagtgtaattataatgtttcactatgtatggatcaaatgttacagtgaactgaagcattctttcgctatttgctgaaacattatttttatataaggtaaaacaacgcccgatttaaacgattgaaacattttcaatctacttggtgaaacaattctgatatacttggtggaacatcgtgcaacattttaaaaaaattcaataataagctaaaaaaatttcatcggaatatatccatgtgtgatcttgttttaaagatttaattgcaacgaatttaatggtgcaatcgaatcatgatttggataaataatttaaaagaaaaaatagtttaaagtggttttgcacgcatacatcatgctgacattagcgcctgattttccctctccccgtcgagcgtcccatcctgagttgtgtcctaattaaaactctctagttctttaaaatattatactctgcatgtgaatatatatggcaatatgttttgggtatattaatagagtttctgaacatttatttcaaacatactgctcaatttgtaccatacttagctatgggtccacaaaacccaacccaaggactactatacactcacccaacccaaggagcaagtagccgatcctcacaatttggagtctcggaacgaaacaaaaataaagacctttagttaaatgtatgagaattttttaaaatttacagcatatgaaatattaaacaatatagtttacaagaattagctagacttttatgtacaattagccacattatttatttttgaagtacttgttaacacccaacagacaccaagaacgaaaatagaaaaatatagccaaatttggaaatgtcacggtttccttcacggggccggtctaaccgccggcatagtgttggtcataccggcagcatatggtcggttagaccggctgagtccgactccgagttcaattttatcgggtcttaggtttccttacttggtaaggtattattcgagttctaattagtctatcccccgagtaagacatggagaggatcatgtagaaggcaagaccgatctctttataagggctatggccaattcaattcaaacctaccctatcgaatcattcttttacattacttactttcagtcatgtcttttactttatcctagtttcatctatttttctcgattttcatcataaatcgcctgccttcgctacgagagtacgataacctttgtaggtttgtctcgtaaaccttccgattcacccatgagatgggtgattaactccatattgacctaaatcaacctagagaccggtttacatctctaaatcggctccggtagcaggtttaatcttcaaaacccatcttgctttagagttttctatcaagatggttggcgactccattaatgcctcaaatatttagatgagtccgtgttgatcagaaaaagcacctgcagtactatcgtataattatttctagagtgaattgtacattggaccacctattttgacctaagttgcatatctttctgttcaagcaagtacacatacattatctttatctttgattaatctacaatatacatataaattatcattttcaatgaaattcgatgcatataggaaatacatgataaaaacagtatgataacatgacatcatacttcatccacacaccacactgcagattaatttactgaaaaaagtggataaacttttggataaaagtggcacgcttttcaaactgctaaacggtgcatttcgtgcgaaaactttctatatgaaagttgttctaaaatatcatattaatccatttttcaagtttgtaataattaaaactcaattaatcacacgttattacctccttattttgcgtgaaatatttaatctttatattcatctttatgttaaggagatttaaacaccacctaaatgtaccatggtccctctaattttaatgctctgaaaagtataactcaaatttgtgcattcctatgtgatatacattccctaggtccatactccatccacgccacactgctgtgtgtactgtccactgcctacctaccctgtaccagtacatggaccatagctaggacagtatcacagacggtacaactgttttttcatggtgtccgtatgcccttgtccgtttacatacatgcttgtattcatcagggagaaaaaaaagatagaaatacggctaaaagaattgaaacaagaaatccatagacgagaggaatttgaaagagagaatctctgccagggcccacacatggacaaccctccaaagcccctggtctgacatgtacaaatccctggacggccttggggggccacagagagagagagagagagagtgcatatgactgatctgttgagctggagttgcttccaactttgagaattgagattgaaccagtgtgtgtgagagagaggaagaactagtaagtacagattttaatgcggactcttgaaaatatactggctttaactttatctcactggtaaataaaaggatccacacactaacactaactatctataaggtggagttttcacacttggttaattatgtaaaaaaaagctaatattatgatagcaacaaccagtagtccaccaccgtaataataaaaatgctatccattaagcggagtcgtcctccttccctccccttctctcacacacgtggcacgtcatacgctccgtgcacgtgagtaactaccgtatccaatattatattcttaatcatctttctagtctatctctaattatataaacttgacctattaaaaagtacagatatattattagttttaaaatagcaccgtcactactaagaattcaccaataatttacggtttcatccaagagaatgatcctatttttataatgtactatttctagaatgaatagtcaattagatagttgacagtgtaatgtagcacactaggttataagtcatacggtttattagtgattaaaaatattataaaagtaaaacttttatatctatgttgttattgatttaaaaaccaatgctataaaataaatttacatgaaaaaaaacatgaaaatcaagttatagaatttatatttcggcagctgcttgtaagttgtagagcaaaaaaaaattccctcgtatgatttcaatcctttatattttcttcatttttcctttgctacaaagaagctataattaccattacaaggtactaagagcataatgagatagatatcttcagtgcatgtagggatgtaagtgggccgatccgcaaatctacgtatatagaggtcaaataaatgggtaatccacgggtttctgcgtcatggttcaactttaccgtacataaggatgcaagtgggtcgatctgtgaactcacttatagatcaaattattaaaagaacgcgaatattagagaatagcctaacatcaaataattagaaggggtgaggctttgaactcagatcggctagcccaccaccttatgaaactagccgaaagacccctagacgtttctcgtagatcaaattattagataaccagatgacaaatgacaaatccattagttaccccctacttttatctatatataagttcgcggatcgacctaactgcatccctaactgcgcgcatgcatatccctcgatctcagctcgatcgatcgatcaaactggctcttagacagcatccaatgtacgcgtagtttcgccgtaccgcaggtagataggtactgtagtaggtacgacgcgcggggctcgcgcgatcgaacaccacgtcgtcgccatcgatcgctgtccacccagctagctagctcagctcgaccgctgcccacggaggaagaatcgaacgcggccggggggcgccttggctggatcacgcgagaacaagagagcgagcgtcgtcgcagcacgtacgtcgcgtgtcgcgtccgcgtgcatgcaactgcgcgacgtacgtaccgcgggggccggggaaacgatggacggagttagttagttgaaattcccctgatggtcatcaatcacatcgatcgacatcgtccaggttgggatcatggcgttgcctgcgtatacgtacttgcctccccagaccacgcaattccttaactgcaaagtactgatcacaccctcctgctgccaacctgcatgccattgctagctagtagcagatgcaaggttggaattaattgaccttacacacgttagagcatctgcgagatggcctctcaaatgacccttgctaagccaaattttggtaattttagaaaattaaaaaattcgtactccaacaacctctctaattggattggatagctaaaccatccgactgcccaaatctctcacctcattggccaaacttgtctatccaaaatcacttacggatagtgagccccacgtactattccttctccccatatggccactccactccactccactcttaattctctctcgtgctgcagcgtctgctataccattaaaaatcgttggagtgaatgttaaatttggctcttgtaaattttttttgacaagctaataaccaaataaacattcgaagtagagccgataatagcaaactctgttggagatgctcctagcaaataatcattgtcaacccggctggtcgtcggtgaaatatttaaccgatccatctaacttggccagccggcagtccggcacatgcaagcattatgcatatacgtacgatatgtgtacgtggtgcttaagtgcttaactaattccagatagatcatcgatatatacatatattctgatgatgaagaagaagaaagaaactactttttgcccggccggcccctcctcgcaccctgattcaaacagtgtataccaattatattggcgcgcgtgatatcgagatcgatcgatatgatatacatgtagggctaagctagtactccctccgtttcatatcacaatattttctagcattgcccatattcatatagatgttaatatatttctagatttatatatatatatatatttggacaatgctagaaaatcttataatataaaacggatgaagtagcatatgcatatattccctccgtcgcaaaatataacaacttttagcttaaaatttgtcccaaaatataataacttcttcgcccacattttttttctcaaccaattacaagcctccaccattcaattttcccacctaccttcacttctactccaatcacaacactctcccatttaatcatacctactttcttaataaccgtgttcaactctaaaaatacttatattctagaatagagggagtatatgcggccccagataaatgggagatggatcgatcggtgttggtgtacatgcatgttactattgctagccactgtgtgtccggtctgcgtgatgcatggatggatgcaaagcgcagaagagaggcagagagagagagggggggtcatggatgcatggaaaatggatgggggatatatatgctatgccccatccccatcatgctgccctcccctgtgagacacagtgccctcttgtctccccgtgacacatatattcgtcgccgctaaagcatgaactgctgaagctaagctatagcccctcatgcatctgagcgaccttcaccaacctcatacccatccatccatgcattgtacgtaatgtccggccatggcgagagatcagtgtagtcagtcatgagtcagtcgtagctgatcactagctcgagtgagtcgcgtcttcgcacgccaagctgccaacccatgatgcacccctagctacaatcgccctggcccctgtccatgcatgcatgtactctcctatagtatattggaggtacatggaaactgctgttagatggacaaaattttagggcatttttgaataacatgagtggaaaaatgaggaatagaaaaaagaaacatatgattctgacaggaatgcaagtgtaaaacagatgattagaaaatacagggaaaacaaatgaatgaccgtttgatttgatagcaggaaaaacgtagaaatcagagatagactcaaaggaattttttaagaggttgaacctcttgctaactttcctccaaaatctctataggatttaggatttctcattcctactaattttaaaagataagatatgattcaatcctatcatcctatgtaaatccttcaaatttcctacacttttcctacaaattcaaaggggctgctaatagacatgcaaattaaggagatttaggttcaattaattgtttgttttctgccatccagcaaatattttatctctagagttgaataatatacaaatggttttggtcaactgtagcttaggggccgggggtgcaagcccacattgtcgcccgttgggatcgtcactctgcgccacgcctaaccgtacagaaaccttatagctaagataataatttctattctggataagataataatttctattctggatatagacctactctaaaattaagtgatttttaaattagcagttatgtttatgcatgtgtcacgctttgaggatggtctatgtcactaccgaattatagacctacctataattcggtagttcaatcatcaccgttggctcattatcactgtcaaatcgtgataagaactgtcagtgatactcaacataccagacaatatatatacctccaaatcctatatcatgtacagtaaaacaatttaatcgaattcacactaagtcattccaaaaaaaaaatacaaataagtgactatatattaaatttgttgctggaaggcatgctgactatatatagatcgcgattaaggaggagtatatggaagacgctgtagagagggaggagaagcaaggagagggttttgtgggggtatgggaattggcggcaaagatgtgtcaaagatagggatggcaaaggcgtggggcatgggcgggttggacaaggatgtccccgcccccgctccccgcgttctcccccccccctcccaactaccaaagaacatgtgaaaagtgtgggtttttccaaccggcactatgaaggcggcaccgatgagtgctccggcaccaatcccattttaaaaaccagcacctttgagaccactcgcgagccaaaaaaagctcgacatcgagctcatccaccccacatcatagaactccaaatcaatcacaatccccaatccccaatcaaccaacatcacagaacaagaaacactgaagaacatcacagaaatcattcactaatagggagggctccaccactgcctctcgtcccgccgccgggctgccaccacctccccacccgccgcctgccctccttccagatctgatggaggtagggcgccaccgcctctcgtcccgccgccgcgtcgcccctcccttccgctgccgcatgccgccgctaggccgcccctccacggccgccgctgggccgcccctccctagatttggcggagaggagggcgcggccgccaccgcagcctccgccggccacgggcaacgagagagagtcaagaggggagggtgctgccgccaggccgccagcgcctctcgtcccgccgccgcatcccccctcccttccactgccgcatgccgcctcccgccgatgacgccgctgggccacccctccccagatctggcggatgggatggcgggggctgccccgccgcctttgccggccgcgagcagtgagagagagtcgagagacgaggaagagagagacgcaagagatggaagtctgtggatgccttatctcgtcgactcattcggctcggctcaatcgccctataggtgccggtttttaatattaaaggttttgatttttttgaaaaaaaccgacacctataattgcttaaaggtgccggttttttgcgatttcaaccagcggaagtgtggaaaggcctatagatgccgattttagcacttccggcacctatagtgctgacacctatttgatgttttgtagtagtgcccggctccggccttagccccgtagagtcatccaaatggaaaacggggacccggcaggtgagcgaggcctcgcatcgggcggcaacatggagaacatggtgacatcattggatggcaacaagcacttgtttgcatggctggttgtcgacgaagggatggaggcacgcccggcaacccttccttggctgggaacgaagcaagtgacgggaaaaaggagaggacatgcggagacatccagcaaggggaacaagaagtcgatgacctggcatggagggatggaggccggaggagaggacagtagacgacgaggagggagagcgcttctcgctccaacggtgtgaccgcttctcactccaccgcttttggctcatgaatctgatgatgacttgcggcacatgtgttggggagaaatttcgggataggataaggggagagttccttcttaagcctgatgggccttattttcataacgggttatcactattgttgaatagtcccacattgcttgtggaagggcaaaggatctaagatataagtaggggagcccctcacctcataatctagctttttggggtgggaaaggccctttacgatcctataattggtatcagagcctggctagttcaacatttctggcccgagggacaaagtgtgtaaaggcctgatgaaccgtgggtgcctgcggggcccgtatacctgagggaccatggggaaatggtgaaggggcggtgaacggctaagggacaccaatgtgtgaagggggagattattgagtagtcccacattagttgaggaagggcaaaggacgtaaaatataagtgggggagcccctcacctgataggctagcttttggggtgggaaaggccctttatgatcctacaactatattttcactctataatgtaatcctaaggccccgcgggtggagatgtttccctgcccccggctccgcatgatgtcggggccctgcccccgtatcacctgcgagtagcatttcgcccccgtccctggccccgtaggggcgggtacccgcgccccccacccccaaacggggaaattgccacccctagtcaaagaggagagctaacgactattgacggtcataatagaccaatttcgactgtcaatacatccggaaataaaagagaattagcaatatttgtatgcatatttgtttaagaataatttatttccacttgtacttggcaacgtatttgtatataggcgatcttcatataaatggaggagaaacgatggaaaataatcgttcaaacaatcaaagctcgacgtgtggcagacttaatggatggatgggcccacaaacccattagaacacctgtaatttggcccaaccatcatgccactaagctaaggatccatcaagcgaagtccaggagaaaggatgtgccagcccaaggttcagccgaaaccgccaccagcgccgttcatcctggccttccacgtggacatcctaaattgcttcccaatgatgtttgcagggtgtttaggacattttcaactatcataaccatcattgagcctataaaaggatcactacatctccatttcaacacacaccaagaaggatcaatcaagaaactctctagttatttactttgttctaatgctagtggagtagaattagaatagttttcttagttcttcaagtcttctagagatttcaggtatcgctctactagctcctctctctctcttgtaagacttaattcaataatgaaatattcttctttatatagttttgttcctttacttcatttatataattattcgagtaccgactttagttcatacttgtctcgtaataattatgtagctagcttactagagatatgcaatggtattggtttggtaatcaattatttgattgttctatgtcatctgcagagatatagagtagtatgtagtaatgtaagcacaatgcttagattattagataccagtaaatggtgctatatgtacggatctatagaggtaggctgctgatggtgacatcttagtacatgtattcctccacgtgcgtatatagggctaagagattttcctagtgtgggtactcctccgtatctattaccaattggatggccatgacggataaggaactcggcaattaggcgtgatttctcgatattacaggagggcatagttaggggtattggctgcataattgtataatagaaagtgttaattaaaatgactatatactataagtacaggaattatgcttttctatttctttctccaattagcttagactattatttcagtgagagtattttggttaattctttttgtgtgtcaatcaacccttgtccttaaattgattaacccctgtattagattttgatcaacataagtgatataattgttattataatactctcttctcatatctttccttaggactaaataaaatacgatcccttggaaatacttccggatgaaatgctacagcagtatattcgagcgtttgcagattatgtctgtaactataaagaataataagtaatatttcgggcataattgtttggaattatatttctagtaattttttaagaaatattaagaacgacaaacaagaaactccttcacctgtgatttttgttgtgtgctgagctggagggaaatgatacttactaataagaaatcaacttattttaagatggaaggtgcatattaataccatgatcatatccacaaagaattgtgaactataatgaaaaaggaaggatctttcgatcttagcaattagattcacttgttaggtataggcctataatccaaaataaaaacagacaaacatgcccttagtatctcataatatctttgtgtttttttaaagaaagacacagacaagctggttttcttaaacaataagctgttgcttatgtgttctacccacgtgctcttaattatatggtgagcatggacactcttgattgtcttaggaggagtgttaaggctgtgtccgggaggtggaatttggaactccatctccccacactgaaaatgtggtggtttattaatgtataattaattaagtatcagctaaaaataacttaaaatagattaatataatttttgagacaaatttggtataaaactttttttaaaatgtaccgtttagtaatttgaaaagtgtgtacgtggaaaatgagaaagattagttgggaaatagaagaaaagaacttagagcaactccaacagtccccttatcccaatctccaagttaaattttagcaagtttgaagaaaaaaaaacactccaatagcttctctatttgactggccaagccatctagctggccaaaatggctccttggctggccaaacttggccagtttgcctgcctagccaaacttggttgctagctgtgggacccacgttgctccccacctcaatatctctttcccctctctttcaccgcacagatcgatcgtcgccgccatcatcgtcctacagcgccatcgtcatcctgcgatgtcgctggctcgcacctgcacagtcgtcgccgtctgatttcctccgtcgccgagggagctccgcgatgacgaggcaagagcgagggagggtgtgttggcgacggcgacgagggaggagcgatgatggggaagaagcggccggatccatcatcgctgtcgatggcctcctcctccggcaccactgtcgtcgtcgaggtcgccgtcaccatcccctctgcatccgtcgtcttgagggctccgctgtctcctaccccgccggattcggccggcggcgtgtaatcgccggggggtgggggtggggggcacgtgtggactccgctgcctcctcccctacgcggatggcggcgtggattcgccgggacgacgatgtgtggactctcgctgcctcctcccccgccggattcggccggcggcgtggattcgcgagggggggggacctctgccgtcgtctggccgccaacctccgcgcatccgccgtcggaccaccggccgctgaggttgccatcgccatctgccgcaccgtgctcgtcgagccattcaccgctgttgccatctagaaaaatggtgagaaaagagaaaggggaaaagtagggggtaggaatagcataggctgacatgtgggtcccatttgtcatagatttataatggagatggtagataaagagactgatggagcaagcaacgagtttaactagtcaaatcagatggagagttggctatatgggtatttggagagtgggatttggagaagctgttggagatgctcttagcctaattagcaatgctactaatgctatttaacactccctcccctctctatctccctctatcgctctctctcgtatggagtgttttggtgttgcatgctgtccctgctgtgcataggctttgttagctagcaaggcagctgcagttgtaggtggtgcagctcagctgggggctgggcatacagccccaaaacactgtccttggcccccctcctgcacagattcccccttctgccaaacccagcaaaaggttcccttgtctagctcctctcatcacacacactctctctccctctccaatgcacaagtaggagatgagtaccacatgcatcatgaccactttattcctcccttcccagagacacagatgagaacaacgctgtctcacctttcctgctctctcacctcctttaccacctccccctttgtctttttcttatcgaaaaagaaccggtactatatagggcgatatattagtataacaagaaaattataagattacaatcagtattagaaaaaacaatacagattaattaaattttaactattaaaaacttgaaaaacctagacttatctgatattttaaggtaacctttatatataaaaaagttttcatacgaaatatgttatttaacagtttaaaagaatactaatgaaaattaagataaaagaaaagaacggagtctaagcgtgagggtcgggggg

SEQ ID NO: 7032 - DNA, 15030 bp, Oryza sativa
gaaattgtacactcaatcaatctccttatacactaaaaagtaaaaacatcgatcctaacaaagtataatgttgacaattatttaagtcatcactactaggaaaactattctccaaaatgggtcttcgcagacggacgaccggtccgcctgcaggaagtaatctgaaagaactgaattatatattcgtgagatggggaagtaatctaaaatatgaatttcgaacccagccttacctaccttggttaacatagttaacattatacttaaaactaacttccaaaattctatcatggctgctgaccatccacctgttcggcaaatttcaaatccattgtcccttttgacattttgcctgccttttgacattctctccaactgaaactttgttgtctttttgaccctgttaatttgttttgtctccagatagaagtcacagattataatggatttcaacatctttccatctgtgcctgtatgcatgtgttccaatggaataatgatcatgttttcattaatctgggaacgtgcatgatgcccaagtatatcaaaagttgctgaattgggaatctgagctcttttgataaactagtttagttgattactccacttgtcttgatgcaaacaaaaagatggatcgatctaactttacttcaatattttggatgcagtagaagatattttggcacaactcctgttaatacaaaaatgatccatctcatcagcatctcaatctctatagctagcttgctagaagatgctttgctactttccctcttggcaccttttgatggaacaaaaatgcatccttttggtcaattaatgctacttcctgcatcccacgtacacattgaccactttacttgatcatggacactctctggtttttaataggtaacatcattaccttttgaatgtatgttccgtcttattttaaaaaaatataatataaaaaaaatacatgtttatggtacctttaatgataaatcaattcacaataaaattaataatacttaagtattttttaataagatgaataatcaaaagttaacaacataatatattaaaaaccgaaaaaagtattattttccaacaacggagactagaggagaggcttagaccagatagcgcaaacatggaaaaacatctaatatatgttgaaggggctgcttagaagattgattgctaaaatagcataaatattaatactatacccatgagtttcatggtttcatctttatatgaagttcccctcttaattatccccgtttcttgaaatatatggaactattttccaagcatatatgtagatatatattacatacagcctagcagtcctcattgcatggtagtaactgtatataagtagtactattattatatgtatgaagtttcacacttagaaattttactttatagtatgagctgcaataacccacattcttgctgacttcattcacttcaaaataacaaatactccaaaattccatactaaaagatatatgactatcaacagaaaattaggatggcatgttccaaaattccatatataaatatgatcatgacatggatgaatttttatcaaatattaacccaaaaaaaagaaaaatggggaaatgatgaaaccaactattattatctatcctttatattttactccctccattccatattgtaggtcgttttagttttacctaagtcaacttctctaactttaaccgagtttatctagcagcttatttactatgtcatttacacccagccggtgggataattaattttcagtggttatatgactttaccaaagcaagaaattaagcacccctaactaaaaatgtgccgacatctataataacaaataaatgtagtatcaaaacatatttcaaatggtggatttaatgaaactaatttgttgttgtagatgtctatgtatttttatattataaactcggtcagaattagagaagtttgacttaggacaaaactaaaacaagaactgagagagtatgatcctatatatgatttttcagaatatctaataattttcataagatctctaactgtttatttttgtgttccaaaacctcttatactctcttgttatgaatactagtccttgattgaggaacactttttatgtaacggttccttttttacttggcatcgaatactatctatgtacaaacattaattagccgctcgtattgtttgagaaaaatataaatattttaaaagataccaaactatcaaagcacctaattataactatactacttacattcatcaaaacattgtaatttaaaagtttttattggtcaaaaataaaatcacactggccaacagtactggcaagtaaaagagatcagagagagtgtagttccaatccttacccaggaaccaaccacatgttgaaggttggtcgaatagatggttgcaaaatagaaccatagcggagctggcccctaatctagtaaatatgatccctaaaaagattagcaagcatcctaccatagcacaaactttagaaaatcatgggtggactgctgatatcaaaggagcactcattgtctaagtcattgttgagtacttgcgagtttgggacttggtggacggggtaatcttgtaggatggcatcccagaccaacatcattggatgttcatgaggtctgaattgtacacccgtaaataagcatatgagtccttatttgttggaacaatcaagttcactccatggatttgttgaaggataaaacagagaaacaaatcaaatcaaacatttgagccaattttaatcatatctacacctacccttccacctgaaacattttacttgatacggattttacctggcttaatttcaacaaacttgctttataacccccccaccccaccccaaaagattgctttataagaatatatatgtaaacctttcaaaaagaaataagaggagtacaaaagcaaaagacctcccctccctaatgggccatgaacacatcacttgggacttgggctgctagaaagcgattgggcccaacccaagtgacacagacttggacactagtgctaaggacagccctgttgctgtcaaccacgaggcccacgttggtcctcacgtccacagaaaaacaaagcacaaaaaaacccaacccttgcgccggcgataactttgcgagcccccccgcgtggacgcggaccaccaacctcacctcctgcacccgtgcgcctcctcttctcccgctcacatgacatgcgggcccatctgagtcagcggcgtatggatcgatctggtgaacccggcgtaggtatgacgagcgaatgccacatgggtgacacagctgtggtgtggttggtcgcggcagtgaaaggagaaagaagcgagcgcatggagttcatcgggtgagcgttcttggtagtaggagattcttctccaatccgtgggagaagagctaggaggagcggaggaatccgtgtcccctcccgcggacctgcttctccggctgcccgtaagttggatttttctctgcttcgctccctcccctcctcgcgccattgtttttttcttggtcctttggctctcgggtgcgtcgccaccgcgattcgatctggggggagagggaggaggcgcaggcggagcgcacgagggaggtgggtggaggagagggtggggggcggcggcttagctgctgtggacggcagaaggggtttcttgtgttccagacaagaatcctgaggagtgagagcattacattgacatcctcatcagggctttgggtgtggaaagaagcgtataatgatgtattccttgttcagaatttactgttggttaaaaagtatatgtgcttcaacttttgaggacagggccatagggggtgaaaataagatataagtaaataacttacaaggaaacatggatgagagtgtgtaccataagcacaatttcgttttgtttcaataccaaatattttcttttaactaaatggattcattgacaataaggtatttgcttcaatatgcgttcttattacttcatatcataccacattttgtgattggggaatttcatatagtttcagatgctatgttagtttgagccatatcgtccaaccctgctcactccccctcctaaatttccattttccatgttttgttgtgcaggaaacatgctttctccctatcagcctttgtgatgcattgaacaggggttgagaagtactgtaatttttgtaatggctgggtgttccttggcaacactgagaggacaacatcgagggagatggatccaatctcacagcaagctccccacaaggattatgtctattaatctgccaaagaggtaaaaaagttttccgtactctgttgatattagtcatcttgagttcttcaatggtaatttaatgtttgattttcttcatttgcagtaatcacagtcacaagattcagcttccatgccagtccaatttaggaagaaaacagaaaactggtgcatttgctcctttgggttttcatggaaggtgttgccggatcgaaacatcagttaaatgttatttcttgcagtcgcttgtggattctgagagtatgatctcaccaaatttgttattgctttctgatgaagctctactaactatcagtatagtttttgcatatttggctggagttgtaccctctggccatgcatttcctcatgctagaaaccatagtcaaaaccaacatcttggagctccaggtccatctgattctggtaggtaagagtagctgcttaagtatgacttctagatctcaaaacattggcttgacaataaaaaatgataatgtattctttccattccaatttctagggatatgaaatggttacctgaagggaatactaggttttaccccagcgatacatggagtgaagtgagaatgaaactttcagaagccttgcaatcgaatggtcgagatgccacttcggatggcagcgatagtgaactcaagaacaatcgcaaaaattatcctttgagtatgcttgcaattcatggtggtcccaggctgcggcttcttctagctacctttcagctacttgagatggaggcaagagggccatcaactttttctttctaatatgctggggattatcatggatgaatactgaagattacccatgcatacttcacttatttttttttctaagggagagagcatacttcaaaaagcttaagcaagctggtagttgtgatattttctactaaaatggtgccactatccttctgtagagtattataatggatgaatcctgaagattgttcttgcatgtttcactagcttagttaagctttctctctttgtttttttaatgttacttgactagccactagaactatggactaaagttcagtcagtatcaagatatgtttttctttctaaccagcacagctgtataatatgtcagaacacatgtgttgattttgttgtagttaatttgatcttgtgcaggtaagaaatgttcctgaaagttctgaacttgtagatgggatcaaatggttgcaaatatcaactacgttgattgatggcttgattgaaccaacatttatgaaatggattcaagaagaaaaagcctgggagaacagcaagatcaatgaagtataccattattttcaactgtcttacatttctccatattgtcatgccttcaagtccctgatagttttcttttttcctgataaaggaacttatgaagacggtaaccagcaaaataaaggaggatgacaggatcttgaagaggttcaacagattagggaaatctgaactctatttggatctgctttatttcctgagatttggttctgcaaggtactatttatcttcacttcttgatccatatggtaccacttttttccatctgaactccatctcctgtttaagagtttaagatggcactattggttgtttattgtctgtacttatatccatatatagctatttaccaaacagtaatccttccataaggtaaatgagttcattcttatccttcatttcctgatggcaggtcttatagctattttgatgctaaatttctggctgaacatggagcgagaattttggaggacctggttattttcttagctgacgcggtcgctagtatttacatagagcttatatcagttgatggtgatatgccgactgatgttgttggttccagcttagctctatgctcgctgtcaaccagagaacttcaaagaatgcgtaacgaggtaatagttgtggataattcaaggtgttgcttgtgcttttactgttcaaatgtgcttttcaaaacttgcttgtatatacaccaaaaaataagcactttttatgctcacagtttggatttggtaagttgatgatttatagttggctttgcatgaagttagtagtctccttggagacaagccaacaaatatttaaatcctacccaagctggaaaccatatcaacagactaacagatcttgaaatattttttcttcaagtactcttattgttctcgtatggtattgtagtgttatatcatcactaattaactacgaccagccttctcaagttctcatcatgatttacgtgtaagaaatgaactgtgaacagagacgatgctgcgattctaatatactacattttgtccacatgtgtaccttctgtgtcattttctcttaaccttataagacattttgattgccaaacaaatatttttaagtgaatatcacagtacatgttacgtgaataatctaattgggcaaatatttgcactttgaactctcctctttttggttaatatttttaagtttttaggaaacatctctattccagttttttcttacttccagatttgataatccagtgctaaatttttttaaggtggcaattaatgggtggctgcaccagtattttgagtcagttgtctcaatgtacgaggacaggtttgagttatatgttttatccagaaaactttgtgaaaaaccagcagataatcaagctgaagtgacaaactggtggaggcttggatttggaaagccttccaccgttactcttctagagtacgttcacataagctcattttctcttccggtgagaaggacgaaagaattgagagctctggctggatggtattcgcaatttccttttctaccattcttttcatgaataattcatggaaacatttctgtgcgacttggggcaagatgaacataactttactctgttctgttgcaggaggtattatttcagcctattattagaaatgtcagatattgccatgcctttcataagggctgttgtcaccaaagttagtgctgcagtgtcgtacttctgggtgtccatgataggaaggtctctgggattgattttctcagggataaggcaatcacttggttggagatgatcagatgtttctttggtttttgattgtgagatcttgtgactgagcgatatttgcctcgcagtcatgtccagttttgtcaatttatataggcttttcgttgacctttttttttactgttgagatggctgacttctggtcctcgttatacatgttctgtatcacataatgtaacaaagttcattgatctgaccaaagggtgaaaattatttgttaatcttggaatgcatcatgtggtatataacattttgaaggcaaaccacacatttcaggacattatggcagaagtcagattgtctgatccaaaaacttgtacagatttatccagtctgcaccaatttgagaaaacaatatttcaaccatgagtcattcccactttctatgcaaaagcagaagcaaactgcccagtgacttgcttgggtttgctctattctatgctgtgtttagcctcttccagaagaatttttttttactattttaaatttttattatttcaccagccgcggttggtatggctgttttttcttgcctctagaaagtttttttttttgccactagtgtggccaacgtggcaaaacattactatcacgccaatcagactggtgtggcaaaataacattactatcacgccaatcagactggtgtggcaaaataacgttgacacgttagatagagcggcatggtaacattgtttcaccgtgctaacatggctaaaaggtatagatttagaaaggtttacttttaaaattaaaaattaaaaagatttaaataataataataattctacaaccagctcctccacagaccaggagacgacgatggcctaacctgtcctgcaatttgctgttcggtgaacttccactggaagagttggtgtcctgactaatctaacgacagttgatcttcccatgaacagcttcaatggcacaactccagaaagcatctacgcatgcaaacttcagtaactaatttccatacaaacttcgtagaaaacaatgaaggtgaaccagaatacttctattatactagtagtactcgtagatagcactatagcagtacaacacacaagcaagtccatgaaggctcagcctttactaggaagttgaaggctcaaagtttgttcaaccttgcaaacgcaagcgcattccagcagcagcacgcaacacatggttatttagatctgcatcggttacactttcagtattgatccaactaaccatctcaaggaaacataaaaagagtagaatgtaaccaacaaaacacaggtcaatctttcaattgctgtgaaggccaagaacagtcaacagtcgcgagttggggacgaattcaaaatgcaactgctggataggttgttaagatcagcagcagtgtacgtcatacaaaaatagataaatcaaaggaaatcagtgtaggcttatagactttggaccatgactctgcttcaggagtgaaggaatggaagtttaacaaatcatctcaagtagactagtgtgtctcaagtggccaagtgtatggataaatatactttttaagtgcaagtatttccgtcaaacaatgtgagtctaacacatcatgctgaaagcaaataatagatcgaatttacaaaccatacctaagcatagcactaagccagtgagaggcagcagtagcaaacgcgtaggtcaacattccatcagcttattgttcttcgcctgtttggtgcgtttaggcaatgctattctttctctctgcaaggaatttagcaatgttattcgacaatatatagctcaaggactgtattttttttgcacaggataccagcttatattggcaaaccatgctcagtagcctgccagtttctgacagaaatactgaccaagaagccaaatcacatccttcatgcaaacaaagccagcagttttcgcatgaatttctttcaccttgcgcttgtgctactgccgctgagcttcatctgtcctcccgtcggttcatgcattgagcaggagaggctaaccctcctccggttcctcgcggagctgtcaccgccacatgataatggcctcgctgcgtcatggaggaataggaccgactgctgtacctgggaagggatcatctgtgatgtggatggtgcagtaaccaagatcttgctggcctcaagaggccttgaagggcgcatctcgtcatccctgagcgagctcaccagcttgtcgcggctcaacctgtcatacaactcactctccggtgggcttccgccagagctgatattctctggcagcatcgttgtcctcgatgtcagcttcaaccgcctcggcggggaactacaagaggtagactcatcatcatctgattggccactccaggtactgaatatctcaagtaatctgtttactggagcatttccatccaccacatgggagaaaatgagcaacctagtagcgatcaatgcaagcaacaacagcttcactgggcacataccttcctctttctgcatcagctcactatcctttgctgctcttgacctttgctacaaccaattcagtggcgaaatccccgctgggataggtaaatgctctgcacttagaatgctcaaagctggccacaacaacattagtggggccctcccggatgatctcttccatgccacatcattggagtacctctcttttcctaacaatggtttgcaaggaacaattaagcttgtgataaagctcagtaatctagtttttcttgatcttggggggaacagtttcagtggcaaggtcccagaatctataggcgagctcaagaaactggaggagcttcgcatggaccataactacatatctggggagctgccatcaaccttggccaattgcacaaatctagcagccatcgtcctcgtgagcaacaaattcacaggagaccttgctaaggttaacttctccaacctaccaaatctgaaaactttagatctttgcacgaattacttcaccggcacaattccagcaagtatctactcatgcagtaatttaacttggttgcggttatctttcaataagcttcacggtcagttgccagaggagacagaaaagttgaaatcccttacctttgtatctctttcgtacaactactttaccaatatcacaggtgcacttcatatactcaagagcttaaggaacctcactaccttgctaattgggggcaatttcatgcatgaaactattcacaggatgaaacaattcatggtcttgagaatcttcaggttcttggcataaatgattgtgcactgactggaaaaatacctagttggctctcaaagctaaaaaaattggaacttctacttttatacaacaatcaacttagtggaccaataccaacctggatcaagagcctaaactaccttaagtatgtagacttatccaataatagccttataggggaaataccaacatcactaacagagatgccaatgctaagatcagacaagattgcggatcactcaaacccaagactctttcggatgccagtttttgtggctccatctcttcagtaccatacggctaatgcattccctaaaatgttgaatctaggtaacaacaaattcagtggtgtgatccccatggagattggtcagttgaaagcgctcctctcactcaacttgagcttcaacaacttacatggggagatcccgcaatcggccagcaacctcaagaatctgatggtgctagacctgtcttccaaccatctgacaggtgcaatcccttcgtcactggcgaacttgcactttctttctaacttcaacatttcttacaatgaccttgaagggcctgtaccaactataggccagttcagcacatttccaacttccagttttgctgggaacccgaagctatgcagccctatgcttttgcaccgctgcaattcagcaggagcagctccagtctccacaatccccacaaagcagtacattgacaagtttgtcttcgcaattgcatttggcatgttctttggagtaggagtgctatatgatcaaattgttgtgtccagattctttggctaaaccagacaataatttgtgctggcttgtactgttgtacattacgcaatgggtcacagaattgaaataagcaaccaacagccgactttctaattaatataaccatctccaggattccaaccgtgtaggatatggtcgatgagtcggtggaaacatagtaaactgaaatcatagattccaactgtgtcatatggactatggtcgacgagtttgtggaagcatagtaaactgaaatcatagttaaaagaactgtgtccatattgtgtggggatgtcaatgcttaccgatataatctatactaaatactatatacggaatattttttctgcaatttgcaacaaggtatagttaattaggaaaaactgggtgatggttccttttttacttaaaataggacacttcttttttatataaaacgtcagtaacagcctgaccgattgaaaaaaaattacaattaattatggaaaattggggttacgttttctcattaaaatgagacacttctctatataaaacgttgataacgcactgaccgttcgaaaaaaaattgcaacaaggtgaccgtaaatctgcaactgacaactagatctctgcaaaactagagaacaaaaaaacatgtaagtggaaactaccgaagctcacacgagcacaatcccaagatcggtaaaacgaacatgatgattctttcacaagagctttgcagctagccttgattgatttacctcaggagaagagcgagcgagcatagcccacgaactcacaggagtcgcaggatgcgaccctcgggccttggccctgcgccgatccgatcccatcccatccgatcgccatgcctgccgagcgccgccgagcgccggccgcccgcttcctttcgttggacggtgggagcggcggctactggcgaggatgccggagttccaggagatcggcataggtgggccttcaacatgtgggcctaagcagtctgggctgggcaacgggtggacaagaatgaatgaagtgcattttgattccctacccagtggattcgtatccctgaagcgtaagaaatctttttcagaaattattttatggtgttttaacgctctcaactgaattttcatatatgatatgaacacgcttaagtaatgtcaagtatttttgaaatattttttcatatgatttctttgtgatgtttcattcgttggggcttaattatacagtggttgttgttgttgcagtcagtattttctaaatgttacatttttctccccttcaaaaaaaaatgttatatttttctaaaacattttagaaacttaattgaaacatttgagtaagtaatgaaacaattttttataggtagtgaaacaatttcatgtaatataatattttatcaaaacataatcaagtgagatcttattataaatatttaatcgcaacgagaataatggtttaatcaaattataaattagatgagtattaatagatgcatgtatgcaggctcggtgggagtgggacgctcaattttttctctaagcattgtccaaataatttattaaatcttatcttactacaaacttataacccactaaattctaaagctcaaaatgcaaagatgtaacatcatcgtcctcgactaataattattacatttaaacatcatgcaagcattctatatcaactataattttatattgaattttagagctttaaaatgcatgaatgttaaattatcatcctacataattcttatcatatcttactataaagttatcccccactaactccttaagcttaacatgcaaagataccacatcatcatccactaacaagatgtcacatcatcatccactaattaacaagataccacatcatcatccactaacaatcatcacatttaaacatcatgcaatcatgctatatctttatagtttttataatttaagagcttttcaaatacaaacatgtgaaattatcatccaacataattcatataatgtttcaatgtatatctttattatgttttatgatatcctatatacttatatagttcatcctcacttagttagtgcttaaatgattaatctatggtccaaattatctttctctttttttcctctaattaagttatatcatatcaattgtttttagcctttagatgattaatctacggtccaaactatctccctacttttcttcttccataaagtcataccatcttactttttacgtttgaatcaccattttacatactatttaaatttaaattatcatagaccacattaatttacttaatctgatgttatctagctatcttacacatttttttttattgttatcatactaaattcccacagcaatgcgcggggtttcacctagtattactataaagttataatccactaaattctaaagctctacatgcaaagatgacacatcatcctccactaataattgttatatttaaacatcatgcaagcatgctatattatctataattttataattattgaattttagagctttaaaatgcaagaatgttaaatcatcatcccacacattctatatagttcatcctcacttaggtaatattaattttctcttctctcattaagccatattatcttaattgtttttacccttagatgattaatttatggtccaaattatctctctctttttcttctctcataaagccatagtgccttacttttacattgaatcatcattctatatactatttaaatttaaattatcataaaccatatcaagttatgtaagcttatgttatcatacacatacttattattatcatagtaaactctcacagtaacgtggggggtttcaccttgtaatatgagaaaaatacagaaggtgtgacaacatcatccgcaagagaatgccatgcatgatttttcgatatggaaggaagagaaagaggatagaagaactccgtttaccagaaggtataatagacagcttaatcatgtataccattctaggtaaaatctatagaatcgaatcatcaatgatacatatctgttatttcagataactagcacaacctgttgtaaaaccactgttcatgcccttgctaactcagattttctgaaccaaaagaactagtgtagatagctaaaccaaaaaaaaaaaaaaagcgttaaagaatgtgttacatacttacattgctttgccacctttatttctttttatttacaaggcaggtggcaaaacgaaagaatattatgaacacaaaaacctacaatacaccactaacttacaaacaaaattgtccagcaatggttcgaatttgacgggtgtatcacaaggtttctgcaacgaacagaaaaacgatggttagatggttcacaaaatcttctgagaaagaactaacaaaaacaagactgaaaatctacaagatctgtgacaactatagcatatatatatacttgccaaggactgcacataacattgaaaatgtcggaattcttgatggcatgcagaaacacatgaaactacagaaactaaattataatatttcaatatgtatataaagcagcctaaatctcctttcttagcacattgggaaacaaataaaagtaccaaaagattatggtaccatttctcatttagtagtacaaggtgatgcaa

SEQ ID NO: 7033 - DNA, 41743 bp, Oryza sativa
  unsure (1)..(41743): unsure at all n locations
cccccccctccgcccccacgctgtctccgccactgtctggaggtagtgcttcgacgtgctgcgagggtccagcgcatacagccgccggccgtcgacgggcaccatgatgcccagcatcagcgtcgttgttgggcgagggccagtggccataaacgacgtccctgtgtcgtacatgaagacgggagaatcctcatggaaggcatgcgtggcgatgacgatcttgctgccgaccgcgaccatggccaggaaggagcggtccaccggcacctctatgtggacggcgactggctaagaaaggtggtggaacatggctacgccagtgccggcgccggaatcggtgaactcgtcgatgtccagcttgtggatgacgtatcccatgtcccaatcaagcaccatgtagaggtgtttatcatcgtccctccaccgcgaccttttactggacgtggcgatgttgctgctgtgttgatcccacaacgatcgcttggagctcaacatcgtatcttcctctgcatgccctatattttttagaacatatcaacttgcattgatccggcttttgggagaaagccgaaaggactacaggaacagagtcttacacaaaacgaaaagaaaaacacgaacatactacattattgctgtgaggaaaaagtacgaattatcccccccaaactatcgtggtcatccgaattacccccctgaatcacaaaaccggacattcttcacccctaactatgcaaaccggacgaattacccccctcaacccaatccacggtggttttggtctacgtggcgtacgcgtggcagtccagtcagcaatttatttatttaaaaaatatgggacccacttgtcatactcctatttcactttttttctctctcttccctctctctcactcttcctctctctctcttctctcactctgtctcacgcgcacagcggcaggcggggggcggcgagcggcggcggcggcgggagctcgcgctgctcgagcgaggctaggcggcgacggcggaggaggcgagcggcgggaaggacggaggcgagcgttgggggatgaggcggcaagcggcggcgagggagagggagctcgcgctgctcgagcgaagcgaggcggcggcgggcatcgtccagcgcgcgctccgtcgccgcggcttcctcgcgcgcccgcttccgcgccgcgtccgccttctccagcgcgcgcctcacctcttcccgctgctcctcctcctcccctcctgctgccgcggccacggcgccgccgtcggatgccgcgacgacgacgacggcggggccgatgaagagctgcagcttcgtcgtcgtcatcgtcgtcgcgtgttgctcgtgggaggaggagccggtggtcgtggagttggacgagaacgcggtggccaacgacgccgtggtggacgccgggaggagctgcagctcaggcggcagcggcggatgatgatgatgatgccgcagcgccgcgggacggatgaccggcagcgtcgtcaccacgggcacgacctcgccgcgcacccgtccagagttacacgcatcctggtgctctatgaagctctccaccctgcaaccacacgcacacaaccacccccaaaccaaaccaccgccattagcgcacactaaccataccacttaacctccatctcatcaccaaacacaacaaaaatacggcaatcgatccgatcgactgatcgatcatctgtacatgtagatcgatcgaaagcaacgcatcgatcgaacacgacacacactgaccgatcacctcgtcccctctccgccgcctcgcctcctccgctgccgcctcgcctcgctcgagcagtgcgagctcccaccgccgccttgcctcgccgccgccgctgcaccccgccgcagctcgccgcctcatccctcgctggcgctcgccgccccccgcctgccgctgtgtacatgagacggagagggagaggagagagagagaggaagagtgagagagagaagagagagaaaggggaaaagtgcaataagagtacgacagatggggcccaactattttttaataaataaattgctgactggattgccacgcgtacgccacgtagaccaaaaccaccgctgattgggtcgaggagggtaattcatccagtttgcatagttgggggtgaagaatgtccggttttgtggttaggggggtaattcggactaccgcgatagttgggagggggggtaattcgtacttttctcttgctaggaacatccagctttctagacacagcacactacaggaacatcatccaaatagaacccttctggagttggaccaaactagatacaagcaaaacaacttagatagacgatggtagatgttgtggtttcagttgaaccaacttccctagcacagcttcatgccacccacccaagattgctctttcttcctctcttaacagcacactccacttctgagagaaagacagagctttgtaagccacctgcaagtgtgatttcaccaagatattgttaaaaacccaatcattcctagttagccaaatagcccaacagaagctagccatcatcagcaactaaaccctagattccttgtcacacctcactagcccaaaacaatcccacaaagatcctggtaaggaattcaagtttatagccaccttaagcacacaccaggaaaaaacagctaaagagcaacgaaagatagcatggttagtatttttagtttgtaaacagagtttacagaactcatttcctccttccaattccttttcaccaattgctcagcacaggggagtctccctctcccaactagatacaaaaaaatgttttatatttagaggaattctacctttccaaactgcccccatttaataccccaaaagttaaaattttgtacattgattttgtggtgaacacctctttttcagtatgaggccaacagacattgtctttatcagtccccatctgagcttccccaattaactctacaagttccccaacctctaaatttcttctaaactccaagctccattctccttgtaccaccatatccttgacagtagcattttgatcatgaataatttcaaagagatcaggaaatctaactttcaaaggtacattataacaccaaacatcattccaaaaactcacatctcttccattgtgcacttcctttgtgactagcctggaaagccactctttgcatttcaacaaacccatccaaaatttgagagccaccactcccattccttgtgaaaaaattacaatttctctaatatttccttctcagtacctccaagcaaacatcaggtgctccactttccaattttcataacccatttactgagtaagtaaagattcattgctctagtatccaaaaagcccattgccccaaactctttgggcctgcacagagtatcccatcttatcatatgatatttatttttttccccaaccccgccagtaaaagttccccctaattgtgtccattttttggtgaaacccctcaagcaaaaggtagaaacccatagcatacatgggtgcactagacaaacatgagttaatcttgatctccctgccaccataagtcatgtaaccactcttccaagactaaagtctcttctcaactttctgaaagattggagatatgtctctcatcccaattctgtcaaccctgtcacgcccggaaaaataccttttccagaacgctagtgtattaatccccgtcccaggaaaagccggggtacaccacacaaacatgatataaaagacacatcattattatatcgataatatttacattattacaaaggcacttcaggcctgacaaaaaaaataaacagcagcggactagcgggcctacggctccatattcataggcgctcaactggggaataagccaggactccacctaatacttcttctccaaagctccacttactgaggggggggaggtagagcaagaatgagcacaaccacagtactcagcaagccacactggcagatgcatgattaatgcaagggggtacaaggggaaatagtataggggttaagctttgcagaaaacagcatttaaaagtcacttagttgcccaaagctattttgtaaacacgatcctagagctacacaatattattaatcaaggccgtggacccacacgaacctgccttaacccaaggcctacgataattcagaccgaactggcaacccgacctgagtcccagctcgtcccaagccaacccaggccaacctttccatattttagttgttaagcaaattttaagaattaaaccactaacttgggtacattgctaggcttgcccatatccgagggcacggctattcgaatagattttactctgatcagaggtgtacatctttacccacaagacacatctttactccgcattccatggccttggaacccgtcgtaaacatgtgacataacccttcacccatcctagctgtgaacaaaagtaccgacccaaccctgcctacggccgttatcccggacagacaggccaggattgagcccctagcaacaggatctagaccgggtgcgccacacacataggggtgagaccacccgcgtactagtccagtgccatggcatctcgactaacgggcaacgacccgtgtagccttcatttgcctagacatctcgattaccaagccgtagctcgcgtagccttcatttgcctcagagatatccatcgtcgtaacgacttcatctatctctatttgtgtccttttgttcaggactagactgagcaccgagttaagccttacccattagacatgtggttagtacggtagtgctttgcaacagaggcccgaagaccggtccttatggtggtcgaggtgctcctagcaaaaccatgcacctcgagcccagcctaaaaccatttgggagtttgaatagagggggaggtgtgtgttcaattccatcacaagccaaccattccataatgtccaaatgatatgagaactcccaaagtctaaagttataaaaccatctagtgtggcctaattaatcagcgaagcatctacctaaattcatactagtggaaccattaatacagtacccactagttggggttttgttttttctagggtaagcgaggtgataataaacaatagtaatgataaagctataacaaggattaataggtattgctaaataaaacagtgataacgcgggaatttaaataaagcaataatgcaataatttaaatcaaaataattttataaactgggattcaatatgctcaaggatgatgcgacttgccttgctcagagagaatggccttccgaaccttcagcgacgaccgcgaaccatgcttcgggaacctttgaaacaacagaagctacgcgaagcacacaagcaaagctacaagcctataaagaagcaataacaatacataaaaggaaagcacagggttctttaggttataacaaacattaagagacttgaacaggtcgattcggggttcgtatgaccaagacatggtcatccgaagtttaatgttgttatatggagatttgcggattattataattaggctttgcaactataaaacatgtgtaagcgctagcctagaaaagataggaaggctgcgccgttgacatgtggaccccacatgtcaacctaaaggaccatggtggaccgggtacatagagacggttcacgggtcgacggaagcggaccccatgtgtcaaccgaggcgagtggccgacaaacggactccactagacaccacgcgggctgcacacgtggaaaccacgcggctaccgagcgggcacactaacacgaacactacacggtcaccacccgcgcacgcgaacaactgccgacaccgatgcacgggtaccggggccgacaaccgcacaacgggcacggtggcaacaccgaaaggacaagggcggacagcgaaggagggatccttaccaccatgcgacgtggcatgggaacgacgacgacgaacgggcgcggcggagacggctcggggacgatggaggagaacggcgagggaacgacttcggcggcgatccttggatgaagacgagacacgaccggcatagggcttgacgacgcggagccgaggacgaggatgacaacggggctgcagcagctcacttgacggaacgcggacggcggacgagaacgacttgacggaggacgaacgccacgacgagcgcgaccgggaacgacgagaggacgacgacgaagaccggcggggttcggatggagaggaggcgaggccgaggacgaccttcccactgcgatgccgaaggtggagatggcgacgtcggctggcgcactggcacggtggaaggggctaccaaagtgggtgccgacgtgaccgaaggaggggcagcgtggacgacggcattccggcgaatccgagggcaagccggggtggaggtcgatgcggcgacgtcgtgggaggagacggcgacgtcagctggcgctctggcgacgaacagcagccggccggagacggtgtagtggcggcaatgccactggacgccggcgggaacgcgcctccggtgctctctccgctaaacgggggacagcccgggggagaggaggcggctaagatgccgcgggtggcgacggcacggacggccggcgcacaggcacaacggtataaacggctgtaagtggccggcggtgcaggagagagatgagggtgatggggagaggtggtgcggccacggggagacgtgggaggaggctaaaacgagagaacggaggaaggggatcccattttatagcggaggggagctagacgggcacaggagagggcggaacggcgctgagaatggcggccggcggccatggaaggtggccggggatggcgcggctgttacgggcgactgagggcatgaattaagggggaaattagggggaatgagagaggaaggaaaggggattcattccccctaatcaatttggaaagagccggcttgaatggggcgaatttgagggaggaacggcgctagggttcacgggagagagaggaggagctgggcgggaggaggacgacgaccgggtgggacccaccggtccgcgcggtcagcgcgcgtgcggcgcgtgtgcgcgggagggctgcagctcggcttgggccagggcaggtcaaggcgggaggaggataggagggagtgggccgggaaggagaggaggagggagtgggccggggaggagaggaggcccgagagaggagggacaagggaggagagaaagactttgggctgaactcggcccaaaggaggaaggaggattatttttagctttcttttaaatataataaactttcttaattgttgttgttgcttaataattatttccggtgctctgaaaattcaagtaaaatttgagtgctctttttagaccaaagagaatttaacaaaaattctccgggccacattcgaatttttcttgcacgtattttagtgtttgccaatttcttttcgaattttaattaattctattattccttttagaaaatgatttttatttcgggatgaatttatcaggacgtgacaaacccccataggcaaactcaagtatgtgaaaggcatcataccaatcttacagttcaacatattagcaattcttaatccctcattatcctccacccctatgacatatacatcacttttctgataattaatcttcatccctaatatctcttcaaagcagaataataacttaagggcaaatatgttctcatcggaattcttaagggcaaatgtgtattgaaggtgagtcaaacccccatccactaagtttggaaccagaccttcaaggactcccctttgtttggttttatccaaaatggcagccaaggcgtcacccacaagattgaaaaggataggagacaaggggtctccttgcctcaaacccctgtaaggcgtcaccattgatgttaatacttactctcccaccttctgttatcttttttatccatcccatcattatggagtcaaaattctttttgtccatgacctcatacaaaaaatcccatttcatcctatcataagccttctcaaagtcaattttgaggataatcccagtatcccttttaattttcagctcaagcatcacctcatgtaaaataacacaaccttctaaaatattccttccaggtataaaggcagtttgagaccaactaatcactttgtttgccacttcagtcatcctaaaattcatagcctttgtaagaattttaagaatcacattttttagactgatgggtctatactgtttgattgtgtttgcatccctgatttttggcaaaagagaaatcaccccataattgatcctatctatgtccagctcatccatgtgtaagtcatctgacatctctttaactaaaacccttatatgaggccacacttgtttataaaaacccatagggaatccatcaaggccaggagttgtattgtttttcatagtcttcatcacattgtccacttaatctaaagagaagggtctaaccatccaaactttttcctccccagtcaatctcagcttatcttgccagatttcaggacttagatgaacttccctacttttttcttttccaaacaaccccttataatatgcatagatgtgctgtttaatttgtgagagctctatgatattaacatcccttcttgcagagagaagatatggcttttcctttttcttgatttgcagccttatggaaaaaggttgtattagcatctccttgtaaaatccaagtttcccctcctcttctctgtcaccagatctgctactgaatgtaaatgttttccagcttcttttccatctcatatctgatttttcattcaatttcaaaaagtccactgtcatctgcttatccagctgtaccaaagcattctccaattccttcttcctcttcttttggacactatttacattagcactccatcccctcagccatctcctcaaaaaccctaaaccctttattgtttcttgcaaacatatcatatcaattctttgttcaaaaattaactccctaagctttctttgtcgccctaatccctctcacattctaaaaaaatctcatgatttactttttttttcctccccttctttttctgctcagatcctatgtattctttagtctttgatttttattggatcactccaccttccctgcagaatcctctccttgcctccttcctctttaaccatcccttcaacatcatcactaatctcaacaaactcagatgctcattgcacttactctgttccgcagcaaacaacatagctttgcttcttctctaacacaaacgactgtcaaatttgtctcaatctcacactcatttctctccaacacaatattacttatattgacaatatcaactaaaacatctctattaactgaattgaaaatggcaaaagagttagacatacctgtgttcaaattgacttcagattttctcaattcagctttcaattgcaccggcacttctatgtccctcaccctcagtccctgtcttataacctgtttagttcccaaaatactttttttttgtgtccagttcctgacccacaatatttatcccacttgttcagacttactaacatcctacctgccctatttgcgtgcgaataaatgaataataattggtggatttcgagcatttgattttggagggttcacggcagcctggttaaccttgagatgactcggatttcagaatcctaatcagtcgcggaattaagatgtgatgtgcttacatgaacatgaacgctggacgggccgtgccgcgaataaacgaataataatcggcgaatttcgggcgtttgattttgtagggttcccggcagcctgattaatttgagatgactcggatttcggaatcctaatcagtcgcagaataaggacgggatgtgcttccatgaacatgaacgctggacgggccgtgccgccgcaagccctctccgcgagaggctcccgcgcgcacgtggtatattaggtcttgtaggctggtttgggctgcatgtcagcgagacggataggccgtatgatagcgttatgagtgagcccgttgatgggagagtatcgggcttctttcatatgtgttattgccccctcttttgaggataattttcatatttcttttgcttgcacatctttttttaaaactgttttgcttgcacatctgagttgtctgagatgcgggtgagcactgtgatattattggggcaccatcataattgtaccttagactattttcgaatcaaggggatgagaacctcaccttccacatagaaaacatattaacgcagtattaattaagtaccgttgagtagtttgagaagcatacgcacaaaagtcgagagtgtgaaagttgtgaaagtatagttccaaataaaacctgaatattgcttataattctttgttgataatttgatatataagtatgatactatgtcttagtacaatgggaaagtattatgtgatacttaactagtatggaagtttttacatagggaaatttaactattcgctactattaggtttgccaattaaaattgacgcggcagccctctctttcctggctgcagcggcggaggagtaggaaagggagccaagtacgggagacggagatggcgtaggtcagtaccgaccagcggattctccaaggaagagcgtggcgagctcagcgcctccagcgatagagttgtcagcagcagcggagccgcccacgtcatcttagggtggctggggagggaggaacgccgcgtcggccgactggagtccgtggttgccatggagcatggcgaggcggaggtcggatttgcggcggcgcttggctcctcctcccatggtgtgctggcgagggaggccgcgttgcgctgctctgtctcgacggcggcgccacccaccaactcgtagctgtagaggcactcgtcgaggactttgaccaccgttggcgcaaacgatgcgagcacggcttcgcacgtccgatccagcgtgtaaatgctcgtccttgaccgcggcgtcacttggctcctcctttacctctgccgcgagccgtcgcaccgccgccgccgctgggaaagagagggttgccgcgtcgatttttaatactgccggaggcagagaggaagggagacttgtgagactgacaagtgcatcccacgtcgctttttacactacattgccacgttggcatcccagatgggcagaagtggtaaaaagataagaagccaccatcttagagaggcaaaaaaaaaaaaagagagcaaatctaaatctaaaagaggtatttggataattgacaaacctaatagtgtcaaatagttaaatttcccttttacataagggtcaacataaaaaaaattacttacctccgttccaaaataattacatttctaaatcgaaaaggctaacgggcgatcgatcgttgccagcgatcgttttttcctcttttagtaagtttatacacctaaagtttacacatctaaagtttatccacctaaagtttgtgaagcgaatgtttataagtcaaaagtttatggcaaaatttgccataggacacacaaaaaacgtgtaattagctgggagacaccgcgaaaacatgacacggctgatggacgctacaaaaaatgtataattggctgtagaacactagttgtattattttattatttctaggtcaaaagaggtgggatattttcctaaatgcccggattgcccttctctttccttcgttttctcctaagaaaggaaggcgcgtggtgggcagggttcaatctatcgagaaggggaagattttcgggggtttatcaaattccgaaattgcggaaatctgggagaaatttcgaacaaattttcaaacaaatctttgaattcaaacaacgaaattaaagattgtgatctagatcagaagatgagcatggagtccatccaatccaaagtagagacaggagaatgagacagtcacacgcaagccccaaggatgggaggcttgtgtcctccctgtcgtcggcgcgcctaagaggcacggagtcactggcggacactccagtcatgctaggcccgcgtcgtcgtcgtcagagtcaccccgaagagccggggagcccaccggtggccactccagcctcgggaggcccgcgcggtttgagtcgttggcgcgccacggagcgccgtcgccggctactccagccacaccgctgccgccggatccgcggtcggcgtcgccggcggtcgctagcgtcggaaggatggcgacctcttgactactggggcgagctgttggaggaggacgacgaagcaaagctgagccagccttcgctaataagtgaggaattcagggattttgaccgtgaaccctcgccccactacgcacgtgaaaacgaaggaaagagaagggggtaatctggtcatttaggaaaatatctcacctcttttgacccagaaataacaaaataatgcgaccagtgttctccagccaataacataatttttgtagtgtccatcagctatgtcacgttttcatggtgtctcccagctaattacatgttttttgcgtgtcctgtagcaaattttgccaaagtttatatacccgattcaaattcaaatttgaattcaaatattttatattttcctcttttagtaagtttatacacctaaagtttacacatataaagtttatccacctaaagtttgtagagcgaatgtttataagtcaaaagcttacatacacgatttaaattcaaatccggattcaaatattttatatataaaatatttctatagataaagtttatgcgtataaagtttatgcgtgtaaagtttacggtataaactctatgcacatgaatgagagtattattttttttattaactttgtgttttttttatttttacgatgaaaggaaagaatagagaggagtatccgctgataatagagacagattagcaacaaacacagtaaccctatttactaacgacactgcatacacacatttcgtacgtacacttgactaaaagtaatattgagacaataaactcagctaattactattattaaacttgattaaaggaaaattggatcccactttggtagaaatactccctccatcccataatataagggattgtgacatattgacctaaaatcccttatattataggacggatggagtattttttttaataaaatttgaatggtaaaaatgtaattattctagaacggaggtagtatattacacaattatttcacgctcgctctctatctaaaccgtcgcgctcgcgcatgtacaaacaatggcaggttgtaactttttttttgatatgggccttgtttagtttcatatgctaaattttattttaagtatgcggacacatatttaaagtattaaacatatactaataataaaataaattatagattttgcatgtaaactgcgagacaaatttattacgcctaattaatccgtcattagtaaatgtttactgtatgtgtatttagatcctaaaaaaatttgtcaaaaaatatcacatcaaatgtttggacacatgcataaagcattaaatgtgaacgaaaaaaacaattacacaatttgcatgtaaattgtgagacgaatcttttgagcatagttgcgctatgatttgacaatgtgatgctacaataaacatattctaatgatggattaattaggcttaataaattcgtctcgcagtttacaggcggaatctgtaatttgttttgttattagtctatgtttaatacttcaaatgtgtatccgtatacttaaaaaaaattagccaaagaactaaacacggcctgtagcaccacattatcaaatcatggcgtaattaggctcaaaagattcgtttcgcaatttatatgcaaactgtgtaattggttttttttcatccacatttaatacttcatgcatatgtctaaatatttgatatgatgaaatttttggatgtttgaagggaactaaacacttccatacgcaggttgtaacttgtgagtgcttgaggaaaacatgagaggaagaaacaaaaagaactactggcgagtagagaaggtcgctcggtggcaggtatttgaggccgtgatgcagacgaattgaagtgacgtggaaccgacgcagcaaccactctatcggtatatccatctcatcactccatcagcatcaaagctcttggcaaaaccagcactcctgcctgtccaaccaccagagaatattcttcctcgtacatccgccacgtcacgtgatcctcccctgtgtcttctagatctatcaacagattgagcaaatggcttacaaattcacatatctcctctcgtggtaaggttttcctcagcattttcgtcgtgccaactggaagattaagacaggctcaacagccctatcatgttcttaaaaaaaaacagccctatcattgcatttgtagcgtggataagcaataatggtgaacattagacatgattaatttagcgaaatgacgaaatgggtagattatttggcgccatctaactagttaccagctatgcatcgacaccgtagatgtgaaaaaacacgcaccaaatgtctagatcgatatcgaccaactcaccaccgaacagtcagaatcaaaagccatctcttaccttctctcctctccctaaagaaaaggccatccttttactagtgtccttgctttttgcgatggcatccatccataatccatttatccaaagtcaatgcgacgccaggaggcgacagacacgagcgcgcatcgacctggcactggcacaccacaggacaggagcccaggaagctacctataccttgctagcttggcgtcttggcgaaacacccccttgttggatcaatctgctgtgctggtggtgagtcagagttaagagttctaaaaaaaaaaagagagtcaaagttaagagatcgaccaagtcgctaaacaaatgcaggataagacgagcacctcagcatgagccgtcgtcctaatttgcaatcacctgcatttcatcttctactactatcagatccaaccaaacaagcaagggcatcagatattcagatcagtatatcgatcaggggcaatggacaatgcgctgatgcatgtgattccacttagtcatgcgagttaaccaaccggccgtgtgcgcaataatggattaaacaagtactagtaacaggagatttgtggcctagttgcctgaatttatgcgtgacgcgtctcccattattggactacttgacgatgatttattgttaagttgacgtgtaaaattattactgtaaactgccttttctgtaatctttatcagtcgatctctgtctctctctccgtcctgccgtacgtggtttcagaaaaaaaggaaggttgttgttgctatgctggatatacaggattagtcatgaaatgaaggggagttgcaagtgttgatcaattagtgtgtcgaaccaaatcaaccatgtcatcagcagttcttgtcttctaaggccagtcacaatgggggtttcactggtgtgtcatgcacatttaataggggtaagactgaataaaaaatgattatttgcatgaaatggggatgagagagaaggaaagagtttcatcctggtgaaactcgtcagcgtcgtttccaagtcctcggtaacagagtgaaacccccgttgaggccgattcgtttcattcaccggatctcttgcgtccgcctccgccgtgcgacctctgcattctcccgcgccgcgccggattttgggtacaaatgatcccagcaacttgtatcaattaaatgctttgcttagtcttggaaacgtcaaagtgaaacccctccactgtggggattgtttcataaaagatttcatttgagagaagatggtataatattttgggtagccgtgcaatgacactagccattgtgactggcctaaagaattttcctcgttaattaatcaaattaattaacccggctgtacttagtcgagtgttagcccaagccattctcagccagctagtcctttttctcctttttttttttcaaaataaatagtgctgtttgtacgtgctatggctgttttgaggaataagctgctattaattcacgtcttttatatgaaatgaactcgtgattctatttccaagagatattgcgttctcgcgcgtgttgatctgacagcagcattgacccctcagtataatgcagtttttttatataaagaatcggatgcaactaccaacaatggacaattggacataatcactaaactaaaggaggatcactcctgctaccacatggacaataaacaaattaaaacggcactgaaataccgaattcagctacacacgaaagaagaaaatatctactctagtagcaacttgcaagctttaattccttctcccttaattaacccttcccctttatatatatatatatatatatatatatatatatatatataaactgaaacttgcaatctcctctgcacatattctcagggttcagcctaaataaaaccgagaaaagaaggtgctcctttgtgctctcgtgatgaatctgtcgtgtccatcacgtatagcaggaataaaccaatcgtcttatcctttaacccgtcgtggaacagaatcacgatttcttctttattggacaaacagaatcgcatacgaagtgacgacgaaaagcggaaccaccagaacgatcgatgcatccgcatgatgtggctgatacgaatgatatcacttgacacactcgaccaacggctagctaggcagcgagcggcgatcgacgagcgcgcgcaagcaacggcacagacgcacgcacgcgttgcgcgggcggatgctgcaggagttcgctgcagattgggcgggcgaagccgtggtaaaagctagtactacccaccagctgttccaaaccatctggacgacaccacttgtcaagttgtattgccacgatggcggctttgaacgattgcacgtacgcgaacgcacaacgtcgactcgggctctgttagttttcacgtaaaaacttttcactatgtgacattgaatgtttagacacatgcatagagtattcaatataaaaaagacataattacatagattgtgtgtaaattgcgagacggattttttaagcctaattgctccatgatttgacaatgtggtgctacagtaaacatttgctaatgatggattaattagacttaataaatttatctcgcagtttacagacggaatctataatttattttattattagtctatatttaatacttcaaatatatgttcatatatctgatgtgacacgtcaaaaattttcacctaacatctgtatgaacacagaacacagcctcggtcaaagagaaaaaacgaggcacggagggtaaaaaaggaaaaggggaaaaatcgtggcagaaaggacaggtgaaaaaacggaaacagcgctgtcctgatgtgttcgttcgttggttcgttctcgtagttgtagcagcagagggaagcgtctgtctgcgtcgggtgcgtgcctttggaccggaatatcctggaggataaaccatccgatccgcggggacggtggcagcaaattggcaaatgcgcgcgatggctggccatggcgaacgcatccccaccccgaatattccccattcccgcttccttcctttctccaacgacccacacccaacactcgatccctttccccttcccccgccttgttataaattaggctcggctcccgcttcctcgcgtcgcgtcgcgtcgcgtcacgtctcgttgttgcattgcattgcgcccacgatcctcctatacgcgcgcagctaggacatcctccgaatataatggcccagctcaaggccgcgcgcgtcgccgacgtccccatggcgctcgacgtcctcgccgccggcgcccccgccacctccgccatcctcggtacgtacggattattcaatattcattgcgtggcgtcgagacaccgtgccgcggcggcgttagttatttccttggttatgcagcagaggtggacgcggcgggtgctcggagcgccgcggcggccgtcggcggcggcggcggggggcagaggttcgcggtgatcgggcaccgcgggaaggggatgaacgcgctggcgtcgcccgaccggcggatgcaggaggtgaaggagaactcgctcaggtcgttcaacgaggccgcccgattccccgtcgactacgtcgagttcgacgtccaggtaacgaaaaaaaattcttcatcatccgtccatccatgtccatccatccgtcatagcggtaacctgggtggggttgagctgctcgtgctaaatttgggggtccccgtgggcgttcgagacgaaaaagcgagaccaatcaaggaaaaggaaaggaagagaggcagatggggagatgggttcacgttcacctgggtgatgggacgggtcgccggcttcctctcctcgatggcgacgcgtcagcgccatggagggcagaggagtgggggcgccgcgtagcgtagcgagcgctcgccgccgcccgcgggcgaaacagaagagccaacggtgtggcgacgcgtcgcggtgagctgctgttccgattcgcggtgtcacacgtaagccccacgcgcccgcccgttctcgctcgccttcttgggaaatacgaatcgatcgacataataattgcccttcttggagaaactgaaacgcgaatcgaaaatctcaccggcacgattaattggaatttcccgttccgattctcctcgtcacactggtgctgttttataataaacctaaataaaggggggttgttgttcgaatagccagcttccgattgtaaatttgtgatcttcgcacacaaaaaaaaaaggggggggggagggagtagtatgaaatttggagatgatttaagacatttaaccacaccggattaattttttaatactcacagagacagaaatacatcctttttcagctatatcaagattcttcgtcgagtactccattttatactagtcactttggtgatggccatttttactcctttcagaaattgtgttgtcagatgcccggaaactttgatgtttgcaaccccaatatgtttaggattatcaaagaggaacaggaagacacttggtttgtccaaaaacattttgatactagcattactttaaatgaaaattaaaatgtcacgtaaacaaatgaagtagctaggccgacacaaagaaatggtgtatggaacaaattatctcccagctcttttagtaaaatacgaaacgagttaggttcgctcacgaggtaggtggcaatggatatgggatatgggatatggtccagtttactccagtgtcagctcagctccgaatcaacacagtgggcctttgtcgtttgctcatacaccccacctacgcactaaaagaatctataaagtatcttgtgctgtaacgcaaacatggagcaattcatagtggcgacacttcaggaggaatcattgtgtcactgggcctgtttttggcttggagcaatggcttatcagcttgctctactgattttgattcttgacagaaacaagagatagggtagaatgggtcatatctaaactacacttatggtgacacattctcgataaatgtttccacactcagtttgcttaattacatatgaaacttaaaatgctgaaagaagatactgatttgtttactttttgttcttgtccttctctctttgtctcttcaataattcggtgtgcaaagatgttgagaagagaacaaaccgtgaatatcaattttgcaggttaccaaggatgggtgcccagtcatcttccatgataacttcatctttactaaagaagatgtaagttacttttcttttactgtatgaattacagtagctaccttaaaaattcagacaaaaaagtaacatcattgagactgtcatataggcatggaccatttcgtgaatcatgtgatatatggtaaagaaaaaactaacctgtatccataatggcatccattttcagggtaaaattttagataagcgtgtcacagaccttcagttggaagacttcctgctatatggcccacaaaatgagcagggaaaggtatgctagaaactatttttctcatttgaacttttggggataactagaattgattttaactttggaggataactagaattgatctgatcacatattggttggttctgaattcagggtggaaaacccttgctacggaaactgaaagatggtcggatagtgaattggaatgtgcagtcagatgaccctctttgcacacttcaagaagctttcgagaaggtcaatcctagattgggcttcaatattgagctcaaatttgatgacaatcttgaataccaggaggaagagctcacttgtatcctccaggccatcctgaaggtatgtgttagcatagtgttatggctattcagaaaatttgcagattgatacctatggccaatctaacaacatctcaccttttatctgtactacctgatcaggttgtttttgagtatgccaaggatcggcctattattttctctagcttccagcctgacgctgcacaggttatgcgaaaattgcaaagcacataccctgtaagtacactagtatctgatgcattgcaaatttgcaagttccataacagtacttttcgtaccatgaacagttactgatctcctcatcccttgcatcttcttcaatcaggtttactttttgactaatggaggcacagaaatctacgctgacgttaggaggaactcattggaagaggccatcaagctatgcctcgccagcggcatgcaaggaatcgtgtcggaggcacgaggaattttcaggcaccccgctgctgtaccaaagatcaaagaggctaacctctccctactgacttatggaacactgaagtaagcagtacagtttacggttacctcgagcactttcttgcattatatctgaatttcaagtgctcaaaatctcccatcccttttgtgcagcaacgtaccggaggcggtgtacatgcaacatctgatgggggtgaacggtgtgatcgtcgacctagtgcaggagatcaccgaggccgtctctgagctcatcaccgtcccggagcctgacctgaacgccgataatttgagcaatggggcagcaaaagacgccgcaacgccacatttctcgcagtgtgaaatctcattcttgctgaggctcatccctgagcttgtgcaataatcgatccagttgccttgctggtctgcagactttagtgactgatctgtatacaggaagaagaggagagaccccttgtggagggttacaagtttacaaaacttttaaataggttgatgtactagagctaagccctggtcctgttttttaatttgccctggggacgtttggattcatgatggatcatggatgatgcatcctgtagcaaggagttgaaacagttgttgttactgttgtatctgtaagactgtaacgacgacctatttgggtggagttgaattgcaatgcggaatttggcaagggcagctgtaaaatgttgagctttgccaagataaattgttgcgaggattcaaatggatttgtggcagcaatttaaatgatcacatattccatctgtttttccgttggggatcacctggtaaacatgtgcaaatcttgcagggacgtgtaggattacattacacttacttttcctgcatagcttcaaagttgcaatgctcatcaagttctgattttcggtgctacgattattactgatgaagtgatgaggccccacgccgcagaactgtctgtcctgaaaaactgaaaatcggaaggaagatagctgggccgggccgccatctgctgtccagcccatctgtgcatatgcacgtgctcttcaaggcagattggcaacatcagattgatcactgtcagtgtcaatggctgggcatacaacacacgacatgtttaagcagttcggtccactgacaaataaacctgttcaggaggcagacagaaaatgaaaaagttaaaaaaaaacggcatatagttctccaagcgaattctcataaattcacttatccattatcctcaaaagataaaatatattactctacaaattcacgccgttaaactacatctatataacaaatataaaatatccaaaacactcttgaaatactgtatcttttaaattatttcaaaattatatattcaatttctaatccccttgtattcctttaattaaataaattattattaaataaactattgatgtctatggttctaaatacgtcacaacacatgatgccgacatataataattaatattatgataatattttaaataatttcacatcgtatttttgggtgtcaaatattacttgacgaatgtacaacgctacggaagcagacaaaaacctctatcgtttccattttcattttattttagaattggaaccggaactgaaaacaaagagaataggaatagggatgaaaatggttcggaaacggacagaaaccacctttatcgtttccgtttctatatttttttcggaatcgggaacccatgatacaaaaacgaaatcaaatattatcgaatacgaaaatggagcgaatacaataacggatatttatcaaaatatagaaagcacttaaaactgaacttctcaaatcaactaagagatgtagctcaatattttttttctaaaaaaataaagctattattctacattttatcaattaataataacacaactagttttacactttactttcttggagaaaaaaaaactatatccatctataactataattataagtagtatggtctaataaaaatagcaattacgcaaaaaaaaaatctaaagttcttgactacaaaatatctctatttaattaagcacctcaatacatagtataaatctaaccatttagagtagagaaggctgaagctaattagttgtatatgagaaatactatgttaactgaattcatttccggaaagtttccgatggatagtagccttattatatttgtttccgtttccgaaagtttccgaaaaaattctgaccgacatttttcattcctgaaaacatgtccggaattgggaaactttccaaaccattttcatccctaaatacgaactggcgcgaatacggcaacgaaaatttatgggaagaaaaaacccctcaaacttagcttcgaactttgtcaagtccaattactgtctcaggtctcaacggtcaacagtatatcacaaaacacaatcaattaggatgctaacttgaatttgactggagtattattatggtatatggactatggtatgggcctttgtaacttcgaaaattctgagaaattgtttgcaaacctattctgagttccgacggaaactgcctttatcatatttgttttcgtttccgaaaaaatttcgaccgacagtttgtgtttccgaacataggttaggaatccaaaaagttttcatccctagatgtatgtcatacacctagtgatgtgactataagtatactccacagattagttactgtaaataagtttagtaaattaacagcattctctactaaaggtgtctcacgtgattatgaatggtaggtgttgaaaacaaaatataagcaataatatggtgctatggagattatcgtggtagtttttttttcttttaaaaaaatcactttgtctaggtttcatataaattctcattggtttgggacaaaatttgactctttatgtcaccgagggtgtataagtaatataagtctatatttaattagataaaatagtcatattagctatatttttaacagaaactatctttcattaatatatcataaaaattatctatagcatacaggaaaaaatattacttaaaatttagaaaatccaaaaataaggtatggtaaatattgcataggaaagaatgagacgtagtacaaatagatacgaacaaactctactatcgtgacaatttttgtgttttaagtaatatgcccaaaccaattatttacaaaaacatgtttaacatagagtcaaagaatatttcgaaaatattatcaacataatcatttgtagtaaaaattaaacaaggttcctgtgcatatgcgtgggctaccctcctagttatagtaaaaagcgtaaaatttagaagattgagaagcgtgcccataataatttagtgctattagtgtttatttgttgcatggtgattggtgaagagattctagtgttataacttgtttttttaaatgctctataataattatcggctaatatatagccttttacacatcaagaagattaaattttagaaaattataactagttttgtcaaagctattatttttctacaagtctagctcgtcatttacaaagctgcaacaataatacacgatattataatcaggggcggagctagagcgaaacagagcgtagtgccacttgtttaatttactttactttagatcaagtttaagctgatacgggtgtctaagtttgtattgagggggtgcatacatggtgaaaatagatgaggtatagctaaaaaattttcttgaccgagttcctgggcaccccctaacatatactagctccgctcctgattataataaaattgtaactttgtctccctcagaaatttggatccacctgtcacacatatatacttccaatactctcattgtttctacttagccccacctgtcaaatatgcatatagggacactatggtaaggctatagtataagtgatagttaaattaaataattacacttttctcaagtaaacaacaaagtcaaatcatatgattatgcttgaaacgtgaacggagagggacttagctcatatacagtactgctgctgccgtagaaggcctccaccttttgctctatataaatcatttgtcgctaaaatttaaattttgaaaattttcatcgaagttttttttaaatcgctgctaaatttgacatttatatcactaaaaccatctatataaaaaattactcataaattatttttttaataagccatacgatatattattagcttaattatggccaaatgatgtgagccgtagtcgcaatcatatgagccacggtactgcagaacagaagatctcattctaacaaagaggtttatcagcatcgtcctcgacgcgggacacaacgtgccaaaagcattgcctattggcttcctttcttaagagcacccgaaaaaaactcatctgctcgggcgtttgatagtcggtccatttttatccgtctctttttacatccaaaacgtcacatcaacactattactaatattcatgtccaactttaacaaagcttttagcacttttttctcctaaactatttattcaatatacgatccgatcataccattgtatttgttgcaattgaatatttataacaagatctcatatgattatatttcgataaaaatatttgttttccaattttttgttgcagtagattttttaaatgttgcagtaagtatattacgatgtttcactacatcatttgtaatgttgcatgtggtgttctttgggtgttccagaaagtattttgtgatgtttcagaaggtatttcactagctctataaaaaaattagaatattgcatgtggtgttctttgtatatttcaacagatattttatgatgtttcattaagttattaaaatgttgcaagtggtgttatttggatgtttcactaaatcatttataacgttgcacgtgttgttctcgatgtttcagcatgtattctgtaatgtttcaacaactacaacttaatgtttcatatataatataaaaatatttcaattagtaatataattatgttatttttgttcatcctaataatgtgagatctctttgttaagatttaattgcaacaaatccaacggtgcaattggatcacacatcaaataagtattttgtgaaaaaaatgatttaaaatttgctattaagggaatatgaggagagagaaaggggtgcgnnnnnnnnnnnnnnnnnnnnnacgtggaagagataaatagttccatgcctgtgaaggttcccggagagaaatagttacatacatgcttactgacggcgcctgtttttttttaataaaaaacaaatgcttgatatgtagtcttgtcaagggtgagaggctaaatggtaagaaagaaaagaaggaaggaaacaatcacaaaaagggagaaaagaaaaagaaaagacaaaagcaataaaattcgcaaaaagccaccacctccaccttgtttgagcagatcaacacaccacatgcgagtacgtgacgatgtcccctctcccctccttcacctccggtgaatggcgtcccgtatcgccgcccgccacctcctccgccgccctgcgacggtaatccggcatccctcccccctcttcttacgcatgacgcgtaaaatgtatatgggggatttaatgcgatggggcctgactcgttatgagtctcgttgttggggttgattttggggctggatttaatttgttgtcccgatggtggtttggtgctctttccatcgcctctccgttcatttttcttctgtgttattaggatggtaagaatgcgattttttctagttggttgttgttgatcaggacggtagaggatgcttaaactgtgaaattcgaggagattgcaaattttattttttgtttgctcgatcatgcggtttggtctgattgtgtcgttgccatgctgtagaaaaaaaaactggagagagcatggtagcttctggagtcgattcagaattttttcacgcggacagttagcgatagcaaaagcacaggaacttttgtgtgcaatcatgttgaggtgatatgctggctcccttgatcattgattacctgttgatttttttaaaataaattaaggaatatagatttattccggccaccgcataagaaatggattgcctgttgatgattgcctcaactgcatgatcattacatattaatttaaacattttgtgaattagaatgtgattctagtaaatcttcacgcgagtttaatcttcctactcgatgaacagggacaatgggaacaagtcttggtgtgtgtcactgtgtctgttgaacatcttcatattagtttgtcatttggtttcagtcgcgctagctaccaccgcatcaccaaatatgagctaattagatccatgtcatcgtaaatatgccatattgaaaaaaataccactactatttataaaatcggatagataccactgcaatcttctaaaattagaaccataccactccattacaattcccgtcgtctctgtcacattttctgttagatcgagcagcagctggctgtctcccggccctccggcgccgtccgccgcggccaacggagcggcagttcacgtgggcgcagagctaggcgtcgatgcaggggacgtggaacgcgaggccgcactcggggagtaggcggaggagctcgccgtcgcggaactcgccgaggcagacggggcagtcggtggcaccgagcatgccggcgccgtacgtcgcggtaccgcgtgagggcaatggattcgatcgcggcctcatcgagctgctgctgctggtgctggtgcctacggtggatgaagcagtagattttttgaacgatgatgaagcagtagatggacgtgttcggggtgcggcgacacgacggcgccgcccttgccgttgctggccgtcgtaagcagctgcatcgtcgccgcctctactgcgccccgccgcggcggccgccggcgtccaccgtgcgcatcatccaccgcccaggaagcccttcgcccagcgccggaggcaccatcccccggacgcgcgtgagcagctcgaccaccggagtcgaagccgatgaggcgcacgcgacaaaacggagaagatgatggggagctggcgcgacggccggcacgggcggaggacaggccggcggcagtcgtggctgggcctggcggggttcgcggtggaacggagtcgtcggacgcgcgcgcggaagcgaggggggagggcggcagacgcggacgcctccgtgccggcgacgacgaggagcaggagaaggcgccggcgccgcccgtcgccgtcgccgagctatgccgccgaggaagtgcccgccgcctccggccaaggcgccggaagccccaccgtcaccaagttccctcaccgccgagctccttcgccgccgccgagctccctcgtcgtcatcgtgcttgtcttaggagagatcgatctcgatctcttcggccaggccgttcgtcatcgtcgtcgtcaagcagcacagcagccgccgatcttgggccatcttcctcgccatcaggtcatgtccctggtcccggtcttgagctcctcgtcgccggcgtccccgacatctgctccggccccgccgtcctcaccggctgggccaccaccgccagggctcgactccgacgcgaccgtgtgggctcgcctccgccggcacggcgcccgccacccgcctggacacctgctcgggctgctcctccgccgctgccatcacctccagtttgctccttgttacggttgcgtggtctcggagatggcacaggagtacaggacggcaacgatagaaataacgggggatgaccggaaaaatggatggaaaatacgacggattggcacggttctaattttcctaaattctagtggcatctagccgatatcgcgaatagtagtgatatttttttaatttgacatatttgtattggcatggatccaattaacccatcaaatattgttcttcaaacctgagttttccacttgtaagtagtatagcatactaccttgattatttttcactagcatattacctgtacattgcaatgggattttaattatttaaaattatcattaaaatattattagcatatcttaattgttattgttaatcacatgttgaccttttctttatcatactaatattttttcttccaaaaaagtagagtgatggtgggagtagttaacatgtcggccctttagccccatatgtttttttccttaaaagaaaaattaagagttggtagtaggagtgatggctcttttataagtaagaatagataataggcttaaatggttcgaactgaaaaatcagccaaccagccagcccatacgtagagagagaaacaacccaatctaatctaatcctaatctaatccccatccgggcaggcatccacggatgtttggttgatgcctaaccttgctataactaagtataggctagttaaggcatggtggcacaagtgtggcttagaaatagttggccataagtgtagcatgcttagctcaaaatttgagagtatgacatgtgggtcccaaggctaagaaattgtggcatggcataattgcggtagcgaaagaaacacatacctaagatattgtggcataactaaagtgtggcgtgccaatgtgtggcaaccaaccaaacacgcttgctgctcgctgacgcgctttccattggcgctttgctcacgccccctgcgctgcacagtggtgcctccacccaccttcgtctattactcatggcatgctagcgcgcggcacaatagatgtggtccaggtggtctttccctttctcgtttttgcggtaaggagagttccttttccttttctaaataaggattatatttttgggcctttgagcacttgagctagcgtgtagcactcataaatcttgggggctttggatttggatgttagatgtattttctttcttttttttggggggggggggtggggggcggttcagttaactcagaaatcgtggtgtcgtgcggcaacctcatcagcgcttgctcgatggatgacagacgaggaaaaggattggaggtggacatcaggggaacgaagtagactcctgtttgggccttcaacatgtgctatacgaaacacaagctgggaaggcgttttgttgacgaatgaaatcataattgtgacaaacagaaaattacaaattttttaagtaggttagattagattttatgggggaaattttggttttgccattgaattctctaattgacaatttaacatgcaaacccagtaccccctggcagtgagatattcattgtgctgaaataaggtgaggggctaaggccggcactactgggtagcagatataagttacttgtttacccattatccttttgttcccacaagcatatacggtttatgttccttcatttacttttgcttatacttggtttgtctttctaacggatctggttcacttgcagacattatgcttcttacggagttataaacatgtcagacatttcagcactaagctacttgaaggttagaaactcaacatttgttagtttggaatcctgacaacctcttagtttgttcaaacctttattttaggtgttcatggatgctcactgccaacttggtaatgatcagagcgagcaaacttcattgtcattgtgtgcctgtgctgtaaaagttgattatttggcacatccttgctctctatggtttggaattgtcactacactttactaaattcatagttcttaacaaaaatgtggcatgtaattcatatgtagcggacgatatttcctttcaaatgcttctccttatcaaccttggactagatcatttgcttcaaagaatggtaaggtacagaaaccctatagatgatataatgtttacaaatttctaccagttaaatgcttaatcaatttttttcttcctttaaggtgacttggttgatgctgttgttcccttcatgggtgaatccataaccgatggaacccttgccaccttcttaaagagtacgcatctatctatatgcaatttgagtggtcaaacttctttgtattcacatgctatctgatacagaacctggtgatagagttgaagctgatgaacccatagctcagatcgaaactgataaggtgattctgtgcactgtttattcttgttttcaacttctaagctattgttgctatcttttgcaaaattgttttcagaaaatgaaatacccttttatttcaggttacgatggatgttgctagtccagaagctgggataattgaaaaggtaacaaagagccttcccctgatttgttatttccatatttgctaaatatgattctttagtagattacttttctaaccacatcaatgcattacagttcgttgcgagtgaaggtggcattgttactccaggtgtcaaagttgctatcatatctaagtctgctgctcaaagcaagacacatacacaatcatctgaagatacctcccagaagcatagcacaaaaccaccttctacaaaggaaaacaaggttgaggctaaaccaccaaaagtagagtccagcacaacacacgaatcaaaactaacttcctcttcagaaccacaactccctcctaaggaaagagagagacgggtaaggccatatccatcacttagttacagtacatcatgataagatatactatgttacttcatattcttgactcttgcggttgcatacattttgtcaccatcaaaatgcaggtgccaatgccaaggcttaggaagcgtatcgcaaatcgtttgaaggattctcagaacacttttgcaatgctaattacattcaatgaagttgacatgtaagtgcatcattagttggattgcttatttcttgtacgtctgcttggttaatgtaatgcataagctgctggcttttggccaatttaagataacgggaataagctattcatcctagcgcgcaataatactccaatagctatagtattggttcttgttcatgccaataagttaacgtgattattgtgtaaatgaaacatcagactactatgtttagttgaggactagcatcaatgcacctcatatatttatgtgctagaagaaacggattatcaatggagtttgaatctatatggctatttcctgcatatgttacatcacctttttatttactataactttcagtgtatacaaggataaatttgctttgtgacattcatcttgttgctttcacttttctatatctgtttcaacatcatatgtactgtgatgtaggactaacctaatgaagctactttccgattataaagatcagtttgttgagaagcatggtgtcaaattgggcttaatgtcttgctttgtgaaggtaatgtttacccctttttttcttcttcttaatataatgatacacatctctctcgcgtgttcgagaaaaaaaaaacgcaatcttatgagatacttaaaccataattgtggcaattgtgtgggttgtactaaaaacccacttgcttttgcaggctgctgtttctgcgcttcaaaaccaaccaattgttaatgctgtcattgatggtgatgacatcatctacagggagtacattgacatcagtgttgctgttggaacttccaaggtatcgccacctgtttttctttatgttgactgccctaactattattttatgcaatctgttgtaatgatgtgacatgtcatttgttttagggtcttgtggtgcttgttatccacgatatagatgcaatgaattttgctgacatagagaagggtataaacaaccttgcaaagaaggcaactgagggggcacagtccatcaacaatatggcaggagggacctttaccatctcaaatggtggtgtttatggaagccttatcagtacacctatcattaattctccacaggtgctcacttgtttttttttgctgccttgtaattttgtttgtaagttccctctaacacgagctttatctaatgtagtcatcaatcctcggaatgcattccattgttcaacgtcttgtggttgtgaatggcagtgtccttgcaaggccaatgatgtaccttgcactaatgtatgaccataggctgatcgatggtagggaagctgttctcttcttgcgccgtatcaaggatgtggttgaagatccacgaaggttgctccttgacatatagttccatgcatcatagatggcctacaaatttcactcgtttcaaaataattgcatgaaaaagttgactcatgtcatgcttgcttatccccaaaaaaaatagatggttgcaggcctttagacttgtacaagagggcatttctttctttctttcttttgttgaggtattacattttaggaagatgttctctaatgttttaattttactagagagaaagacgattactatttaggtcaaatagaagctttggagccacattctactgaacttttggcacacaattgtgaaaatgaaatggcaaccaaacatgcttttatactccttgaagtttgcctaactagcttgtataggcggaattggtctccacaggatgtgcgggttggcacaataatattaaatatctgttaacttgtgattctcattggtttctacgatagccacaacaagttgaaagaggccacaacaagtttgtatacaataacatcatctgcatttccttcgttacatgtttccactaaaaccaatagcacaaatttctccgtattttgttctgcgttgccgtcattttttgtgtttggtgtattttagtagttggatatcaggtattgtaaagtttatgagttctatgggttaaacctcactgatgcaatgttgcatagtgctaatttccaattccatgtggcgtgccatatgattgtgaacaatcagacaatttcccctagcaaaaccattaaaaacctcaccctccatgtacttcaacaaaatgtgcaaaacaacatgagatgactactgcgtcagcacaacgattcttacacaggttgctcacagagaaaatgacggcttgttgttataaattgtaaccaacagttaatttttttcactaagtgaaaacaatatgtgtttgagagaactcaccagaactttgataaactactaggctaaacctctacactagccttttctacattatactaaaccagcattctcctattgcaaactcagaactccaaagtcacagctgcagcagacgcaaccaccccttggtgacctggactgagactcgggactaactcatggtgtaaagctatacatatttttcgatttcccacacgatattccatcttcatttatctagcaagttgtcgatatcagttgttccaatgagatgcttcttgatcttaccaaggctgcagaagtgcttctcccttgtgttaataggtacaacctcttgaacaaattcgcacttcataccagctgaaacctgtacatttaatttatgttagatgtgtcgggaagaatcaaaagtctataaatggatacgcagcagatatttcactaattacatcaaacagtgcatctccgagctttatcttcattttaccactattgcacacaagtatcttccccatgaggccacttggaagctcatacagtctacaaccttggattgactcatgcctcctcttttgatcactccaatctaatgctgtagtagttgaattttaaattgcatgtctgtggagtgatatatttcatattaatttatcttactaatttttaaatatttttttaactatttaggtgacatgcatgaaacaaggggatatcctcccctcgagggatgaaaacaatttccccatctctccccctttccggcggctccatcgactacccaagagggacggggaggctacccgtacgtatcgatctggcagggcaccgctgctacccctcgtccccgcggtgtggcctcaccctccgcatctatggccagtgcggtggtgctcggtaaagtggagcagtgcacgtacgcatcggttgcggcggtcatgttgctcctcttcttcatgtcgtcggtggaagccaggggtgacaccaacgacatgtacaagctgtgcgcggacatggcgatgcagcgtggggatgaggaagagtgggccgccggtgaggatattggccatgatgctgccgagcaaccacctatcaacgaggaagtcatactcccgtgaccccaggatgagctctagcacgcggtacgatagcgtgacctttggtgatgtgtatagcggtgctccggccttggtgacgagctacgtgccgaagtcgctgatcttgaggtcgtcgtgggggctgacggcgatgttgtccggcttgaggttccgttgcatgatccctgctatgtgcattgctgtggcaccgtcgaggagctgccacatcagttgtcgcaccgctcctcctgcacgacacgcacaaggcttgacctgttgatgtactccgtcacgacatagcaacacgggcaagctctgccatcgccacccctcttcatctctctgtgtgtcgtgggatgctcaacaaggtacgggtggccctggcacgcctcgaggcaccgtggctcgcgaaagcactccacctcaccgtagttgatccctctatggaggcacttcacggcgggtttccctagtcctcgggtcctgcaccctatgcaccacaccctcgacttcctcccgatcttgtcgaggcacttgtagtgcttcatggtgggtggccacaatgacgggtgtcaaggggggaggggggtcccttggacagcggggagtggagacccctccccgagagtgaagagtcgaccagggggttagtaggcgagcggtgcgaggtatctacgatcacagcggtttcacggggctcggccgccccgcgagaaggaggcaggaggttatacaggtttaggctacccagaggtgtaataccctactcttgtgttggtgttttttgttttctctagatcagctaaatacaagagaggccttttcaggctacaaagcgaaataactgacatagcagaaagcaacccttcatctgtatctattacccttccttttatattccaaggaggggctcacattattacaaatctactcttagtcttgtctcatcagccgtcttgtcgttgccagctggttcccttatgcaaccctcaagaaacccatcaagtcttacggttcatattaccccgggctcccaggcttcgtttgagacagttgggcctccgccagtgtgctcaccacgtggtgcgtggtgggcccgacgaggcccgacctgcccgaaacagtgccacatttgcttctctgcccatttggctaaatcaagtggtgcggggcatgtgcggcgtgtgtcccaggcgccaccgtccaaagtgactcaacgctggcgtcttgtccacgtcctttcaacttagactggccagggatccccctataatcctgtttcatttatggcggggcgtgctgccttacaactaattgtggagcacgcccaacttcccagaagtttctgaggtcgcgtcctattgcgcttaaagaaggtttattattccttgatgagtttctcgaaggcgtcgttgacgaaagaatatcttgagattgtgtgtcttgtaccttctgtcgcccctctgagtagaggggcgcgagctatacaaggtccaaggtgagccctgggcccgaggcaaggccgggcccgaagcacaccttggatcacgcctttatgcttggcaagcctcgtcacccttcttccttgagcaacgtgtgacttgtaggggctaaggcgagctcagggcccagagctaggccgagcccgaggcagatcttatctcatcctcttaagatatagatcttgcatgtttttacgccctcttgccgaggattgtagaatctgcaagggctagggtgagcccggggtatggaacagggccgggcccgagacagaccataggctatatttttaaggcatatttggggtatgcttggggcccgagccaggccgaaagctacttctatactcggagttttggaccatatacgcagtatccctcctcagccagagaaaatcccatatataaaatcttaggtgggcccaaagccctccggaagggccccctagctacaacaccctagggttaccttttatttttaaatatagtgctatttatttgagaatgatccttttgccgtataaatgggtacgtgggttcccatttcaccgacaacggggtcctagacgggaggcggcttgtggtttgtggagttgtgcggtctcttataggggaatcgaggagttttggttacatcatgcggctgagacgcaaagtgtgaagcgagtgctgccgtagatgccaagtggtggtcttggatgatgccaccgaaggcccaggtgacaccatagaggctgacgccaccacattcctcactgacgatggcggcgtcttggtgtttgtgcctgataaccatggtcaccgtctcgtactggaacaatagtgtcaccacgaactcggcgattgccgcgcggtacagctccaatgtccctacctccaaatcagcctctgcgcatgcggcactgctcactctctcgcacctaaacccctctgccaaccctcctagccatgccgctggccctccagcagccggcgccagagtgcatgtgagctttgcttgagagagagagaagggaggaggaatcagagaaggagaactggggcttacaagtgggccccactattttttatgtttacccttgtggttatacgtgggacccgcttctattttcggtttctttgatgaccgggtgccacgttagcacacttggaccaagtgaaactgctcccaaaactaacgagggagttgatttgcaccggttttcgaagatgggggaggcattatactcggttttgtggttgaggtatgcgattcgaccaaggacaagagatgagggaggcaaaatagacttaatccaaatattgaaaatactattggtaatgtgtagtattaggaagtattggtggtaaaccaaacattgacaaaattactattcaaaataccaatattttggtatggcaaatttcggcttcaaaccaactagcccttacatacatttccctctaaaacattctaagaaaacatttgttgagacaaaaatgaaatggtataaattcgtctaaattttattttatttttgatttacatgaaagacgcatacacgcacatacaccacactcacacaaaactcttaacccacattaaaaaggaccattagaaaatcttcagcatcagtaaaatcatattaaaagtacatccgcgtgaggaaaaaaaatatcatgaatacacaattccaaaaaaatataaaaatatacgtgattcgcttagggaacggatcttaagcaatgcaaagcattgtcatcatcgctaagcggagtggcgacagcggtgtggtgtcgcgggagaagaggagaggctaggaccttgggtatggcacgactaaaacaccatgccaccgtgcttctcgaattcattacaaaaatgattcaataatactatagtgttattataaatataatgttgtagaaaccggtcaaacatatatgattaacgctatttaaaatttcacaaatattttttcttgtaatagatatgtaaatattttaaattctgcacaatataatcgaagtacgttgatgataaatataactataaccatatttctttagttgaacgtaattgaagtatttaaagtggtcaaacacacggaatatatcagccaacttgtagacaatacgaacttcaaacgaagtaaatagcacactttttgttgtatagaaatattactatattgcacacatttacttcttattagtcgagaaatcatccgtccgccctttcacgtcccacctagcatggtcacaattgacctcctgaaaatcagaaatagcctgttttttcaacttcatgcatattccatagttcattcttaattgtatggacgcctaatcatgaaaaatataatctccataaaactaaatgtttcgttgcaatccatggacatcttaccaataaacatgtaacacaaacagatcaataagagcattactataaaataggtagcataaatagcatgtaatttttcatatccaaagaagtcctgccatccaaatagttgtttccattgaggcatctaacatttgaaccaatgcggcgcagattgcaaagcctgcacaaaaaagaagagtgcagcatgcagccttccacgagagacaagagccgctccgaatagccaaggaagacatgcctatatatgtatgagtacagagtactacacacacatataattgacgacaggactgatcaggggataatcaaaatgcagatgagcagcgtataaacacatgcacataggcattaggcaagtcatccttggctaccgaatcagctcttgtcctcatggaaggcccctcctctactaattaagctctgaaattaaccctctcaaatctgaatctttcatgcatggcttgctctgcttcattacgcatgtcttcaggtatttatagcacagaaaaggtatatgtgtgcagggaataatattagttggacaatgcagtgtaaatgcatttatatatttgtcctagatacccatatctcccctcaacaacttcgtctgctctttgacatctatacattttgtagtaccatcggaatatattcggttaggttaggttttgacagcttatggtcatggtctatcagctcatttttccctcggcacatgcccaatactgtccgtctatttctgaggtctacaaggcaacacgtctcaaataggttcaattgtcaagtttggtatggctccgactccaagcattctcataaatatatatggagttcttagactctaaatatagtagtttaaaagttaacttttaggcataaaaatatgaatatgacggcctactaaaataactccgagctactctgaacttcaactctaaggactcctttggagaataatcatgattctgtttaattcttataaaaactctcctaattttttttcaatttaaaagaggcctaaaatttgtttatttatttggattggcaagaaaatttgtaataattgaactttatcatgtattacaaataaaatggcggagctaggtccttttatgatgtttcatcttttaagccagaatctattgtttaatagagctggccctggggaaacttttttttttatttttagacctttttatgttttaattttattaatagaccattccaaaatatatttctaaatctaaaccttttagtgtggcctaataactctgtcatgtcgcgtgcagtgggtgtgacaattttgtcttgccatgccagcgagagcgcgtgatcaaaaaacgctgccacgcaagcgcccgccggcgtggccaaataatgttgccccgctagcaggagcggcgtgatagtataggccaaaagtttcagatcttgaaaataaattttggatgggtttatttttaaaaggcatgtctttttaaaattaaaaattaaaaaggttcaaaaaatatttaaaaaatcgccctggggctgttcctaactggtttcgtccttgcaaatacccaactccaaaagctcttgtagtaggagcccaatatatcaagcgggtccaatatatcatgtcttttcctatccggtatacatacacaccaatagatactacaatagatttgctggggcatataaatgatgcacctaaaataaaaggtaaaatctaattcccgcgcgcgaaatagtcttacagcgagacgccatgcggtagccatcgaaagatgtgagtattcatgtagtactagtctatttaaaatttttgatgaattatatatttcaaaccatatattatttttaacacccgttttaaccattgaacttcactcaaaatatatgataaaataagtacaatattgaatatattaaaatatttaaaattaatttagttaaatgttagaattaactaagctctataatgaaagtaactttttatagcattagaagtaattacatatatgtgttaaaaatatcttcataggtaaagtgtagatttacaagtaaatacatgccttttttattcgaggtaaaccatatgtgtgtatagattattgttttcgataaatgcaacttattttatataagaagtaactctttagaaaataggataaactattcacagtattagtattagaagtaactcttaatattagaagttactacattcctagagaaaagtaacttaaaaaaatagaactgaccttttacgatgttaaaaataactgcactgccagagggaagtcattcttcatggtattaaaagtaattataccgctataaggaagtaactcttcatagtattcgaagtaacaacactgccatagaagtaaataatctaaatatattcaatattgagctcgttttgttatatattttcaatagagtacgatggttcaatcaaatcttgaaaacaatatattgtttaaaagatataagtcaccaaagattttaaaagtaatagtgcaatggtactagactccgttagcacgtgagacgtgactacatagtactaaaagtggaaatgcactatgacatctctttttttttttaacaaaactacgtctgagggacgtgatgcttctatttttagcaagtacattcatcgttgtttaggactagagagctatcactcttgttgtagtcactttaatacatacatagtatacctacacatctgtatatacaaataacaataacatcgaatcattcatgctacagttgaaggaaattgtacactcaatcaatctccttatacactaaaaagtaaaaacatcgatcctaacaaagtataatgttgacaattatttaagtcatcactactaggaaaactattctccaaaatgggtcttcgcagacggacgaccggtccgcctgcaggaagtaatctgaaagaactgaattatatattcgtgag

SEQ ID NO: 7034 - DNA, 10473 bp, Oryza sativa
aagcggcggagggtgcgcgcggcgaggcggcccgcgcagccgccggcgacgtggatcgaggcggtgggcacgctggcggagacgctgcggttcacctactcggagacgctcgggaaatggcccatcggggacctcgcgttcgggatcaagtacctcatgcgccgccaggtgagtgcgtcctcggattcgttaatcggccttctggtctgcttgctctgctcgaatctgagaggaacgcggcggattgtagctggctggctggttggctgcacctgcaagtttttgtgttttggatctgaaatggcagctcttgtcttgtgttggagctgcacctccgaagtcgaggtgctcgcgttgctgataggaggcatgcttggggtcgagctgtaggaacttgttcgcttagatggcaagtagtagaaaattcgcgtgtaaaaccggcgaattcagctctgattgttctctatacacataggagtttgggaatttgtgtgcccggagctggtgtgttttgtactgggctgagcatagttctatgtagtagctgttatgttgatggttgggaatggtttggtgttttgggtgaatcctctctttggcaagcccacggcagggagcgttgcaactgtgcactacccgtatctcaagctgcttaatgcttatcaccaaatagatgaatgtgcaatgttgagtagagtattagaatagcatgtattttcataagaataggattagtaattcatctggatgatttcactgaagagatggttgctgacttgctgtgagatgaacctttcgttctgaggggacgaagaattgaattgttagtcacgtaactcagcaaaggaaattggagcttatggactattccttttcatgtgcaaacattgattattgtgtgcaagtttgttatcatcacgtagatcataaaagcatttggtgtctgtggaactgatggcacattttcttgtttgggttacttttcagggaaatttacatgtcgctagtgtatatgctggaaacaattgcattgaactgaaagggcctgaaataatggaagagcttattgttctgagacgattaatcgatctttgctttcttttttctaagaaaccatttccggtcttcctggaattagctggattttccccagaggatgttcttattgaggaacctaaagcgggggtgagttaagtacaaagtagcagttattttctcttcatgtattgaagtacaatcagttataatttagactaaaaaggatcacttggtatttttctcaattcctgattcacaacatatacttacagattttaaagcctgcccatacaatcctgcgtgatgaatgcaccaaatccttccttgtgttgattcgtgggacacatagtatgaaagacacattgactgcagctactggtgctgtagtaccatttcaccactcacttttagatgaaggtggtgtcagcaagttagtgctgggatatgcacactgtgggatggttgcagcagcccgctggattgcaagaagtataacaccatgtctctgtcaagcagtcagtcaatgcccagactaccaaatcagggtacacacttctttttcgttcgtttatggtttcagaactagttgacgatacctatgtttgccctgtgaaattagctgatgatgatttttcatttgtttttaacaaacctatttaatctgtgctggtgacaaaatgctctcgaaacaaaatatgtacatatcattgtatcaatttaccatcagcatcaatttgaacctggtgatccatgtcaattttcattttttctctctttatcagacatatatttgtaggtcaataaaaaattatgaaattgaaattgttcttatacttactaggatatgttatgaaatatggttgactagaaacttgaaattgtcatgttgtgtcacaaaatggtgataataagttctgaactagttgttttaataatagttgattttattctgttaggttgttggccattcattgggtggtggtactgctgcattactgacctacatcctgagagaacaccaggagttgtcttcaacaacttgtgttgcctttgctccaggtataaaaacatagtttgatatgcattagattgacctgagcaattagtaacagttaatttttttggtcagcttcatgcatgacatgggagttagcagaatcaggcaagcattttgtgaggactattgtaaacggtgctgatctggttcctacagtatcaacttcatctatagatgatctccgttcagaggtagctccatttgatgtgctattcttcccatagatgataactgtgctaatgtgtttccaaatatagttctattgttttgagggagaaaatgatccgtttgttatatttatgtaacatgattatttttgttgtccatttaaatgaactgagtctgtaaacatggatagaatatgatgccatgatatcctttctcaaaatttagtagcagtgaagttcactgtctctaatcctcccgtcttatcccctcatctaggtaacggcatcttcatggttaaatgatttgagggatcagatacagcagacacgcttcctaaatgttgtttaccggtctgctactgctttaggaactcgcctgcaatcattttctggtgccagagatagggttgcaggtgctggtgcactgctacgacctgtttcaagcaaaactcaggtaaaatatctgaaccaaaatctgtcaaaaatgtaatatttacatgaattaatattgtgtaccacaaaatgagatagggcggtttgaaataaactaaaagtgctcaaggataacactgaaacagtcggtgcatgaaatatgcctggtctgtctaataaacatttagagatttctatctgccaaatccaaatagttgtttcaatgttgttgatgaatattttgttgcaggttgtgatgaaacaggcacagaatgttgcgcaggctgttgctagaagtagatcagcattttcttcatggtcatgcatgggtgcacgccgtcgaggtgttggtgtagttgctgcaagcgctaaagaggaaataacagtggaaacccacgtcacatctaccactaattcagagtcctatgttgtagaacaacgtggcaccaagaccatggaggagctgcagtacactgcagatagtgtttcagttcatgaggaaacagaagaagaggcccttctgagtgagcatgaatcctctagggagcatgcagaagaagaaataactgaaggtgagatgtggtttcagtacgagaaggacctggatcggcaggctgaagtggaggctcagaccaggcaggaagaagcagctgctgccaaggaaataatggaggaggaaagtgctgttctaaaaaatgttgaggataggcaatccttttcatctgatagtttggagaggcagcagttctaccctcctggtagaatcatgcacatggttgccatgcctcctgcagattcttgccctgatgatccggttgctgctgatgagtgcagtgtgggaatatacgagaccccaagggatctttacagtaaaatccgtctatccaacaccatgatcaatgaccattacatgccgatgtataagaaaacaatggaaatattgattgagaagtttgcgaacaatgatgaaaatttctgtacagactcgacagtagaataatatggatgacttgtaacatcgaagtgtatagtagttctttctgtttagctttaaccacctgatatgctcctgatatgcaatatagaaaagagatgctgtcctgaattacaatatagaagagatgctgtcctgaattagttaagagagttgtggatgatatgatatgtaaaatgtaaatgaaaaatagaattaatggatgtttattaacggaaaatattcctcatacatggtgtttctctgtttagacccacatgcgttttgtaatgtcagaacatagggctgattagccgcacgtaaaacatgattaatataatgtgctaacgaaaaataaggaactagccaaagccaaaacacagtttagaacagccctctagtgtactatacttggagtctcagttttttaaaaaaacgatgtctcaatttagcaaatactgaccacattattactacacgctactcaagatggtgattcccattttaccgctggtatttcctatttttccttttaagacttaacatatgcagttagaaacttctagaatacatgtttaagggaaatatccttataaaaacctttgtaaaaaccgagcatatttttttaaaaaaattcatgaagaaaataatagatatatataatgtatatacctaacctcattaaccttccccttttttcttctctcacgagctatcgttccttaaagaaaagggtgaaaatatacttcatacctatggtaattgtttcatgaattacttcatatatctatactgtctatagtaatttttttgacgaatttatatcccctttcatgtttaacctaactagggacattttagtaaatttttaaaggtcaaaagtgtcaaaatcctcggttcagaaactggcccgtttaatatgagaaaaaacctttcaccatcatacttatatcgttttaacgttgcaggttggctctgtcgtgtaggccccggttgcccgaggggcacagggccttccaaaaattggcgcgcgagcccgcccaaagtagggacgggacatcgctcgcaccatggcaaagcgtgttcggtttgtgggtgtcggcgcgacacgtcagtctctaaacgatcatcaacgagtcgcctgatcaccccccgcagggacgggttgaatccaaacagaggcccccccgagccttttatagcctccggccgccccgctcccctcctcatctcacgaggtggtactaaaatccaaccagccgtcatctcgtcccgtgctcgtgggcttcagagtaagaaatttgcccagtgggttgggcttggtccactaataattttaggaatgagttcactggaggtccctcaacttaacagcgagattttttttaggtctctcaaccacaaaacaagatagatatgttcacctctaaactcattcaaaccgttcaccggaggtcccttggcagtatttttgcccggttttgctgacgtggcatcctagtcagaaaaaaaataaaaaaattctatggggcccacttgtcagcttcacgcatctttttttctctctcttcacttttcttctcctcttcacttttctcttcaccgacggagcgcgcggtggacgagcgcggcagtggagcggcggccagctgcgggcggagccggcggcgggcgagcgcgacggcgggcagagcatcggtgggcgggctgcgggtggagcggacggcgaacgagcacggagccacggcccacgggtcacgagaggttcggctgccggcggcgccggccagcgacgcaaaagaaagggagggcgtcgtcggcggcgggaggtggccggaggaggaggtcgccggcgagcgcgctcctgctcctgctcctgctctggctgctaccgcgcaggcgcggcggcggtggcgccgatgtggccaggaggtatcgccgatgcaggggctcgtcgttggtcgtcgtcacgggaggtatcgccatgcgctggggatgtcaaaatgcagagagttcgcgtcttcgaagacggccatgagctcggcttctcccagcacatgcccctcgatggcgtccatcagcttgtccttgatcacatgtaagcaatcaagaatcaatcacagttaattaatccttaaacagcaaagataatcgctaaaagattgttctgtcgacttgtcttgttgccgaggtgcacctcgtcgtcgagggcgtagagcttgaactggatccggaggccgcaggagggagggatgacgatgacgccggctgcaccgccgaggccgcgtcctgcgccagggccggcgccaccgcacagccacgctcgcgccgagccgccgccagccgcgccccgacgcatcggcgccgccgtcgctcggtcgagctcggctgcatcggcgccaccgccgctgcgcctgcgcggtagtagctagagcaggagcaggagcgcgctcgccggcgacctcctcctctgcccgccgtcgcgctcgcccgccgcccgctccgcccgcagctggccgccactccactgccgcgcttgcccaccgccgctccaccggtgaagagaaaagtgaagaggagaagaagaaaagtgaagaggagaaaaaaagatgtgtgaaactgacatgtgggccccacggaatttttttatttttttttgctgactaggatgccacgtcagtaaaaccgggcaaaaatagacctccggtgaacggtttgaataagtttagggacgaacatttctggttttgtggttgagggacctcaaaaaatctcactattaagttgagggacctccggtgaacttattccataattttactaactaagtttgagcccaatagacttagcttggcccattgttagctttataccgatttagtttgagtcatttcctcctgcaaagaggtaaagcgatgaagaaataacatttgggggaaaatggcttcatattcagtataattcccacaataatagaagattgtaaatgaaccttattcaaaataatcacgaaagaatacatcattattgataatggtggtgcctgatgcggctacaaggtgaagacaccagtttcaacataactgcctttcttttgcaagtgcagtgcgaaagaataaagtgaacggcaacattccttgcctaagaaattattttttattccctttgtgatgggcgaactaacactgcccgattctctctttgcttttcttctcttaagttttaactatttccacaagacatatatacatctatacaattgtaaaaaccctgtatgtaacatgtacagcctaaaaaaagatcctatgggaaaactataccaaacaagaagctaatgctactaaaatgtagttaaaaaaatttgggagaagctaatggaaaacttgcggggacgtataatattcgctttcgccgaagaatggtctcaagtcctcttggcacatgaactccaaagggaaggaaacgagatggcccctaacggcctgtaatttttccataggatcggtgcctgccagatccccatccttgtgagtttctgttatctctacagcaacacccaggtcaatggttgtgtggccgattttctccttccggtgagcaaatccttgcctaaattgggacctgcaagaggtcaaaatagttttaaataccagaggacatgatactgcagctgaaatgcaagcaacctggaaaacaggttatttgttccatacctagaatggatgtgatcattgggaacacacgagaagacattttggtatatcttggtgtttgcctgccatacaatatcaatttgttcagttagagaatgaggtaaatgtgttcacagcggtataaacagaaaatgcagtggaaaattatcagctgctgaaagatggcaaaagttgagtagaaaacagtgcaatgccagaacccagaacagtcatattcaaaagtttccaggttgagcagactagcatttcacgataaatctcaatttcactcaccttagcagtgcccatccagatgttgttataagtcaaatcgtccacaggatccataatttgactaacctgttaaggagaagtgtcagcagaaagaaaactcacaaaaatctatgttgtacatgcagcatcaataccgtaatgtattgtgaaaacaatataaatgcttctgtcaatattctttatatggaaccattcatcaagtggagtttacacaggacgttcttctactgtggttcactgaagcaatcacaacatgaaaggtttgtgacacccaccctgaggcctaaactttcaagtttcaaataaggaaaaatagaatgcaaaaattttccagttttcttattcacaaagaaaacaggtgcacacaggctacactttacacattaacagggcatggaaccctgacatctaggaaaagatgacaaggtagatgttttccagtacaattataccaggtaaaaggatgtaagtggtgccatagtcagttatcttaatcttgacataatcagctaaaagtctatatatgtatggtggctttaaacttaaaagagttggtttgtgattcaagcaagtgaaacattgtacaaacctctcctggatgaaggccaaggtgttctgcccatagagaaagtcgtaggctaagagagaacttccctgcttcccaatgtcttccatccataattgaactgacaacctctttatcttcaataatcataccaatctaaaagagaataaaaacagatcgataatactggttatcttcaataatcataccaatctaaaagagaataaaaacagaccgataatagagtcaacagcagacacacaaatgacctccggatgccactaacaagatgtaagcatgccatttagtcttgaccggatgcagttggcaaagaaagaaaaaatatattccctaggctaggccctcctttaaaatattaattcgagaacacaacaattaatttatctgtatgtctgcaagcaattttcatatactcttaatatataaaaatcatacgtgtgcatctgtcctgaaaattgcttccgtaatgtataacttcaattgatattcagaaatacattatgatttttcaagaaaaagaaatacattatgataggaacgctgtcaaagctgtatttggaacaccgtcaaagctgtatttggaagactgtcaatgttaagatgacatgcatttgtgactggagggcgtgcaaccttaggagcagtcctctgtttaacctaataatgttggggcctgtttggagcacacaggaatggaatatctctgtgttccctatggggccttagcatgcagagaattagacaaaagaggcaactgagaaagccatacctcagaatcccttgatccaagcaaacttctgtcatttatgttagctgatccaatcagtgtcatccggtcatcaatgatcatcaacttactgtgcacatatatctgcaaaattcagactgttagcaaaagaaggaaaagaaagaaactaacattatactaatcttaatccatgacctaggaaggtaacaggacaatattaaacaaatagagtggaaaattaattcaggcctctctacctgattggtgaccaaaggaccaccatcacctagtctgccgtgtgccctgagcccataaaaggagatataatcatgggctttggaaccaaccacatcataaagattcttaagtattgaattaggccctctacaaatggtcctgtattgccagtgcataattgctctaacagatgctgctccaccgtcatcaatgcctccctgtaattaaacatgtaattaaccggccaacacgaagcatcaaaaccatcaataattgttacaacagaacatacctgaaatccaggtaaaagcggtatgacaattataacccggaagcaccttttctccttttctgctctaagtatacgcctgtataatgcttctaatacacggttttttattgtgtcatctcctgaaagacctgatatgaaaaactgattctgcatagaccagtaaaatgaagcttagagtttagaccaagtgaaatgaatctgtattgtatcatctaggtatgaaatttcaatacttccaaatatacaaattttcttggagtttgtggattacatttgaaaatcaagagattaaaaaaggttcagcacctcaatgtacacaaaatgttctgctttttcgatgagagaaaaataggcattgtggatgctcccttcaatttgagttgttcctgctgaccacggaccaacacttcgaacaacctgagttaaaatttaaaatgtgtgtttgattagccacacatgtataatacagttgaaaataatttctatttgttttttagtgttactatacaagcaacattcctaaaaggacaataaaatcatgtctcaaatactccaatccaaagctccacctgtaaaaataaagatatacaaattccatgctttacaaattcagttttatctatcggtatgacatatttaagctagagcaagacatatcttcactccttataatatttcagttcgtggtagttatggttgcttgtacacccatccctcctctttagttggaagaaatgatagcaagaacccacgaggcaaatatagacagcgcaagagaggctacaataccaacactacctctggcttatgcataatactccctccgtattttaatgtatgacaccgttgactttttgacaaacgtttgacctttcgtcttattcaaaaaatttatgtaattatcatttatttcaatgcgacttgatttatcaccaaatgttctttaagtatgacata

SEQ ID NO: 7035 - DNA, 13025 bp, Oryza sativa
gcggcggcgacattcacgctgctcctcactgggctcctactgtggtgagaactgagaatgggatagatctgctgagttaaacctatgtctttctttacactaggtgggtaatttgattgtggtttctgtaatttaattttttattttttattttttttacttctctctcttggtgatttatgtatcgatcaggtataagaaaaaattgtaccaaactgtaaaacatgggcaagtaataagcaccagtacagttgtactactacaaatagatggatctgctgattaaattttttcgtgccaaagaaatactatatgttcactttggatcatctggttgtgtgtcggtaacaatgtgcagccacatgtcatttcaagccagcttgtctctttacaaatgatagattgttctgcaaatttttaccggtgattgctttgcatcagcaattcagccagcaacttctgaacagataatgtttctgatctgagcagcaactaataggcactttgatctgagttagtcagaaggatcaacactgtttcttctttatcgttttatttatggtttaatcaagaaaactttctctaggagtacttgaggccaaaactctaccagcaagatattgtcaggaacaaaatgtggatgctgataaatctgaacaactgacgcaagaagtctctagttctggaacgcacaatctaattgtaataactctgcgcaaacgatgtgcagtgtgcgtacaacagtgtgtttcccagaagcaagagaacactcatctcatgcatatgcatccaagaacataaattattgctcttatccaggaaaaggcgaggatatagaggaaaacaacaacttgtacagatcatcgatgttgccgtgtacacgcagaactactatattggagctttttaaaaggtttacgtgtataaattataaaaccgaggagaaaaataaacaaaaacagaaaaagtagctttatttatagctggaagctcgatgcatcattttcagtttcgagttactgaaaagagaccgtaactagaaaaagtgatagaacgaaagtggtaaggttcaaaaggatctcaaagtgggcaaaagtaaacttgtgcggcgtgggttcgccaacagggcggagcttgatttattcggatcttctagggctgacaaacattggttcctgctttgtttctactagaatcattaacggtggcctaagggcaagttttataataagagcaggtacaataataaaccgtatgagatccatgtagaattttttgctgcgctagagaagagaagggaaggtagagagaacgggcgggcagcccgaggtcatggggcccgtagcaatggtaggaaagtgataccgtcctcgcgtgcgtacatcccgctgccctcacccgcggccaccatagtcctcgtatgtcctccacggccgccgttgttgcccgcgtccatcccgccatcctcgcccgcctttgctgtggccatcgacctcgtcttacgcggccaccgctgttgcccgcgtccctcttaccgtcctcgtttgcatccgttgtgaaatctatcctcatcctccacagtcgccgccgtcgctcgcgtccatcctgccgtcctcactcgtatccgctgcgcccgccatcttcatcttccacggccggcgccatcgcccgcgtccatccctctgtcttctcctgcctccaccgcggcaaccaccgtcgcctgcgtccctctcgccatccctgtcttctgcggctactgccatcgcctgcgtccatctcgtcgtcctctccctccatggctgccaccgtcgttcgcatccgtcatgccgacgttgccatcctcaacattgtccgtcttgtggccctcgctcacgtcatcgcgactgttgaccttgtccaccgcggccatcgccacctcttgcgcccatcccaccctcctctctcgcagctgctgtctctcgctcacgttcgtcgtccttgtcctccgcggctgccgccatagcttgtgtacactagatcgtcttcgccggcatcgtcacccgtgtccaccgcaaccgccaccatctccctcactctcacctgcgtccatgcatagggacactgccccatcctcaccggcaagaagcgagaacaaagagaactcggaaatagaaggatggaacaataaagaaaatagagggaaaagatggtgaggccataaaaataaaaaaaatatttatgttacagtaagcatatgattctctattatatatcttagctataatgtttactgcagatgatgtgcccacctattacagccggcaattggctttgttattgatcttgctctaagagagatgggtgctatctctaatcttgaccgtatcatcgactcataaatataaatgcaacatgtacactactccaatatttatttgccagtctactcttactctcttttcttttgtcttgaatttggtgtagaggttgtctagggtgacttattatctctattctctctcatctttttctctcttccacctcactatgtaaacttatgtggcatccagaagattgtggttggatgcttataatacttgccctaagctcttatcaagaagtccaattaaagattgcaaaaaaaaagaagtccaaataaaacaaatggaacttggtgacattgtattcccttccttccaaaataaataaatttaaaatataataaggtatttcacattacactgaatttggatatatctctatctaaatttactatacttgaaaatttcacatcatatattaagttgatttattttgggacgagagagcaggcagcagcttgcaggcagaggatgaggcgctggttgcaggtttgcagcacgtcgaataatagctatccttgaggggattcggtgagttgcacaagtttggacggccgctattgatattgcatctgaggcctcgtttagatctcaaaatattttgatcaaatatttgaacacatacatgaaacattaaatatgggaaaaaaattaattgcacagtttacatgtaaattacgagacgaatcttttgatcctaattacaccatgatttgacaatgtgatgctgcagtaaacatttgcaaataacggattaattaggcttaataaattcatctcgcaatttacaggcggaatctgtaatttgttttgttattagtccacgtttaatactttaaatatgtgtccgtatgctttaaaaactttacacccaaagaacttaacacaccctaaaccagcagacttgggtgggtctagctctctctatgtcaaattatcagatggatgtggaacaaaacctcgatatagatatcacgaatagtacgtggcctatacacctcaacaaaagaatcttgtctctaagcaggaaaataaacaatcgatagatcgattcgttggcatgaattatctgtaaattttaaaactttattttccacgtacaactcaaaccaaatttggggagaagaatcggagtcgggagataaagcacagtaatatcataacttaacaaaagtgaagaaaaccttatataacagagaacaaatcgaaatcagataaactgagagatatgaaacatcctttgtgacttccatccagtaataatcagcaagaaaaacacctgaactccaacaagaaaaatacccgccgatttatcacctaaagtttggcttgggtttaaacctgtgtttgattgtaaaggttgggaaccttctacttcggcatgtaaaatgggacagcacattaacgtgtaaattaattaagtattaaaaaaacatgaaaatggattagtatgttttttaaagtaactttcctatatattttttaaaaataaacaatttagtaatttggcaagtatacgcacggaaaacataggagtggaggttggaaactagaagaaacactcagccacctctctcaaccttacaaactggatgacttaagatgttttctttttagtacctagcagtacatatcataagataaattgggaaattttgatttcatgttggccagcatgctggaggtgtgtgtatttgaccactagacttttcggcttgtgttgctccaaacgacacatctacatattagaaggaagggttctgaacccataccttcgaacgaacctagtgtgaactgaccttccttccttctctcctcctccatatttccacggcctccttccaaccactgcaactatataccctccttaactgacacccctgattcaggtggtgtttgggtgtccctctcacaaaaaaaaataagtttctagggagggactcacccaaaaaccccctcacccaccccctctgtctttaattcctcacattgatggactagtcattctcatgtcatgcgccaataagcatgctcatcttttttttttttttgagaactagcatgctcatcttgacgctgcactcctctagccttcctttgaactggcatcggttgtactctgctgtcttatataattggccttcccaatctagtccttgctgaataggtgctaaattggcattcagtgctgctagtgcctggatttttggcccaaatcacaataatgtttttctaccttttgagatggaacaaatacgcaactggaaaatcatgcataataggcagaagcagaattcaaaagtgatcataattgataaacgcgcttctcttgaagaaaaatgataatagtgctgggctgggctttgatgcacctccattctcttccggaaaaagtacaccgaaggtccctaaacttgtcatcgagttataaaaagttaaaaacatcctcaaactgcaaaaccagatatccgacgtcccttaattaattaaaaccgatcacaataggtcctttgatggttttgatcccggttttgtcctacgtagcggctgagtcagcgtgggacccacgtggccccatatgtcagggtccacgtcatctctctctctctctctcttctccttgctcactcgctgcaggagggtggctggcagacgcacacggcggcggcctactgctgctgctggccaacgccgccggcgacgttattcctgggtcgcttcctccggggcgcggaggcggaggagttgtcgttctcgggcgaggaggaggagctcccggcggcggcgccgacgttgccgtagaggccggccatgtcgcggtcggtgaaggcggcgggcacggcggagagcgcgtggagggagtcgccgcggaggacggtgtcggcggcggcctggcagaggtcccagtttcccgtccacatgagctcgatggcgccgctcagcgacggggatggcgccggccggggcgcccacgctgctgaacctcttcagctgatccttatcgattgagagctgtacgtaattgtaagctaattaattaaagttaatttctagtagcaactgtgcagagaggttagggttcaatcgatcgatcgccaggtcaggtgtgtggtgattaattatattagttgcatgattgcatctgtgttgatcgccaggtcaggcggcggaggcatgcgatcttggccatggcctcgtcggccgcggacgccgcctctccttctccagctcctccagcacgtcctccctccgcctcccctcggccgcgagccgccgcctcagccgctccatgctgccgccctcctccgcgccgccgccgttcgcgtcaccggccgccgcgcactcatcttcctccgcgtcagcctcctgctctagctcggcctcgtcggccgcggacgccgccgcacgcctctccttctctagttcctccagcgcgacctcgctccgtctcccctcggccacaagccttcacctcagccactccacgctgccgcactcctccgcgccgccgccgttagtgtcaccggccgccgcgcactcgtcttcctccgcgtcggcctcctgctcgagctcggccgcccgccggcaactcctccccccaccgccgccgcgtcgcccgtagccgccatcaccgccgacgccgccgaggcaccgcgggccttgcagagcagagaagggagagagataaggaagggagagaagagaggaaaagaaagatgatgtggccacactgacatgtggggctatgtgggtcctatgctgactcagctgtcacatcggataaaatcggattcaaaaccacctaagaatctaaagcgaacggttttgtaagttgagggatgtcatatatttttgcggttagggtacgattctgtgactcaatgacaagttgagggacctttggtgtactttttccttctcttccccaggaccacattctcagaaggcctatggaccgcagcctgaggcctgccaactgctcgcgagccgctgcttatgggctgccgtgtacttctagccgcggcttacacgacagcccagtcgaaccggcctctacctgttttggagctctccttttttttttcctatcttggataagagcatcaccaatagcatcttaatatccggtaatttaaggatttgtattgtcaaaaatcttttccaactaattccctaatcacattcccaatattttctattttctatcccgcaattgttgttctccacatctagggatgcactttggctcccaatcacgtgagcgaacgtccttttagtttttgggaaaccaatcttaaccaatctcttcgagagataaaaaatttatgacctcaaattttatttaggattcccataactaaaattttgggatagatttttgagatgacgaccaacagattacctataatctttcccaaaaaattgtttttggtttcctaaatgaaaataggaagtgaaaaaactcctccctttaacagatagcctaaattcaatccccaaaacttaaaaataggcaattctgttaaactatcaatagaaaattctatttttttcttacacacgtagaaagatcgctatctcccacgcgcaggcatggaaggagagagacgggagtgcgagattaggagcaagttccgcgcccgcatataaacggagcgaggaatcgggagaagggaactccaaaactcgggtaggagagtagaggatctgttggagctgtttttttatgctcagagaatcattctactccattcccaattatgattttgaggaatttaatcgaaaaaactactacaacaattccctactctccctctcaaaactcagcattcccttttcctttatattctcgctctccacaagtcagatattgttctcgatcccaatttccgtctcttaagagaaactgccactcgagaagacgagcaggatggtgacgctagatgggcgatcacggagccagatgacacgatctaataaggcacggatgaagggaggtccaccttttattttagggaattaaatatagaccatctattggaaggaaataagtttttaattgataagtcttcatcaaataatctcaaaaagaaatttaggaaagagatttttagacataattacagtgaaatggaagtcatattgatcttttggtcatttggagaagacatacattctctttaaaaaaaattaaaatcactgacgatatcttttctgattaagaataaaaagaagattatcgagcatatagattttatcttgaattttattcgcacgcttttaaactgctaaatgttaaaaaactttttatatagtaatttctctataatattagacaaacgcatttttaaatttaaaataattaaatctaattcacttactaatagttttttagtttgacatacatatacttaatctctatctttagcaggctgggccatagaccatttctgttaaaaaagggaacatactctttatgtcacatgaaaaaattaacctatgacaaaatgtgacatcttacaataaatttagatataagtatatttaaatttattatactagaagtatcacattttgcagagggagggtctgggagaacaagctagctactccgcagaagaaaacatgggccaatttttatagcacggcagcaggaacctcctggagctaaagctttctcttctttttttttttttggttttatcttcaccaagtgctcgtcgctgttgatatacacccgatgtaactattcatcttttgttggtgaaatatcgccaagccacttcacttcactgacaaaaaaaattctcactctagctagctagctagtgtcacttccggtcggtgcaggcaagcaaaacgtgcacaattcctgcagttcaacgcgaggccggctagatagctgaaatatctgcagtcaatctcgctgcatgtacttactaggtccgtttcaaaataattaaggtggtgtttggagccagagagttaactttagtctatgtatttagacactaattcagagtattaaatatagactacttacaaaactaattacataaatgaaagctaatttacgagacaaattttttaagcctaattaatccataattagagaatatttactgtaacatcaaatagcctaatcatggattaattaggctcaatagattagtcttgcgaatcagtccaaaattatggatgggtttttattaattgtctacgtttaatatttataattagtgtccaaacatccgatgtgatagggacttaaaagttttagtcccatctaaacagggtctaaacttgattaaaaatttagacaagtacttaaaatggttacagaatttgattttttagatgaatggtatacgtacgcaggatgcctgctggctctagtaactcgttcgtatacgtggatatgttcagatatgaactttcggccgcctacagcggcgcgcgatcgtacgttgccgaccatcacatcatcctctcatctcgattgagttagatgctgtgatattttacgtctggttgctagctaaagtagtggcaaacatatgcatgtcccgcacatgcgcaaatcgcaattgattcgcagacgattgcatcatgtaacacgcagaaagctttgggtttgaactgatgaaggtatgttcacaagctcagtgttgggcaggcattctgttttttctctctcgagaaatcattcctctaattgagtacgagagatttagtaaaatatgcttcgattatttaatatcctgacttagtattttttttaaaagatacataggaagacacacaaactcacttcatactcacgccacaccacatacacacgtgcacgcgttcaacacatgattagactagagacttgaaggacctaaagccttcggtgtgcgggaaaaccgccaaccattttaaccaaaccccaaggaaaacccaccccaacccgggttttaaaaaagggggttggggtggggttaaaatttcccccccttcccttttcttttaaagggcccccgggttttaaaacccgcgtcgttcaaaattattgggttcatgcggactattcaaaattttgattctatcataaatttttaaaacaattacaaaatcataatcataagacaagtactattttcaaaaatgaattcaacatcatccataacactcatcttcttttctcagctcgcgtcccattcctattatctccgttctcctcctccctcccttccttgacgactttaccccatagtcgccgtcctcctccctcccttcctcgactactccgccccatagtcgccatcctccctctccttcccttcctatgatcccatctccgatcgccagagaaccaatcgatgccttccctaatgtcaacagtgtcttccatcttttttccccttcactcaccagatcagagggcatcaatgagagtgtggtggacgatgaggttatgggaccaccgaaattggtgaggtcagcaaagaggaaggcaactacggtagcaagatcgactgaggaggaagaagagagaagaagcaaggtatcaaacctcatacctcgggtatcatccatgataccccgtggtatcatccatgatacgtacttaggtaccaaccgatacccatagataccaggttaccaagtaccaggtatcaggtatcatgtcgtgaggaggaagctcgggccgtcacccgcctagccggtgggtgagccatttacctttgactcctattttcttccccctttctcccctcgacacactacatcctctcctattgttgatgacgttcacgagggaagtagtcagctagcatagctgcgataccaagcaggctcctggctggggaagacgccatcggcgtggtttgctcggagtagttgctgcagcagcgctccgagccagttccttgctgtcgacagctgtggcagaggaggaggcaaaatcacgtgaacagtgtgagggacagattatcaggtgttttaattatcccgtgactttcataatgccacaggatcccgtgcggtagctgccctctattaaaaaagtatctaaatccttataaggtaaattagattatcaaaatatataaacaaaatattataaaaatattttctgcatgaaaggataatttatctaaagaccacactcctataccttacatatcatccaaattgacatcaaaattatgaactaattatgcgcatggatttatacaccaatatccatttacacctatgcacaaataacagatagactgaggaaacatatacttatatgatgatcatttgaaaataatttcaaaaaagttatatgacgatcgaatgggaatggagggagcatcatttattttgttgtgagttattttatcaataaaagtactttaagtatgatttatatcttatacatttgtacaaaattttttgagtaagacgaatgatcaaacatgaatcaagtagaatattaaaaaacggacgtagtatgaacattaacaagttgggatcatgttcatcctttatacacatgaaggataactttggaattattttagattctacaacataccaaatataagtaagttataggaataattaaagtaaataccagtacgctagatcatatatggcaactctgacacaagttttgcagccatgggcatagatatagtgactaagacctacaagagattaaccaccaatcaatatgacaatatccataccagacatggaaatttaaaatgaattagattggattttcaaaccctaaatattttctaatgaaaacacgagatgggaggtggaggaatagagatagggtgggtgtggaagtgggggtggggggagggagtggaccagtcttgatgagctaagaataatactaatgtagtaataaaggttatcaggaaagaggtgggatatcatacgtacaatcagtttagttgggcttgagcattaatttttgtggacatggggcacatggactatgagctacaagagaaatatggcaacgagcaattctcaagtaaacatttgcaataaatttgtttagcctttggaacacaaaatttatttccgcacaaccaaaaagaggggaagggatgaatgaggtgtgattcgtgtgaagggtgcacaactcattcttgataagctacaaacaatttgtactccctccgtcccagaatataagaagttttagagttagacatggttattaagaaagtaggtagaagtgaatggtgcagggttgtgattgaatgagtagtagaggtaggtggaaaaagtgaatggtggagagttgtgattggttgggaagagaatgttggtgtagaagttgttatattttaggacaaatcctacaggctaaaagttgttatattttaggacggagcgagttttacattaatttattatacctacttttggaataaactaaaatgcaggccaccacattcgcacatgctatcttctagtttgcatcataagcaataaacggtcctgctattcatcccaaggaaccatgaaaaccagctaacaataaagccctcaagaatatggagcctactatcatttcaagctaggacaatatcaggttatatattcaagtgcttaccatacaatcatgcagaacatgaattctcgttttgttttttcttctttcttcctccagaccttctctaggacaatagcttagcttggtccgtctacatgctcttcttgtctattgaatatatatatttttaccgattttatagaaatatacacgtttaaaaaaattggcagaagtataccattatcgcggtgtgtgtgtggtgggggggtggtaattgaattcgcatcgactttgcacggtgaatgcgcaaactcgtgatgtcatcacgagtttgtatgatgaatgcgccactacgtgcaaagaaaatagagagaatctattctataccactgagtttgtcatagtttaacaatttaccattgactttgtctctttctacaatataccgacgactttatcaattgttctacaatacgacattgggttgggcttatttttcaacaccatttagcaattaattaagtaacaccatttagcaattaatttattggccgtagtttatttaattatcatcgttagtaattaattaacaactgattcatcattagcaatggaaaacaacattccacattacctccatccatgcgaactcgtgcgtgcggcagcaagttcgtgttcccacttagcaacgacggtatatcggaattttgttataattttttgaaaacgtgtatattcttgtaagaccggtgaaaaagaatatacctttaaaaaaaaatcttgttgtcttagtgccctacttttattttgcttttctttgctcctctttcccatcgctcggtccttccaattcactacaccagatcctcacatctctgacgggatacctgtgacgggcaaacgaaatggtcactgatgaccgtcacctctgacaggtcatacgggatgccgtcatcggtgaggcatccggctgctacccgtcacaggtaactagtcacctgtgacgggttgaaaatagaacccgtcacaggtgaggttacctcaccttaaatgggtttaagtcctaacccgtcacagatgactagtcacctgtgacgggtcgcagccgg

SEQ ID NO: 7036 - DNA, 18753 bp, Oryza sativa
gtggtgggcgccagatccggtctccaggtggttggggaccaccggatctggaacccccgggctccgactgttgcctccttcacacttcgccaaggttgccagtcgtcgcctccttcaccatccgagctccttcgccggtcgccgcctccttcaccttcttgacgtacgagctcagatccattgccagcaagtcctctttcacccatgtattttgtcttgtgttgttcatattgttccaattgttgctactgtgattgatgattctgagtcctatggtgattgagattcttgtgattttgttttgtgattgggacaactgcgatggaattgtgacgatttttttgatttgtgaatgccaaatgcaatcggttgaaatgaatgtgatggtaacctaggaggacggtgtttctcttttttttgccccccttttatcacaccagtgacggtcccaattagttgggccgtttgaggtgactctcacctgtgacgggttttggttgggaccagtcagaggtgactctcacctgtgacgggttttagttgggggccgtttgaggtggctcttacttctgatgggtgttcacccgtcacaggtgactcaagtcatcagtgaccactaatctctgaccgggagctgaacccgtcaaagttgagggtttgagcccgtcagtgctgacctgatctagtgtagtgattatagcttcaatgacctccatgaggctgtgccatggcgcgattgtaaagtggagggggtgtagggagaaggacgtgcggagctaacaaaatgagcggccactaatataatatagctgcatcgtattaagagaacatggcactacggctgcgttcgggaacctactctctggcacgcaaaacggagcagcgattagagcgtgatcgtatttgggaacaccattttcaaacttttaaaaacatggcacaaagtatttgctaattttttttcaaaaatggattaatttgatttttttaagcaactttcgtatataaactttttaaaaaaaacacaccgtttaacagtttgaaaagcgtgtgcgcggaaaacgaggagaaggagttgggaagctggtctgccgaacgcagcctaatacttgtgaattgtgaacagcttactggtaaatgaatgattgaacacgtacaatattatagtacttttgcaaatggtaaaatcaaatgaaacaaaaaggggcctgagcttttagaaatggagggaatttccaagaggtagctagagagataggcatggctcttttgcctttgcatcaacgtctagcactgtgaaaccgataggaaaagcaaccttgtggcaataattgaggctcgggcgacaaaaacttacgtaacggcagcgttgacgcaaagattccccacaagctgatcgagaagaaggcagtacacaagtgacacaccagcagttcagttcaatccaaaggcacagtctcagcaatcatgctgctacgtacgacatgtttcttatcctagctagctaccatgtacaagaaatatccggtggataacctttataatccaaatttcattttgtatatgcaacttttctaatcttggtttacatgcagaatgaaaatttattttgtgttgcaaattttaataatttgttaaagagatgaagttgcgattgaccaagtgagcattatttccccaaccttccgtgctgttacaacttttctgtcgttttcacgtaaattcttcagtccggcaagaaaactttaaagatgtatataatggaagcaaatcaatggacggtaaagaaagaacaaaatttgaatccttagaaacaggaaaattggaggaatacaatgtttgcacacatcaatccatatgaattttttgaagaggctttatcagtggatgaaaaaattcttatgttttctctatacaacttgtaggaaataaaattttcctttggttttccttcaatcctactcactgaatgacactcatactaattaatccttactaatccaaatcctttggttttccttcgaaacgaacaagcccttaatacagtcaacacccataattttatatcatagaatctatcttaaatttaccaattagatttatcttaaaaagccacacgtcaataaaacttccacaatcccttcccatggacatgcatatacataagtatgtaccctcttttttcttgttctccccttctcggatagatgagacggaaaaccaaattaataattcaaaacccatcttaactatgctttaagtttgtaaaagtatgttatctcgagttatattctaactatgtgcatgtcatcaaaacaaacatgaaaatttcaaataaatcaataatatatattatataatcatatatcacttagtgagcccagcgagcccatatgacccgaataaattagaccctaagagcattagtgattgaagttaattctatatcacaatatattcataataaataaaaaatatgaataaatgaaagtaatttttatatttttgacttattataattttagatttgtggtagtaattaattttctggaatatcactaaggttcaatattctctggcacagtttacttgtgcatgtatgtatataaagttataaatgatgatcgacaatacagattatatcatcctatacaactttatcaacaaacatagctaaatacgcatgtgatcttctttaaatctgaaaaatcatacatgtccacagtaaaaaaaagaatagaatttttaaatattagaaaaaaaaactaagtaacatatgccatagtaattaaataaaaagatcactttttattaccgatgttttagtttagaccatcctttaactactgttttcattttggaccgggtaaacttacctttgtttcactttggaccactcgactttcttctcaagtatatgaactgtctcaattacactggtttctacttgtcaatgaactctcatagttatatgtaagactattttttttttggtatatggcaagttgaatgtatatagataaaagaatcaagagtggtccaaattaaagtaccacaaacgtaaaaataccttcaaagtaaaaacattggttaaagggtagttcaaagcgaaatatcgataacaaaaggtgacctaaagtgaaatttacttaaaataatatcagtggctaatctctaggacatataggtatagaatattaattgtaagtgcattaaaagtgtagaactctcctactagatttgttgaagtcactaacaaatttgagataacattagactcttaaaaaaaagataaaacaacaaatgcttaatactctattaagttttagctgtcggatgatttatgtgacttaatttatatgtgtattcaagttatagctaggccatcatacagaaggggaaaaaaagtcatacaagcgtgttatgaaaaaaaaaacatatggatgttctaaaaacttgtattaaatcgttgcaaggtgaatagaatcgtagagatgataactagcatcaagttgcactaggttgctagccaaccaatcacggcactaagcagaggtcataacgagccacaagacaaacaagcgaagcctagccttgtattgaaccttatttgaactcacttttatatctatgtattattatttgtgccatttttgtttgaaacaggccgtggagtcacagatcgaagaccaaccgagctatagataaatgtcatgggaacttctaaacttcatattaatcagaacccatcatatttagttaatattatcggaattgctataaatataaatattagaaaaaattcggtaccactatcaaccatgagaaaagtagctggagtcactaaaaaaaatttcaaagaataataagttttgtattatccaaagatcccagcttttgtattatatcttaacttgataagtgcaaacagacttccagttattcctccgcaagctaagcaagctttgaagtactaactagatgatgtgagactaactggatatatgaacatcttaccgggactttatttagatcgaaaactaataaattttaatcaccggaaaagaatttaacatttagggtgtgtttggttgctgggcgaaagtgggataaggcggcccggagggaaatattcccctcagatgctggatagagcgatccggccgatttggccggatgcagccgcccgaggctcgggcgagccgggcgagcgagtcgtgtgactcgcgtcacccctcaccacgacgacgcgagcgaggcggcggatagggcggccggcgcgggcgacgagagaggaggcgagcgcggcggcaggagggggtgacgagcgcggcggccggcgagagagaaggcgagctctgcagccggcgcgggcgacgagagaggaggcgagcgcggcggccggtgcgggcgacgagcgcggcggccggcaagagagaaggcgagctcggcagccgacgcgggcgacgagagaggagacgagctcggcagccgccgcgacgacgatgagaatgcggcgacgatgacaacgatgcgggcggcgagcgccgcgggaggaggtggcggcggcggcggccggcgggaggaggcggctggtgggaggaagcggcggcgggaggaggcgagcggcggccggcaggaggaggcggctggcgggaagaggcggcggcgacgtgccccagatccagccgtgtttttttttcttttttcttttttctatgtgtatttataatggaaatagtggtgtaaaattgtatcatgtattaatttgatgggggtatattcaccatctcaagtggagaggtgaccacacctacaaatccatcatactccctccaacccaaaaaaaattggatcaccaaatccaccttcgtccctacatccaaaaaagaaactggatcgccatattcacacaaccaaacaaaaaaactggaccgccatatccaacaaaatatggaccgccatatcctatccaatcttgaccgggaaccaaacacacccttagaaaaaatagaggttcccgcgcgttgtaattgtgtgggctacctagttatcttaaaaaatatgcaacggccatttaaagtttaatttgcatatgttctttaggccgtgcatcatccatgggtctgtagcgctggaatcattttttattgtgcttgtagtaataagtgctatcacaaagaaggagtcgttcttacttttaggattgtctttagcacttttactgtaacattgtcatgaaaacagacaaggaagaggattttggagcacttttactgtaacattgtaatatgacaaccacaagttcttccacttcagtacatcaacgttattcaacaattatgtggcgagacaacttagttgccaacttactggaactaatttttatattattgtttgacaaaccaactcttggtgaaatagttaaagagtttgcccaagactccacctatcaaacttcaattcttattatctaattttacacacacttgccatatggtctacctctatatagcctaatttatgagtactaattagggcgatggaccttttttttaaagggaaaacaacacgtgattatgccttttcattgaatatagcgggagaaaaatactaccttctagagataagaaaagagaaaagctctattcactatacagagtggggcaaaaagtcacgtaaaggttttgctcctgccattgcccaattagggggatggacctatgtgtgctattaatggcatgagtgcttgggttgtcttccttacaattccactaaagcacaaaataaatcaattttgcaaaaagtttataggagtgcagcatgtataggtttttagtatgggagaatatccattacggtcgctgaagtttcgctatgagatcattttagtccctgacctttcaaattgtccaagcaagcccttagattttatcatgtggacatatacagtccttggctcatcgaaaattaccatgtgggcatgccatgtcatctttcgatgcaaatatatgatgaaatgcccaatttgcccttacacatatcatagggaaaaaagagagaaaatgagaaaaatacaaaaaaaaagtaggtggtcttgcatatatccattagagttttaacattgaaatgcaactacgtccatagaatttatttggcatggtaattatatatttagtggttgtagctaatttaactttgtatttataatccagtgaaaaaagtttgccatatatccatagttgtattgagcaaagtttgtaaattattttattcttgtatggtatatggaagggtaaattggacatttcaacatatattttgcatgagaggataatatggcatgttcatgtggcgatttaagtgggtccaatgattatattagctcacatgacaaattataaggacttgtttggacaatataaaaggttagggaccaaattaatcccgaagcaaaacttcaaggatcatgttggctattctcccttttatatcagatattgaccaaagaataaataaacgtgatatgaaaagcaactctatttttttttaaaaaaaaagagagtaccaaatggtgcatttctgaatagaagatcctcccgtacgtgttggcagtggtcaatattaattatagcatcggaatctgtagttgctgtttgggtaaaatttgatagttttggtatcccctaatgtgccacaaattcacactagaaatgattgtgggtacttcctaatactccctcaagataaaattactcaatgaaagtgaaaggtttgatcttctcatcttctattctgctcaatctgaccgttcaaggttcatacgggatggtgtgcatagtactggtgtagttgatgaatgacttcggaggatttaatcttatcatttgaacttccgttttttagagagagtttgagaagcatatactccggcataattttatagttgctgaaactttagtgggcaaccatttttttagtaataacgacataaatatatttctgtgccatttgattattttccctaaaaaaatgaaaggagacaagcatagaccgatgtgactaccacattgaaagttataaaccttatggcataaatctgggaaactcaatccaggaagaattttcctttctgctcgcatatacatcatagcaagtaagaaataaactctactttttttttcttcctacagatgccacattaccgttgattaaaaagagatgctattgttgtgggatgctcccttctaagggaattgtattcctattatgcgatccctttctaaacgaacttataggatatgaaaactttagtcttacttctatacaataagtattttcacaattcttgagaaagtacaccattctttctaatattgatttgcattacctccttgtactttaaaaaagtgctgcaaaataaaattagaaaaaggcggtacaaatccttaagatgatgcaccgctgcacaagtcatctttacctctggttcgtaagtgcctgttctcccggttatacaaccgggagtccaaattcgagactaaagatagatatctttattcccgggtaaaataaccgggacaaaagttgatctttagtcccggtactaaaaagaagaaaagcggcagtcccggttgccacttttttttcattgtttctttaccagatgcgtttttccttctattttcttccaaatcggatgggatctatgcatatcccccaataatcaaatccccaatccctaaatcaaaatataacatctcaaactatatatacattcacatcacagatcctaaaaaaaataccacaaatcaaatacatcacatattgcatctcagatacatacaataaatcacaaattctcaaaaaaaaattacacatcttaatggaatcacaaattgcaaaaaaaaaacaaacaaacgaatcggccgccaaccgcctgctcgccgccgcgcgtgggcctgcctgccgccgccctccgcagtcgccgccgctcagccacaccagcgcctgccgcccaccgccactgcctccacagccgccgccactcgaccgcccaccgccgctcggcccgccgccgccgccctccgtagccgctgacgctcgaccagccgtcaccacccttcacaggcgccgccgctcggacacgccggcgcttgccgccctccgccgccgctcgatctgcaacgagagaaggcaggaaggagaggataaggcttgaaggaaggagaggataaggcaaagaaaagaataagagagtaaaaatagaagatgaggagtttgagaggataagtcatagggattatatatggtacatcgaattttagtccaagtttgtgttatcaacctggactaatctttagtcccagttggtaacataaaccgggactaaatataagatctttagtctcggttagagtctccaaccgggaccaaaaatcccctaggggcctgacagcccatgacagcacatgaaccgggactaaagatagcacatgaaccgggactaaagatgatgttaccaaccaggactaaaaaacacatagttctattctgcttataaactgggactaaaaaccatctttagtcccggtttttattggaaccgggactattgtggtttttggctgaccgggcaaagaaggtttctccagtagtgatggtatatcttgtatgagaaaatatgtagtgaaatcatcaaaaaagtaaaaaacccttaaaaaccgaacctaaaagttatctaaatttgtaaaaacattagtagagatagataggtatagacataaaatacattcccatcaaatcttaattgtgaactcaactttatttggaggataaaaagataaatttctggacagtaacatgacaccataaatttgtctttttcgttcctttttgataaagttgagactaaacttaagatttggtgggaatatatttcatgtttatacgtatatctagtaattatttttatacatttagatatttttttagatctagtcttcacatatttgatagctttttttattcttaatcggtctcctagtaaaaagtagcaatgataacttgacagtttttttctcgaatgtgcaggagagctgtgtaatactccctccgtctttaaatataaatgattttggttaaatgtgatatatcctgatacaacaaatctggacaggcttaatatttagattcattttattagaatatgtcacatccaaataaaatcgcttatatttaggaacggagggagttacttaatagataatcgcattgttacaccattaattaatgacacctttacatgcctgaaaagcaaacccttttttccatactcaaaaacaaaccctttgtttgtctgcataaatccaagggcagacatctccaacttgcagaaaatttctactgtaacatgtactgaaagccacataaattttctattgggtaaatatagcaaacaagaatataggatgaggtttaatcaggatcacatagagagacaaatacttttctttagccaatggggattctccagaagcggatatcctccaccactcaaaagagctcctcttttgaccaaaggagcctccacctagctattatcctttcatgcttttatcttgtagcagcttggccggtcagtggatattcccaccatctgcactctaatcaacgagagttcccaattgcatacccagatgccaactcctgagagatgataaaatctatctgaatatatatataaaccatgcaaccacatccagggacccaagagagtatattttttgactagtttggctggagaaaatgaaatcctcaattgtgtgtgtatggagaaaccgatcatctatgagaatctgtgtgtaattgcctgattaagctcaaacccattatttgacagttgacacacacattatatagtaagataagatgatatacccaaatccgaagatgaagggaaaaaaaatcttatatataactgcaacactaggctagcagctccatcaatttccagctcataaataaatttaccacaaaaaccgtaaagtggtatttccatttgttcaaccaaaaagctttcttcctcctcatcagctttatataggatcttttgggaaaaaaaatgttaacacatgcggcatttctgttcttccaaaaagcccaaataactgctacaatgcccactctccctactgtgagttattgatgattctcactgactcgcacaatgttttggcctaaacttaacattccgacaaagaccacatatatagcaccatatgcattcggaaataccaaaacgaaacataatccagtagtatatcgagtcccatggaaatcgattgaaagcagggattcctggttatcccatggcaataattgcatctacgtactgttgatgatgttcatatgtagaaaacgatataactgaaatgttccccggctgacatcagttctagattttattagattctgagaaacgactgatgagaatctgagaaaaaatagacttttctaacttttctatttctcgtttattttatagattttataagtacatattattaaaatctgtgtgagaatctgaaactatttgtcggagctagagatttattatgaaagagcttctggtttttaagttcgctttttagattttgttactatatactattggaatctatgtgagagtatgaactatggccctgtttgaacttgctccaaataaagattaagtatgagcacgcaaaacgagaaatacattaatacatggttaattgagatttaatgatttcaaacttgagaaaatagatttatttgatattttagaacaatttctatataaaaagtttcacacaaaatacaccatttagcagttaaaaacatattaatagaaaccaagataaaattatgtatcttaataacaaaagagaaatggcctatttaattctgaaaaccactaaagaacagggccgagaaaccttggggcaaatgagacaccagaactgagaaaaccttgccttgcctagaagaacccacttgcgggtacgactacaacataaggaaaagcagaggaggtcatgccgggatggagtaacacacagggcccctcttttcactttccaatgattctttgggtgacccacacaaattcccctctaaatattccatctctccaatcccttatataagtgcaactacttgcatggtccatggctccaagctgcctagcaacaaaggtcttaattaggagctctctccattaggatcctcgagcttcaggaagctatctccaacaaaacatacacattcagatcaacttcagtgatggctgcagaatcagaggtcggtgactgcagtaattcctagaattaacctcaagaatctcttcttttttgtttcacacactgttcaattcagagttgatcgatgtgctaatgtacctgtgactcgaactgtacctgcagacgccgcgaataacagagcttcatgtgaggatggactgcaatggctgcgagcacaagatcaggaagactctgcgtgccattgatggtacagaattaattctcctcttttcttcagacaaatccatctagctcagcctcatacaccctccattttaaaaaatattaaatcctgactatatatctgaacatatatttgttcggattcatggctaggatttgattattttttccaggacgggggagtacctatctgaaaattctgaaattttagcattctgaaaaagtgaaaatgcacttatctgcaggtgtgagcgaggtgtacgtagatgcagcgagccagaaggtgacggttgtcgggatcgccgacccggagaggatcgtcaaggcgatcaggaagaccaagagggtccccaccatcttctcccacaccgacccggcggcgccgccgccgccgccggccgaaggcgaggccgcgccaccgccagccgacgcgccaccgccggaggaagcaccggccgcaaagccggcaccatcagaagcggcgccgccgccgccggcggaagccgaccaggcggcggctcccccggccaccgacgccaccgtcatacacatggtgcacgactacccgtacacccacgaccaccaccacgggcacggccaccacctgttcggccgggaccactggccggcgagccaccataccgccggcggcatggtcaactacgggggcggcgcgccgtactacgccgggcacagctacagccacagggcgagcccgtacgtctcggagtacggctacgtcggctctccggctcaccatgagggcagattctacagcagccatgattactactaccctgcagctgctggtggcagagggaagggagatggaagccagatcacctccatgttcagcgatgagaaccctaatgcatgcaccatatcctaatcaacatgcttttgcctgtcaagaagtaattaaggtggggtattatatagtattgatgattagtgttaattaagattactgtaacatgagatttatgtaaaatagtattaattaagaggggtgtaagtaagataaggaaaaaaggggagcaataagatgcttaacttgtagtagtgggagatgattttccttggcaatcaccactattttttttttaccgccgtccactacacctcaagagaatccaacaaagctgtggtcctgtgtatatgatgtgtacttgaaaaaaaagtggcagagacgtcacagtatttccaggccaaatctaaaaactttgtcctgtctagcatgttgggaatagagacatttttgtattctcttgaaatatatgtacatctgatttgcatcgcataaatctagagatcttatcttctgaaatctagaacgtgaggatttttttttttttttttgcttcttgcaaggaagaaactggtgtccataaaaggaggcaaaacatttatatatccagtgcagtttgctgaattttcagttcagattgacagaccaatgggataaattccagttcttcatggagcggtgtttcaagtagtactaggaacagtacgaagaacagggaagctaggtgtgtactgatgcagaggagaatttgatctgacatgagtatagtttctagtgaagggaagttttcagagcaaattcaggagaccaaactcgaccgacaggatggaaggtgtttaacaggtcgacgagaaagagacatttctgtgtaatgataagcttaaagagaagtcaatggctttcagactttataaatcaagacaaactcatgctcagggctagaccaattaaactgttaagttaatcttccattcctttcagtcatccagagaaggtatatctgctcgactgctcccaagactaatgtcagacctggaggaggtggataagaaaagtgattgtgaccccagaaaaaacaaatattgccaattaattatagactcgcggtgatttaattccacttgcgtgatgttttatttgcttagctttaggaagttataaaatactactcctaaatatgttgatttttacaaggagtagttttgttttaagaagtcttctggtttagactttaaccatcgattgcttataaaatagattgttaataaccctgggaaaaatatgtttaacagcatttttgggatattaatctatcaaattattttttattcaataaatatacttatagttttattaattgtcaataaaaatccaaattttaactatttgaaagaaaatacttcctatgaaaatcatcatatccgagaagaaaaaaagatctccaggaaagcaaagcccatttatacattgcttcaagttcaagcggcccaattcaccaccgaacagggcaagaaagtgaataagttcattttaggtctctcgatttatcttcgagtttgaagttcatctctaaaccgaaatattagatatagtccatcccccaactcgtaccatgtatccaatgttgatcctttggcaatatatctgcctctccctcatcaccctccgtcacgcacgccgggtacagcatgtcaccggcgccgtcgggttgcagtggcagttgggccgccggaagtccaccgcccagaagttagacttaacggtgttaaatatttaggaacgaagggagcaataagaggttaaagttgacatagtagtgtgagttgggagatttaacaaatctgatatttcggtttgagggatgaattttaaactccacgacaaattaaaggatctcaaatgaacatattccacgagactggatctcaggacaacatcgcaccggccggttggtcgactggatcaggcaattagcccatttacggagtaaaacaagaagaaacttcttggttctttttatatttatttttcactaatttacaaaataaataaatcgccatatcaaagggtggtttatatggacacacagggcatttttcatatagatccttaccattctctaggtggtcgttttgtgatatttcggatttatataaggtgttgttatagctgtgattgtaatttaaggactgcatgcaatttcagtcgtccatttctttaattaacggatcagatctagtgctacagtaacaacacaaacagtatcccaaactacggtgctttcgctataattcagtgaacaatgcgactcgctagggtataccatccaatttgcatctgtcgatgagaacttatattgtctaattgcagccactattgtgactgcacatgatccgaattcatgatatctccatcgatgaataatgcgggaaggggtgatgtgcaatttttggaggttagtcctctttctcaactaccactgctaggaaaccctcttcaaccccggtttgcaactctcttattggcttatttagtcccagattgcaaaccgagactaagaatctgggactaaagatcgttatctttaatcccggttgaaatactcggagtaaagatacatctttactacatatggttgagccacgtgattgacacaaccatctttagtcccggttgatgttaccaaccgggactatgggttttttttgtttttttcctccttcagtttttttattttttttactccttcagtttttttcttttttcctcatttcatattgattcacagcatagatatcacaaattcattcacacagatcatcacaaattcgttcacaacatcaccaattcattcacagcacatcatcacaaaattattcaccaaaacattcacaaatcaacaacatccacaaatcataaaaaaaaataaagaaaaactcaaacaaatcaaaatctacattgtcgtgtgccacccgaccaccggccggcctcccatcccgccgccggccggccactcatcctgccgcctcccctccggccggatctggcggagaggagggcgacgccaccgccccgcacccggccaccatggtttattctatcccatcaaccaagagagtggaaaggatctatatgtgaaatgactctcatcctattatattatataacccgtcttccggaaggatatgatggcttttttttcaaaaaaaaaatcccagaggaaggagtatttctataaatttgtaaaaatatatatattcatttgatataaaataaaaagtttcaaacatattttaaaagaaaaaggcatgagtattatctattcatttctttcaaaacataatacggacatatgcgctcataaaacacgcagaaacaattaccctatggaatatgaatatacacttaatttccctatgagaaccgagactgagccgtcatattttaaaatgatggaatcatctcaagtgtctcagtgtcaatgtgtatatctcgctcaacaataaaagttaaattgacaataaatacgagcacctatgtcgagatagactagaagttaaacatgagtagatttttaccagaagtaacctaacccgttgttcacctatggttgtgtttgcaagagcaagttaccaacactcctctcttgttttccacgcgcacgcttttcaaactgctaaactgtgtgtttttgcaaaaagtttctatacgaaagttgtttaaaaaaaatcatattgatctatttttttaaaaaaaatagctaatacttaattaatcacatgctaatgaactaatccgttttccgtgcgcactgtgcaggttcccatcctcccctagcgaacacagccaatatttaatagacaaattaagttcagaactaaccatttgaaaggttaatacgggttcattcaatttccgctgcttatcttgtgtgcacaccacctctcgcagaacagaatgttagttgatgttttttttgtagctttaacttgcactctttcggtatgaaattggtacaaatctaaatttgtaaccttctctcatgtattagagtgcacctaaggctagcttctgatggtagatactgggcgggcctaatgggcgatcgatcgccagggcgattgcccagcgatcggtcccccccccctctcccttctccccttcctcctccccttcttttcctattacagtataccaaaaaaaaattaaaaaaaagttacaaaaatttatgtataaaaaatttaaattcaaatttaaatttgaatcgggtatgtaaatttttgacttataaactttggatctaaagtaaactttaggtgtataaactttagatgtataaaaatactatatatagaaaatatttgaattatttgaattcaaattcaaatttgaatcggatataattcaaattcaaatttgaatcgggtatataaactttaggtatataaactttagatgtatagaaatactatatatgaaaaatatttgaattcaaattcaaattcaaattcaaattcaaattgaatcagatataattcaaatttaaatttgaatcggatatataaattttaagtctataaactttaggtgtataaactttagatgtatagaaatactatatataaaaaatatttgaatttaaattcaaatttgaatcagataaataaacttttggtctctaaactttagatgtgtaaacttgaggtgtataaactttaggtgcataaatttactaaaatagaaaagtaatgcggtgccaaaaaaggaaaccaggtggagggagggagggggaggagggggggaggaattgatcgctctgatcgctcgcccagtagcatttccggtagatactccctccgttttataatgtaagactttctagaaatgtctaaatttattaacatctatataaatatataaatataggtaatgctagaaaaatttacattatgaaacaaatgaaacgaaggaagtatattctaaagtttgggattcgtttgatgtcgttggtttaacccagctttccttctaattaataaacattactagctaggtttgtccgagagactcccaactctcaattatctatatgattaataagcaaattcgtggataataactatacttgggacacagtaatatatcatgatgtagattggtttctagggtctaatcctttcttgacatatagtattttataattcttgtgaaaaattgaggactctatatgttggaagacaagattaagaaaacaaataatagggaaaataaatatttttatggaaatgcacatatagctagaggactgagaaatgcaagaaaagaaaaatataaaagaaggaccgtttacgatagatggtataaaagtgaaagaattttaggagagatgaaaactagaaatttttctatgagattaggcctcatgttaagggccctttaattcatagggaaaacacatataaaatttggagtatttcaattattcataagaaagcatttcaaataaaggattgaatcatcggaattattatagaatagataatcatatagagattttagagaaaaatcaacaatagctctaacttcttagaaaaattttctttaagactatctttcatccaattcatgcagtctattcatacgataaatcctgtgtttttcttatgttttgtaataatctgttttgcacacgcattacagtaaaaaaaatctatgtattttcttgctctatttttctcaatcctgcattcaatccaataaaaaattatcatgcgcactttatattaaagacggaagcagggtataactcttaattaacaccgaaaacaaatggaaaaatgaaagaaaaaactcaaacggaaagtaacgaaaccgttggatactctaatggattgtcccgtaggcaacaccaccaccgggaaatattcgccgacaaatttagcatatcctgtttatcctttctatagcgtagacgtcagtatagttcttgctttggggagctgttattctctcctctccaactccaaatccaaatccaccgtaatcatcattcatcagtacaattaatcaacattaaccgcctcattactctttagtgacccttaatttggtagccgtacagtgacagcccatctcctccacctcgccgtcgttgtttatcagcagcgagacgcggcgaagcaaaccaaactgaagaggaatttatgcacttcaccccctggtaaaattctccgagaaacaaatcgctcccacccctcgccgccgccgccgcgttgggtgggcgggggatcgatccggcggtgcccgcccgccatggggacggcgacgatggcgacggcggtgggggcggcggtggtgctgtatttcgtgctgagccggcggctggcccaggaggatgggggtggtgggggtgggggtggg

SEQ ID NO: 7037 - DNA, 37778 bp, Oryza sativa
catacattaaaatacggagggagtactacggtaatacccttgcattagacctaatgcgcttaaattcacatccctcctcccacctccagcattaactgcgggcctgtatcctcaccacagatccccaattccctcactcgcatatctgtaccatgcgccctccatgcgccctcgcattgcacttcctactttgcagtatgcactatgcccactaaatggctgctgctttttgacaggaaaatacattcatagaaagagaagggtgtccggcactaaagaattgtatttattttaaggattgacagctcagttctcttttcataaaaaatatatattattttaagagcaagaagttaagtttcagtttgccaacccattatttctccagatcattcgtctaatggtgaataatctgagttgaaccaatgctagcgtgggtgttaacatgctttcaaggaggagctaggcctacatttatttaggcttagggcctgttcactttgatgccaaaaaaaaccataccaaaatttggcattgccaaaattttggcatagttgccaaaattttggcatttgccaaaattttggcaacttaccaaaattttggcaggatttcttttatagttatcaaaatttggcagcaaactaaatgtggccacttttttggcaactttaccaaaatttggtaaggttgaaaatggcatcaaagtgaacaggcccttagagggcaagatcttcattttttgcaatcatggcttagatctgtataatcctcttgatttatagttaatagttttaacattttataaaattatacacagggggaatccctactgcttctgatataaataataataattctgagttgcatgtggcaaaacacaagtcttgggtaactgaatttgtgaagttacactatccaatccagtaaacaatatagacatcaagaaattattactaatgtccctgtttgtttctccttaggattgtaagaagctgatttttaatttaagaatatgattttaggaataattttagagtggtttttgtcattttcattgtccagctcctttttgtaattgtcagcaatacaggtaaaaaatctacataaattattcttaaaaatctaactttaaaatctaataatccacaagaaacaagaagggctgaattgccagtgtagatggtgcaaactaacctgacagcaacaagttgctcggggaccaacttctccaatatcaagcacataatcgacctggtctcctcgctcctgtgtctcccaccattcgttatccatgtgatgcacattttgttttgaggtgtcataatgtccaattactgatgaaacatctggggtaccaagattgtccacaaaacctttcatctgtaaatcctgaagagaagtatcttgcttggccttccggttgggaatgggctgtttccaatgggttttatttgggtgatctgagtgaccatgattgttatctaaaccattcagacctaactctccattatttgatgcctggtgatcaggctcatgaggcaaaagcaatggaatgtcctggcatgatgctggtgctttcaaggagcttaacttctggcctttaatatcctcaacatgagtctgtttacttacttcctcatttgattctttgattttacccatgtaatggggaattaccatgtgatgttgaggcatcaataagggaattgcttgctcatttggtgctttgttcctctgcataagattgagttgtcaatttcaacggtgatagggatgagtaatattaaccagtaaacatacctttgcatagttccagcgctgaacaaaatgccttgctatgtctcggcatgcaggaccataaagagcacactgaacatcatgccagggcatgcgaggatatttagtacgatcaagctcatctttcatggtgtcctcccaagaatttggctcagattcccttaaacaagatagtaaaatgcaattagataggcaaaaaaaaaggttttagaatcattaggaaacattaatcgtgttcggtaaattaggaaacactatcctataaatcttgagataaaaatatgatgagagcacaaaacattacctaggattgtagtaatcttttcctggccatattgaaggaggaacatccacaactttatgctcaggagtatcataacgaccaaagcataaatcaaggcctccaatatagcatacttgattatcaacaataacgattttctcatgatgtgaccttcaaggcaatagccaaccataaggatctaattaactgcagaaatagtgtaaatgagtgtaaagttctcaccgtaccataagtatatgccagttgagaaatgatcagggtatcgcagaactttaacattctcatgaatgtttaaaagcctctgtttgctgtacatgctgttaattttcaatgcaagagaaacttccttgtacaaaagaatatagatctgcaaaatagtaccaagtcatagttatctgaaacttgcagttgagaagaagtacgaattaactcataataagcaaacgcagatttgcttaaaaaaaaacaaatgctgcttagtgtcccacaaagaaatgaaatttatacacactttcttaaagaattatgtacaacaaagcatatattcagcaatcctagtgatcctactattcataagatatacttattttggtatgactacaccctcaaaatcttacaatctaccttgcttccccaatcctaccaacacataagtccccagtgagcactgtggcataactaatgttgcaccccacaatacacctctgacaatttacacaggatatcatctggaaagggtaaaaaaggaaacaaaagtataacaatactatttggtcaaattttacttgaacaaaggaaactatcagttaaatgccattattggatagtattgcattttattttctaactctctagcagtcaaaataaagcaaatagtatagcaaagtgatgttagcatatgcaaacgacatttgtcttggataaaagtgatggagtgctacgcaaggtaatcgggcaatctttgcatgcgccatggataaagtgcacctacgtgagaaatggaggcaacttttgcatctttcttggataaaagtgcaactacgtgagtaatggagataacccttgcaagatacacaatgcatgtttatcacttgtaaagagcttcagaacacataatgagtatttttggagaattacattcttcctctattagcacgacatgcagcttgtatcttcacaaatacagaacattacttactttaaaatgcatacagccaatatctgcaaagttaaacttcatacacttgtctattatcatctcatgtagacagctaccagttaaacatttgatgctaccaaatctgttacaaacaaataaatactgcaaagcggcaaaataatatatacgagtgcacaactgaacatgattttagcgcttgaactgattgataacaccataaaacaatcacatacctgtacaccttgctttgcccttgattctagaagaatatcaagtctagaggattcatgatggtggaaagggcgtcgaaggtacagttctgggcacagccaccaatcagtaatgaatatctgcatttaacagtttaattatcttccactgcatggtcaaaattttaacctttttcggaaatagtagttgagctaatgaaaatcaacctccgatttggcttcctcaattgaagaagcaatagcattaaacgcagcttgcccatcaagaaaccattgtacgacgctaccatcttcagtcaaacccctaggtggtgcgaatgaaccaaaacggtgtgggtgagaccaaccctctgggggtcgtcgagcagtatttattgcagatacccaatctttcactttagcagaacttcttgttctcaattttattgtccgccccccagaagacaccttcaacaagtattagcacttagaaacttacagtgaaaaaacagatgccgcatgcccacatttattgcatgctaccatcttggtttacaataggaagatcaaggccaaggccagtatcacaaaagagcttgagttttattaacatcagcggagtactatacattagttcctacgtttttctatgacagaactatggacagctgatttgtaccaggatatatagctgtagatcaactagggagcatatgtagaacaagtactaatataaggaacgtgcagaagatgggtgataaataaacctgttatggttactagtttctcaggaagaaactaaaatcaaaaatactttcataaagatccaactcctaggaagaagctcagcgactcccatgaagcactaaagaagattcaccatgagtcagagccttaggtgtatacccactctatcttgcttaacgaaagttcatggtatggatggagtacattggacaattatagcctcctgatcttactacaattatgttcatgtattggtctggtttcatctgacaaaaaggaaaatatggtcaaaaccttttggtcattggatgtatccaacaaacacagaccagttaacaatgatttggtatgagcattatccattttgttaaaaggagatgaagactagagtatcttgtgaagtgccaggcaagcaaaatgctatcaaaatgggaaatgccttctttagaaaattttactcgttttattcactcatgtcaccagttcaggcacacgtattagagcctagaggcatactagcatattgtttttctagatcatattttaacaatgatttttttcaactaaacttagaggagcgatgccagttgagactgtcgccaactcagaaacatgcttgctttaccatatttagaagtcatatgaaactagattttacaattacatcaactcagaaacatgcttgctttaccatatttagaagttaaatgaaactagattttacaattagatacaaacaaacacattttgttttgactggacttaaaacttatctgggtaacaaatcaggttaaagaggtccatgggtcaacaaagtcttaatgttgtggaagacggtgacaaggttataagtttttttttttcatttgagggaggaacacgctgtagaccagggcatacctcaaatgcaaagtgcaatggattatgttccttaatctctcttgctagagtgctttggccttctccatttctatccatgtgaggtgatacatcaaagataactatatccaaaagctttggatcaaatggatcttggagcaaagctaaaaatcctggcttcagtacagcccaaacctatgaagaagtgttcaatgtcacgggtcacaaacaaggactaataaggataaaaatagatataaaataacatcaatgcgcatcatttgataccttctgccagctactgttgcagaaactaaaacatccacacaaacaacatatgttactgctaccttcgtcaatttttggtaagtgtccaactgtaacataatcttcctttagcttaggcccatattctggtagaaatgataacagagagacttccaaaaatttacaaacctgcattttatttcatgttacagtccaaaagagggtagcaccacagaaatatatcctaattgacaaattcgatgtttttggtgatgtatagacattataaccaaaacaaatatgacgagagtatagagaaaatataggctttttggtacctctcttgagttgacaatttccatgtttcccaagaaatggttcagatattcttgcatggcaacctttgcacgatcagaaacagattgctgacgaccaagggctggacgaatgacaggcaagacagcactagagggaacatttctgcaacaaaagttttgtattcatttcttaatatgcacaggtaaacttatggcaagtcaactactccaattgcatcaataaactggttacagaaagatttcattgctgacgttttcgtcttcgttttagtccattaaggtcaaaattattaatagaacagcattacctatttttgacagagtgttcatcatgttgtgaaggaacatgcacgtcatccgcttcatcatcatcatgcacaactggaatatgctccccaattcccaaattttgaagccattccttgacctttaattttgtttgaaaagaaaaaagaggttggttcagtttcacgactgaaaaggaggttttgttctgagcagtgatatctctcctactatgaattagcagccgagtaattagagtagaaagagcagtggaacaaaggtctgaggattctctcattttttattaagtgcattcttcatggctataataataacaataggaatggcatactagagatgcttgcaacaaatattatatgtttccacaaacaagtggggcatgatagttcatggcgaatgaaatgcaaaatagtaaaccagagaaaattatgtttttcctaatacgtttacaacatacaataaaatgtcaaaatgactgtcaacaaaagtggtgctgcaaaacttccagtaacagatttttctggtgtccaatcacagcattcagcatttcaattgaaaagataaacagatgcaaatacagctaacgaactgtgatgattatgtaaccgacctgttcctgtttctcatggaattcctcaagaaatgcacgccttttcaacgcaaaatgtagatatagaacctgtgatgccttcttatatagaagccacctaaactgatagaagaactagttaacattaccgaaggataaaatgttcataattcgcatttcacagaactgtaaaatctcaacaatgcaaaaaggtgaaatgaaaatagcatgtcctggataataaaccactttcatatgatttttttttacagaaaaggaaaaccattttccttatggaaaagaggttcaggatacgaatccatagggaacagactaatggtgttagtttttttttacagaacatatcaactagacataagctgtgatagtgcacagctcatgttattccttgacttgggttttatgtttccatgtaacaaagcatacatgtgcatccaccaaattggaacctaacattacaagaagttcaaacagtacacttccttggacccaaaaaaaatgaattacagataggcataggtagtcaactctaaattcacgtgaaaataacatggaaatttcacagtcacacgcacagcactgtatctgatcccccccccaaaaaaaaaacaaagaattcgcctgcatttgcactgaaaatttaatgatcaggtcgcctgagtttcataccccaccgaatcagtgaaacaaagtaccaaccactctttcgtgcaagctccaccaagctactcattgacatagttgctacacagacaacagaaagggaccccttcttcttcttcttcttctttttttcttttcgttttctagcagcggtggaggctcactctatcttaaaccgcacaaaatcaggtagtatttttttcttttcattaaaaaaaagggaaaaacacattcagaagtcaattggaaatcaaatacgcgcaggcatcgacgaaacaaaccatcaaacatcaatttacgcaacaacactacaatgccaagcaccatggacgctgccgaatccaaccccgcctcaccaccgaatcgcgcaacccgtaccccaccccaaaacgaaaacccgagcaggaggaggggggaggaagcggacctgcttgtactggacctcgacggtgtaggagagcagcatgggcgtgatgtccccggcgtcgggccgcgacaccccgacgatcctcgcccgcggcagctcgtcgaacgcccccgccgactcgggaagccggaggaacgaccccgcccccgcagccgccgcctccccctccggctcctgcggcatcctcacgtatccccctccgtactcctccacctcctcctcctccgcctcctctccctcccgcgcagccgaccgccccccgctcatagagacacaacccacgaccacgagatttttacttccggagagagagagaatccggcgaggtgggggggaatcggggggagggcggcggttgggtgctcgttgatcggatgcggaatgcaacgggaaggaggaggagggaggaggtgaggtgacgaccggcaggtggagagggaggggggaggtggtgggatctaatattttccggttccgttttgagatggaattggatgggttggggacggtgacggggtgacggcacgggaggggcgtggagggacaggtggacgtggctgccccgctggtttcgggggcgtgggggccagccgtatgacgtggcatgggagagcgcctctagtgaagggcacacttcattcaatttggctcaactagaaaagggtcaaccatggcatctctgagcccattctcaactcaatggctagaatagtgtcaatagcattaaataaactgtcacctaaaaatctatgatgaaagatgatgtagcaagtgataaatgaggaaagagaaggaaactaggtctttgcatgagacatgatttctacacaatacccaagacatcatgtgagataagtagcattaaatttaagtatggaaaagtgatgtttgtattgaaagagtagtgtctagtactatctccattttaggttataagactttctagcattgcccacattcatataaatgttaatgaatttaggctcacatgtatgtctagattcattaccatatatatgaatgtggacaatgctagaaagtcttataatatgaaatggatgaagtattagtttcttgataatgtgaagtttataaaaattatatctaatgtcttaggttgggaatagcctgatgcaatgttgctgctagaatgtggtgacacgatagtaatctacttcctttttttaaactatgtagtaatctactagtaaaaggattcaagtcactgacacatatgggccatggcaaagtgaaaccacatgtcagtgactcaattgcttatacagtttagtcagagaatatgcttatatacagtgcgttgtcttaaaaaaatgtactatagttcacgtgaatatgagctaaaacaactcaagaaacaactagcatgttttaaatatataaaaggttttgtccacgtaattatatagccaaatcaccttatattctgatatagaggtagtaccttggaaagcaagaagctaaactctttcagtaaaaattactcacatatcttatctaaataaaatatgaagtcaccgagcaaaaaactttctatagaccaagtgtactgtaaaagataattcaatatttcatgggttaaagaaaacttctgccatgcctagtattgtttagcacttgaattgtcatgaattcatatgaccatcgaatcaagctcctatcactgactctataatcccgaactgtccttgccctttcctctctataaaacatcgtttaattaaactcgatgagaaaaatcgtttgaaaattaatcatccttcccagcaacggctagttagctcacgtaaaccatttgcattagctggtcccagtggatcgtgggacacccaattgactagtactacggtaaaaagataattaaaaacacctataggagtacaaaattatcctcgtcgtttttggcaaactacagccaagcaatttgactgatgctaacttaattaggccctctttgtttaggtttataagccaaaaagtctaagccaaaacaaacaagcagctttttcatttgtcttttttgaagccataagccactctaacactattaagccaaaagctatgttggagaagttttttttggcttatatgagatagatatatgactccaccactaaacttaggacattaaatctactggcttataaatcatataagccaataagctgacttaaaagtttaggccaataagtctaagcctaaagagggccttagtggcctcaaatgaaatgatccgtagggggtagttgatgcggacagatcgatggatggaatcagccggaggatcgcggggaaagggcgcgagaatatgcgtgttttgtgcggagatcattccttgcaagataccacctgacgtggcgcacgcaagtcgccgcgggagcggacacgcatatctccgtggcttttgattggggtttaacgtgagggtgatcattggaagaaaaaaaaatttaaattatattattgatttttttctaagaaatatgcgagatttaaatggatttgcataaatagatagtgtcacggtacgcagtacgaaatcgtaagaccaaagtgcgatagcgatgatggcatgatgacgcaagtggtcttgcagggcgagagtgctagatcgctcgctggttgccgtagcccggaaatgctactgggcgatcggattcttcccccctcctccctctcccatcctccacctggtttttttggcatcgtattattttcctattctagtaatttatttatgcacctaaagtttatacacctcaagtttacacatctaaagtttagagaccaaaagtttatatatccgattcaaatttgaatttgaattcaaatatattttatatatagtatttctatacatctaaagtttatacacctaaagtttatagacttaaagtttataagtccaaagtttatatatccgattcaaacttgaatttgaattcaaatatttttcatatatagtatttctatacatctaaagtttatacatctaaagtttatacacctaaagtttatagatctaaagtttatagacccattttaaatttgaatttgaattatatccgatttaaatttgaatttgaattcaaatattttctatatatagtatttctatacatctaaagtttatacacctaaagtttatagacccaaagtttataagtcaaaagtttacatacctgatttaaattttttatatatagtatactatatataaatttttctaactttttattttttaaaaaatttttgtgtggtgtactgtagcagaagagaagaaggggaggaggaagggggagaggagggagctgggtattgtatagggggaggagggcagatccagcgtattgtataggggaggggggcagatccagcgtatcgtataggggggaggggagcagatccgatcgcccattaccccccccccccccgggtagccagtaggagaagcctcggtctttattcctcgagcgacaccggccggaatgatgctaaggccactctcaatgggaagtttcacggcacggtttcacatacgccacatcatgtgtcaatgcattaaatgtgcatgaaactctcctgaaatgcccattgagactggcctaatgacacaattaataataatcttaatgagtaacaattaattacttcctccttccctaaattttgacgccgttgacttttctaaacatgtttgaccgttcgtcttattcaaaaacttttgtgaaatgtgtaaaattatatgtatacataatagtatatttaataataaatcaaatgatatgaaaataattaataattacttacttttttgaataagacgaatggtcaaacatttttaaaaaagtcaacggcgtcaaacattttggatggagggagtaattgttaatggtgctaattgatccattaatcacgcgagtgtcatggggctgtttactgtatcgttggtgtgaagctagctttttgcgtttgctgtgtgcttggcggacccaggattttaaccctgggtgtgcctatgtcacgagccaaatcatagctttcacagtttataaaaaagtatagtacaaatggttattattttgacgttgaaccagtaatgcattcttagaggaactgagcaaaaatataacaacaaaattgcaacttattcctattgtcttccgatattattcttccctattttgaatttccttataaccttgtgttgacgtaaaaacacgaggcctgggagatctgcttaactccagtacaggtccaaaacttgcctttgggtatgtgagcgtgccatttgatttgatcctgcaatcaacaagaaacaaagacaaagaaaccgcggttaaatccataaacgatagtcgatcggctagatgccgatgacatatcatttatctttgagccgatgtcatatatgcatcgatcggcggtcattaataagtaagaaagaactaaatctatttgatcggctgtagatattaacggtatatagtccttatatcgatatatacttaaatcaagtgattgggatagatcggtcgccatgccgagacagtataaatcacttagatcgaaatatatattaataacgagactatatgtgttcatagcatagccaatcagatagatctagcatgtatcggctaatactccgatactactctatattaagatatcacagcaagtaaaatataccaaatgaaagcctaatatacttaaatgcaataagatcttaatataaagggcagatttaacatgtcaatgaagcacataagatgaatatagttaaattaggtaagatcggctgaaaccccgatactaccctaatcggcaaccaaagacatgctagagattaaaattctaatcacgactcataagatcaaactcaactgatgcagctataagtatgaaaagaaagacaatatctagacaatcaagccgctggaagtttcatagagtggtggatatcctatataatctaagtcaacattgatatttaacctaatcggctgccttctactgacagatgttagccgattgtaggttagataacgatattgtcggagattatataagatatatgataactcgacgaattacatagacaagattagagtatcataaagatggaagcactaatcccgagaacgcaagccgccataacaagttttatctcttgttgaagatcaaaactgatgcagctcaacccgaaagcaagaacttgtcgaaacaaaacgaaagtaaaaagggtggcgatgcgccgagattatattgaacgtgtgttaatttgattacatggggctcgggtctatttatacccgagaattacaagatatgtccatatcggacacgactcttatccctaacaaactctaagataccataagtctttgcggcagacttttgcccaaacatatctctaagaaaattacataaaatatcctaattaatagatacaattgacttctcaggactctatccatgcacggcaatcatcatgaagcacgtcaacctaacccgacaacgcatgtcgtgccatattgtcggattcggctcaataggctaaccccgtctgactcgaactccgccgatcttagtcgtagccgattcggactcagccgatcttcactctgttttcatgataatctctatctcgaactccgtctcgatccctcctttacatccgatccttgaattaccaaatttggtcgttaacaccttgcatcaccatcacgagagtgaagccctggatatagccttggtgatgtagaacaagtgaaataaaatactccctccgtttcacaatgtaagactttctagcatttcccacatatatatagatgtttatgaatctaaacacatacatatgtctagattcattaatatctaaataaatgtgggcaatattagaaagtcttacattgtgaaacggaggaagtatgaaagaatgcctatgttcctcctcataattgattgattcaatttgacctaatcctagagatcatgcaacatgccttcactgatttggcatttccattttaatcaaatatagccatctaaggaaggaggatgagagattttgcaacttcagatattattttttcagggttttcaattaatccctgccaatgccaaagacaagattagagttatagaacaaaaatgagaaaagagtatacatgcacagcacggctgaaccctgctggtcaccgcagccgagtctccttgtcctcgttgccttgctgattggcgcgcttgccaccagaaggaacatgatgcggacatcactatttcggatacatacaacaacaatcctccaccggtcactaaaggaccgataacaagagctcgcgcgcaacaattgaatttagtggtgagctcgttcctatattcttctttgtacgaatttgagaatagattgctacctaatgattatattgtgattaggaacaatggaggggacaatgagacacttggagaaggacttagagtcataaacgatcatcgaggacgtccaagtcaaggtggaggcccaaacaaggtcgacttcgagtgcaattcggagtccagtaccagtatgcactaaaacgggcgcccagatcgcatacgtgctcggattggggcgttctttatatggatggaaagctaagaatataacatttccaatggttttggtcccacgtccaaattctttccgaatcaacagggattgaccgaacaagttgacgtccagaatctgttccggtgctgcatcaccgtatttgggcctttgagctgtgtatcgtgttggaacccattagggttgcgtcaagggttggttgcacgaccccaaactctatatatcagtacccgccgtcacctttagggtttggattttgcttagattattctgtcgagaacaattttgccgctagatcggtttgtaagacctcaacttgtgagcttaatcatttatctgcaattttggttgtattctaccttgttcttgtttgttttcttctattcgcaaacagggattagccttctcggtaaggtcatctgcgttttgacacgggtgataaccagaggagacatggtgctgcgattgcggggctcaagagcgtgtttgttcaagaagccggatcgatttgtgtcgcgactccacccaaatcgttgattatcagaacctttcagaatatcgagaaccctagtccacatcagaacacatgcacacgccaccgcatggttcttgtggtgagctatgcgagaacgataaaccactaggccttgatctgtcgacttcttgataaaaaacgaggcaccattcatcattcaggccaactgaagcatactagatccccttttttttccgtaaattttgggtatgccggtgcccacccgacacatccccagggtccacccctggcttaagtagagtactgagagggtacatgtgggaccggccaacagaaatggcaaacaggaggaatagaaacgggaaaggggagaaaaaagaaagaagatatgttttcggatacaatatgctgtaaagggtgtggttttgtgataaaagattgctgaacttgtgaattttgcgataaatatgtctcaaagcttggtgttttgtaataatttactgatatgctagtggacggttgaagagatgggtttgcagtgcttccactagcgcttttcagtgttatttaggtgaggtgataagtcctaagaagagaggttggagaagggggcaaaattaaaattttctattgtatttgttgagaaaccagtctattgtattgattaacacacaagcaaacaaacacataattgtgaaacacagaaaatatggacaagtggaagctttatttcttctagatttaagtataagctgcaagagaagaagaggaagtgcccgagatgggtcaacctcaccttggaccttcagagccctatttatacgcggaggaggttggcggcttgcgatgtaagttggtttccatggcaagcttgcttctcccgcaagctgtcttctcctgtaagcttgtttacgccacaagttttctttcgtgataagttatcttttggtataaactttcttctaatgcaagcttctttctatgctgacttttcactcttgtcttaattcatccacataaaaaacatatttcataacaatattgtgacatttatctgaatatattttggagtggcattttaaaaactagttaaaaccatatgatttgccgcggatacatggataattgcacggtactacctctgtctcaaaatataaaggattttgactagatatgacacataatacgaatctagacaaggagtttgtccatattcatagtattaggatgtgtcacatccgaccaaaatcccttatattttgggagatggaatatatattatagaaaggaagtgtcagggttatggataccacatacccaatagtaatcgactaagctcggcagggcccaccatatacgaagtcttataaggaatcatacctcgtatatagaaggagttctggataaggaaggacaataagagttctacatggaaacgacaaggactactcggattgtatccatattggtctccctagttctacttcgagaaggggacatctatgggtataaatacaagccccctaggaagagaggggacacgccacgagggcacaagatacacaagccaatgcaaaccaatatgtcaccagataccgacatcagagattagcctagacaaacccaatccggtgcctacggaggccgacaagagggattagcgctatctctgatctcgacgagttcatatttgaggaggaagacaactctgccgtcgactacgtgttggttatccatgccgccaaatcgacgaaagctagataggttatccaaatattgtacttgtgtgattcagatgaataagagcaacaccggcttcggccaacatgatgtagggctattacctgtcagataaggggcccaaacatgtataaaatccttgtctccatctcttttacctcaatctcacatataccctggtaccgacgatctccatactatccaaataccgtagtcgcgatctcaaacatcgacagtgtaagggtatacctgagaggctatacccgcctacagtatttgtatagtatgagaatcgttggtgcaagggtatatgcgggattgaggtaaaagagatggaagatggtgatttttatacaggttcgggtccttaactaacaggtaataaccctattcctgttggccgaaacatgagttgcctttatttgtcgaatatgaacttggcgagattggagttgtgttatattgacctgtcttcacctctgttagcctatcccctctacttccggggagtcttgtatttataccctcgggtgtccccttgtccaagtaaaactaggaaactaagtatggatacgatctgagtagtcctttcatgcctaagtagaactttgcttctccttccttatctagaacaccttccatatatgaggcttttgtataagacttgatatatggtgggcatcgccaagcctaacacaaaagttataggtatgtcttttctataacactgacaatactctatatgttgaaaaattgaaatgatgtgagaactatgattgacatgcttgaagtaataaattgtagatgatgtgacatagttgcatgagttttaaatgctctatataataattgatagtggatgatgatgtttcatatacgtatgttgagctttgaaagtagtgtgtacaacaatatagaagatgtagatatatctttggaagtggcattattgagttttctctctttcctaggctttatatcctgcttcttgggccttgactaggctagcttctcctgttctttgaacagctattcccgattggaataagtctattttaccttcctcaactctttgtgttgattgaatcccctccctcaaccgcaataccgagtataacatcttctccatcttcaaaaaccgatacaaatcgagtccctcaacggtttggtgaccacgtggcatgttgacttggtcttcatgccatgtggtgtctacgtggcacttacgtgtcatttagaaaaataaaaaataaaaaacttagtgggaccaacatgtcaatcaaacaaaaatgtaaaacatagtaggctcacatgttagtcttctctccctttacccctatccactcaacagaagcttgatcgccagcacagtccccttctcgtctcctcgaacatagcccggcaccagatctagcctcttccccatcccatggcgactgcgggaagaagggttacagggagggccgagcccgacagagacaacgacagtttctcctctcctctcttctccctactctctctctctctatctctcttccccttttctctccatccatctcttcgagcggagaaaaagacatcgacgatagtgatgggggacggtaggctggcgagggcctcagctgcgcctgtgatgtagctccgtcgtatcgcccacgacctcaactgtgctgcccagatgtacggtgcagtggagctacgctagtcgattccccctggcggcatcgcggtccccggagagaggccgatgggaagagatctggcaacaaggagcacatggatagagtagcgctgcttggtgggggggggggatccggcgactgccactctggaagatccacgccctttggaggctggctcaatgaggactgagactgactgtggcaggaggtgcacatccaagcattggaaccatcacggtagcgtatggcggcttggtagagctcgtcgtcaccgggatgggaagggggaaatggaggtcggggatgggagtgaagggggaggggacaagaggagaatggatgaccccatcattgtcaaccattatcgcgcttgcaatagctaccgctttcaccgacagccatcgagctcatctaccgaccgcctccgccgttgctgccccatcctcgccgaccgccaccttcccgtggacgagctagagagctcgccggccactgccgacgccggagatttggggaaaagagattgacacgtgggcccgctattttttatttttttcactaacatgtgggtcccatctagtttttttttattctagtaccacgtaagagccacatcatcatcacatggcacgaagaccaagtcaacatgccacgtaggaaaaaaaaccaccagccaaaccgtcgatggacttgcactagttttcaaagatagaggagccattatatccggtactatggttgtaggatgtgattcaactagttgataccccgcgcttcaccgcggaatatatggatgaatgcatcttatacattatagtgtatagaaatgataaatgtacatgtttaaataatgtggagataataatttgacattgattgcatattgatttttaaaaatacaagaaaattgcaaaatgatatgtcatatttgcatgatatttaaaatattctatataataattactagtgggtgataatgtggcacacttacatatgatttaaaatactctagataataattgctagtgggtgatgatatggcacacttgcatgtaatttaaaatgctctagataataattgctagtaggtgatgatgtgatatacttacatattaagtctttaaaaattattggacatcaactttacagtaagataagatccggggttagaaaagagggagatatgatagatctattccttcattgtcccttgctcacaacatattcttgggccttaagtgggccaaactccattaatctttgcacagccggccggttcacggttcgttggttcacaaagtaggcaacaaatcatcattgattaacgatcttaaggctgagttctttgtgttggaaactcaccttccatgtacgtaaaacttaacgatttattagcattagcgtatgattaattaaatactccctccatctatttttggtagacatattttcaaatctaaaaaaattatttttgattggcatatttcaatccaacaacctatcctcttaaagattttttcggatttaatgtgtgactccattttaccacaaaagattggttacatgggcatcgagaaatataaatattaatgaatcgctggtttacgaaaaataattagtagcatgtttaaataaatgataagtagaattacttatatttggtctgtgtgccaagatgaaatatgactatcaaaagtagacgaagtgagtattaagttttttttaaaaaaaataatatgctttttaaataatttccgtataaattttattgtaaaagtatatgttttagtagttcgaaaaatatgcacgtgaaaaagagagagttgagttgaaaaattcaactaaataactcagcctacgaccttatttagatgggactaaaacttttaagtccctatcacatcggatgtttggacactaattataaatattaaacgtagactattaataaaacccatccataatctttgactaattcgcgagacgaatctatttaattaggcttaaaaatttatctcgtaaattagcttttatttatataattattttttaagtagtctatatttaatagactaaattagtatctaaatgatccaaataccacctaaagttccaattcaagtcaggttcttaaacgaaacctaacaacattgtttatacttttgtttttgtcctgtactaggcattagatgatctcagccctttccctgctgaagctggacaaatggtaaatcccttgatcggtctatcccagcctcccaggctcgccgctaaacaactttaattaatttatctaaaataaagaggaagcatatcatcaactgctatcctcgtcacctctcccctcccgagttgacttcccctctcacgcgtattcaggttggttcgccatgccggcgcgaatgtccatcacatcggcgtcgcgtcgtctccgatgagtaaagctagtcggcggctgaaacaggaagggcgccttaacgtacgagaggacacaggtacaaattgttgtgcttttcaaatttgggcctagtttagtttctaactttttcttcaaacttttaacttttccatcacattaaaatttttctacacacgtaaacttctaactttttcatcgtatcgtttcaatttcaatcaaacttccaattttaacgtgaattaaacataccctggttcaactcgtcagcatggcagggttttactctttgaaatccgtatatctccctcgctttcatttcttctcgcttacgttttcttgccctttggtatggttatttcatatcatctgaaattgactttcgagattttgaagaaaacaggatgatcaaacatatatgcaagaccataaccatatagagatagttcacgatttttttaggaaaaagtacgaattaccctcccgaactatcgttgttaaccgaattaccccataaaccacaaaaccggacattcctcacccccaactatgcaaaccggacgaattacccctctcgacacaatccgcggtggttttggtctacgtggcgtacgcgtggcagtccggtcagcattctattcattaaaaaaaatgtgggacccactctcttctctctcttactctcactctcactctatgtcatctctctctcacgcgcacagcggcgaggacgaggggccggaggcggaccggagtatcgtactttttcctcttttttttgtttacgagcagttggtttgatagccagaccggagtatcaattcatcatttcattgttgaatcgggccgttcaattcctctattggaattagaaggatgatctgggctattttgattataggaattctataagaaattataggatttcaattttcataggatttattccatctcttccaaaataaatcaaaatttttatataagaatctagagggagagattaagtaccacacttgaaatagcggaacaggggacagaaaatagaaaatcgaaggaatacttccatggatctaccaacatactccatccatccataagagttagacttatttcatattttagtgtttccaaataaattatttctagtctctatacatccatgacataaattgaggggtaaattaaatgttagattagaacccgaacccgaggagctatattaatacttattggttgcatgcatgcatacactcattggtccttgttacgtgcaagatgagttaatttttctttgatcttgatgataaaaataatagtgtaacttttgtgaaagttgggagtataatacaaagatttattaaattcacaattaataaataaatttgctgaaagagggagactagggagacgggatgttgttagggtgatgtgagcttttacgatgctcgtgtcataacgatgttagagcaagtttaatagtagagctaactgctggccataaatcatctataacttaatagccaattctacaatagttacatataaacatatactacacaatcaatatctggtcccacctattactacacaatcaatatctggtcccacctattatatacacatgcgtcttagagtctgtactgcagctgactacaaatctgtagcccgctgtcttttctctccttttttatcttcttaaaatatgtttatagctggcttatagtctgctattatacctgctcttagcagctatttctggttgataactatttataccgcacatgatactgtcgataccagaaatgatatcggtaccatgataccaagatatcaaaggtgtcaaggtataatggctatgggtagacgtcgatctacctttgaaagggtcacttagacattgatgagggtgaatagataatttaaaataaaataagtaagctaaaatataaaccaggttagattttcttagactaaattctctatatacccttgaaaacaaacacaatccctttcatacccttgaaatttaccttatccattcgatacccctgaaattttaacttgatcctcttccatgcctctgcagttacattttccttcgtttcactgttaagtttggttgcaaatatcttttatgcccttgatgatttatgtttgaatataaacttgaaaaacgattgaaaattttgtttgagtacacgatatatgcattttatgaaaccaatgagactaaataattagagcataaaattttgccataaattttgaaaataaaacaaatgtaataaattattttttctatttaaaattttaataggacaatgaatttttttatcggggcattcatcaaaaaatatcataggcattggtagtcctatcttttctatggatactcctcattcttatgacttttttaaaaataaaataaatacatatttttattttattatctaaaataaattttatcctaaataatgtatctcacaacaaacacatatctataatagtctaatgcgacaaacttttatattttcaataatgtaattcataaatttctatgctcattcaaagggtaaaatggtcattgttggtattacttaacgacattactagaaatataattcccagcaatggcgcagaaatactcctggtatattatggttatagatttcatccgcaagcgcacggatataccattgtagcattttacccgagagtattccaaaggtatcgtatttgtttatcccgtggaaagattatagtagagagaatcgtactaataatttatatattacttgtaataaccatagtctaagcagggggttaatataagcagagggtagagtgatacacaagcataagactattcactctcatattaaattatccgagctaagtggaaagaaaatagaaaagaatatattcctatacttctagtatacataatatacatacatcctagctataagattaactagctaatacccttattccgatgccctcctggtacttcgagaagccaccccctactgccgagtttcttacgacagcccatcatgaccatacaaccggggctaaatacgaaggaataccctccccagggaattaactaaggactatatacacgcgcggaggaatacccgtaccgagctgtcaccatcagcggcccacctctcttccgcagcatataaccccaaataatgctacctagtaatctagacaccacgcctaaactaccaaatactactctaatatcatcgtcatgacatagaataattacataagcaaacattatacacgtaccgttgcatctcccagataagctagaagtataatcaacataactcagatataaagtaaaattggtattcatatactcaaaaagtattacaacaccagagttgtataaagaagaatattctaaataaagtacaagtcttacaaaagaagaaaggagagctactggagctatacccgaactcttccgaagacttccgaactcatacttctattctattcctactccactagcttgagaatactaaactaagtttgagagagtatgagagagcttgcttgaggtgtgtggagaaagtgagaagatgagctccttaaataggctgccaatgacggttgtggcagttggaatggtcggaattgccctccaaccgtcattggggagcgatccacgccgtccagaagaaaccctgcatccaacggtgccagggaggggttcggctgaaccaggggctgggccttcctagcctattttcagtaggtggcctcctcttttgatccctgtcacagacttgtggattttggtaaaattcaacgtgtcatttctgagttcttggcccattcatctgatttccgacatcatctgattgattgatcgtctgttttgattttgattctcctctattttatgtttattctctgcaagaggttagtaatcctagtgctaatggaatatttattattctaacactatttctcctttattttggtagtattgactgttgaaactgatcgttaacgactgtcaatagtcatttctatataaatttgatggtcaactgaggggaagggtatggaaagcatcaaaatcaaatttcaagggcatacaaggaagtaagcaaaattcaagagcatataaggaattagctaaaattttaggggtatacaagggattaacgaaaatcccttatgtacctataaattctcacgtaatcccttatgtgcccctaaattatgccttatcctctatgtacccttgggttttcatctttatcccctatgcgtattacatgagttgactaatttttcaaaaaatgtttatatcacccttgtgtctacttattgcttagagttgattgaagaaaaacacccttctcaacataaaagttgattcatttataaaaacaaacatgacataattactttatcataaatttgataactaaaatttagatttcttttaaataagtttcaaattagatttgatgaaatttgttcaaaatttttactgaaatttaaacccaaataagaaacaattttggtttttcaaattccgaataaaacttcttgtgtatttcatttttttttaaaaaaagcttgaaaatttatattttgttttggaaatccggtgtcaaatatgtcccttttgatttttatcatagattaagattatttttataacaggacttgtttttaaagtaggtaccataaagtacgggtaatatagtcattttgggataaatctaatggtcaattcatagtcaactcacgacaagggtatagaaggataaaaaaatctggagcgtactaaggatgaagtaaaattcaggggcatataagagattgagtgaaaactcgtgagtatgtaaggaattttctccaattgtttatacgcttgaaagtgtttgcaaaggaaaatggaacaatcgaatcgacatgaaacaaaaccaaaatcgctacagatcaatgacagagggagtgggagcgggagcgtatcgagggatgacaaaaacactatggggtcgaagaagggctcggatttaacagacgacaaaaacgttactaatgtgtaggtaaagataacgaaaaaattagtttgaaatggacgaagtaattgtttttggaaaaatataagcctttcaaagctaataaaaactttgataatagaagttactagcattaacgacagtaggcatgatcaggattcaggattcctctctgatgcttagcacagcccctgtctgtgccctctcacctgtttcttcacctacccaatctaacatggagtactgccttaacccaaactctcccaattcccctcttcaaacaactacgccgcctccatgagctccatcacggtgcttcgctggtgctggcgccttgttctccgctcttccccttgtcttcttcgcgctctatccttcaccaccgcctccgacaaccctatgctgcctctacaggcgacttctccatctccggcatccttctcgccaggcggacggacggttggtttgcttatggaaggtggatttgttggtgagtgagtgaccatgcagtggaggcatcctccgcgggggctaaggtgaggcagattcgccggggacatggagtcatgcgtctgcgcgtgcgcgtggccaactgcgcctaccgtggtggcactcttcgccaccggttatgaagaaggggtggctgaggcgcctcatgatgtcgatcccatggtgagacatcagaccggaataccatctctagagcagcagaaaattgttagaaatctgatgtcttagagagaacaagtctagtgctatgataaacgtggcagaagtaacacttacgaatcaactgttgcatgcattcttaacattcttcattatatgctacactaaacatgaacagtcagtcatgttatccatgtctgcgagttcagtttggcattgcatataacctttctttcagatgctagattaatcagttacaagtaaactaactaactttacttggccttgtttatgcagagggaggccacctgttgctttccaatttttctgctgggtcacgcatgaatagccaagacaataatcttaaaaatttctttcagacaaatgggcatgtggtttttcaaagagtggagaacaactgtagcctaagatattttacggaaaatgagatacggcaaatcacccgtggttatagcattttactgggaaaaggttcattcggtaaagtctacaaaggaatgctggatggtcgatgccctgttgctgtgaagcgatacatacatggaacccggaaagaggagtttgccaaggaggtgatagtacattctcaaataaatcacaagaatgttgttcgacttttgggctgctgcacggaggaaaatgctctaatgatcgttatggagtttatctgtaatgggaacctgaatgatatccttcattgcagcaacacaaatggacgtgttcctttctctttgggcaaacgtttagacattgccattgaggttgctgaagtgctctggtgcatgcattcaatgtataatcccgttctccatggtgacatcaaacctgctaatatacttgtggatgaaaatctttcaccaaagctatctgattttggaatagcaagattgctttgtgctaatggggctcaacatactaacaatatcattggatctataggttatgttgatcctgcattctgcatgaatggaattctaaccccaaagagtgatgtttacagctttggagtggttttgctggaaatcatcaccagaaaaaaagcagtggatgggaccatcacccttgctcagcgtttcactgaggctgttgaacaagggaagaaggtgatgcatttgtttgacgaggacatcaacaatacaaaaaacatgaacttcctcgaagatattggcaagttagcagttaaatgcttgaggagggaggttgaagtgcgtcctgaaatggttgaagtagcaactagtctaagaatgattaggaaagctctagaggaagaagagggaaatctgattcagcagaacataagtgcaccaagcaactcaattccttcaaagaatgtgaagtcatcagcacagcaatttggcaatctaaaaatctttaaacaagaggaaattaagcttatgacaaaaaactacagcatgaaatttagggaagagttctgtgaacggctgtacaatggagtcattggcacaacacatgcagttatagtaaagcaagtgagaacatcttcagaaagtgacagaatgatgtttctgaagactatgagcatactgtctcagaagtatcacaaaaatattgccaatgttgctggcttccacttaggggattccatttcagagtgtgtgtatgaatcttgctgtgatttatcccagggaaatgacggccatgtttgcttctgtaaccgaaacctttatgacattatctgcaccagggaaaaactcccccttcatctacgtttatcaatagccgtccagtgtgcagagggcctggttcatatccattcattgttagctgaaaatcctgattcacattctacaggcctcttgggaaacttcaggtcgatcaatatttttctggacaagaacttcgtgccaaaagtcttcaattctaatttatcaacatttcttgggctttcagtcatgcagaaacataccgcctctgtcgatcgtcctaatgaccaaagatcacaaatatattatttagatggaagggatatttctggtcagctgttcaatcccaagtctgatgtttatagctttggagctgttcttttggaactcatcacttggaagacagtgagatacatgtctagtggaagagttcacatgcttaccaaagacttccttgatacttatagaatagaccatagtgcagcgatatcttttggcaagaaggtttatgatgagcaaggtaagtgttttattcacgaggcaattgctattggagttgagtgcttacaactgatgtccagacgcggccaaaaatgagtgatgttctttcacgtcttcggaccatctctgcagctcagagtattagaagcaaactcatcatggctacacaaacaaaaggttgcacctcttagaccaataaatttgcacatttatcacatggaacatagtgcagtcaaacttctaagattttaaccactattgtatgaaaaaaatgccttacaaaatactacctttgcagcctttgtaattgtaattcaactacaagtttctcacacattgtattgctaatagctacaaaaccatggtgtgatatgaaagcaacttgaaatacaaatctaatggtaccattttaatatgactaggcatatatgtaacttgactaacggtaaaaacttacaaattttgaagtgtctacatggcttacaaaatcgaacagatgggtacctccattatacattttgtttttagtttttttacttgtacattattactccctttggtttcaaatttactcaaattaaaatggacaatgaattctgtcatagaaaaaccaatcacatttagcggtgatgttctttaagatgtattattctcatatcaaattttcaggtatagcaatactcattttaatcgaaattatgatagatgaatttaaatgtgcaccttgtttgcaaaaatataaatattattgtgctaagtacttaagtagcactccctctagccacaaatacttggacgttttagatacgatccagtcaaaattttaaaactttgatgtttaaaagttttattttaaaaacattaaaatgacatgtgtagatttgtctggttgtccagaaaggtacttccataatctcataaacttgtattttactacctccattcctaaaaaaattcctttttagctatgaacctagactgtgttgtccatgtttatagctaaaaaggcactcttcagaaagggaggtagcataaaattattgttaagagatgcactttaaagacattaaaaaaggtcaattttcaaatgtcaagtatcttttactggatggagtacaactaacaaaatacgaattttgtaagcagcaattaacttaatctattggattttattcttttggtttctccaatacagctagtggtgacaacaaaccaaaccaacatgtagcccctccccttaccaagaagtttgtcaaaactccaccaactattgtatcgatcattcccctgaacatattggagaagataactagcaacttcagtaatgatgccctaataggagagggcccagacgccagagttttctttggagagcttagtgatgggcagaaatctgcaataaagaagcttgatcctaatgaaaaaattgtagtgcaggtcatggatgcatgtcttgcctttcaccttttgagttgatgctctttattcatgagtacttgaagcaagggaatgccttctcaattccatgtgtcttgcaggttttgaccatttcaagaatgttgaagcatgacaacattgtccaaattcttggatattttattgaaggggaaaatcgtgttcttgcttatgagtatgcaccaaagggttccttgcacgatattcttcatggtaaggaataacaaaagatttttactttgacatattcctatcttgcttgcttactgtattatgatcaatagctgaaataatatgatttttttactacattactttatgtgttgaattgcttgttgcattactcaagagggtgtcagaggagcccagccaggaacacctctatcatgggagcagcgagtgaagattgctctaagtgctgcaaaagggcttgagttcctccacgagaaggctgtgcctcctgtcatccacaccaacatcaggtccaacaacatatttatctttggcaatgatgttgcaaaaataggtgacctcggcgtctccaagcagctttatcctgaaagtgataatgactactacaatacccgactatatcctctgcgcagttttggctatgatgcaattgcaccagagtatgcaatgaaagatttccatgcttgagtttcttacagtactagtgcctaagcttggatatgatatgcattatcctactgatatgttctttccttcgttggttcttgttaggtgtaggaggacaggacagtaaagtgtaaagagcgatatctacgctttggggctgtactgttggagcttttaactggtcgcaaagtagttgattattcacttccgcgtttccagcagagcctcataacatgggtacacatgcaacaagttcactcgctgatctaatttctttataggatgaagaagctaaactgttgacaatgagatgcaggctacaccaaggcttagtgaagacaaggtgaagcaatgcgtagatccaaagcttggaggagcattcccactcaaggctgttgccaaggtaataatattcctattcgaagctttgatgttactgtctgtgtttcgcaaacaatttgagattttgtggtgtatagtttacattttgaattgtgctttattttctaaagtaatgaattgtgcattttagtattgccgttttttcttacattatagatgcataataattttaagggaagtttcatgtgagatcatgttttgtctccatggaatctgaacttcgtcaggaaaactaatctgtagggtcaaacaatctgtttctgttctccactttaaaaaaaataacatgtggtttcttttgcacatatacctcgaggttggctcccatgcaaagttagagatgaggataggaagaccaacaaagtagggggccagggccttgtgaatctctacatataaaaccctcactggtcacacgcatagtggaaaaaaccggaccggggacggacccggtgagctcgtcggttcaccggtcggaccgccggttcatggctaattattttttaagtcataattgactttaaactgctaaatagaatatgtattgcattctaaccaacaaatttctatacttcacttcagaaaaaaaataacatagttatatacttcttttggaactttcaagattttgagtgtcatacatttttaaataattatgtattagatacatgaaaatcaattgtctaaaaaaactttatttatttaattttgtaattttattggattctataaacataccacaataaatcttttaaggaccatgacattatcccaattcccaaacaagttaccgtgaccagaggtagattaccaaccgtccttttaaaaaaaaaacaatttgtttaattatactcaagaaaattaaagttcaagtacaatgcacttatggagcatgtacttttgaatctattaataaagtaccataagcaagtcatattgtatactaggaaatactaccatgcaagggccattagagaccagacctgtctggtcaatcatctctgccaagtgccaacgtgtctattgatagtaggcggtccattaaggttattcaatcgtgcaaaaacatttaagagagatggttttctataataccttgttttggggagttcagagagttttttagacaaacaagatatttgaggggtaaaaatggacttatccttcttttttaaaactatttgatctgcatttgttcgccctcatttgttctcacatctcgaatatcaatcaaatcaaatagttataaaagatctgaagaaaatgctgatgttggtacagtagtcactatcataaaaaaaaaaattccaaactcaacctatagatcaagagagagagaacaaactaaactctatactaggtagtgtgagcactatttatagtcagatttttgttctacttttcaatttgtacaaaacggagtatattaagggggcgcaagcggcgagcgagattgctattgggcgatcagtcgcgcgcctccctccccgcgcgactggacacgtgtcgcgcgcggagagggggcggcgacgcgccgtgagggagcgagcttttcgtttttttttcccttttttcgtttatgttcgttttttttcattcggttttttgtttggtttttttctctggtttttttctgttcggtttgtttttttccggtttatcttctttcggtttttttccttttttttaaagatgtataaatacaaagtttgtattcgtatatataccaagtttgtattcgtatatacaccaagtttgtattcgtacgaatagaactttctatacgcgcatacaaactttctatatgtgcatacaaactttctatacatgtatacaaactttctatggacgtatacaaactttctatacatgtatacaaactttctatacgcgtatacaaagtttgtaaacacatatacaaaatttatatacgcttatacaaactttgtgtatgtgtgtatatattttttatgcattaaaatatattcgtatatatatatatacacgtgtatatatatagtatataatatatacgtatatacataagatgtatatagtacctatgagagagactagagggggggttagaggggggggtgactgaccgcgcgcctccgcgcgcgcgcggctgatcgcgtatcagcaccccccagcggcgagtgctcgcgcgtgccacgtcggattttctctacagcgaacggtggaaatttgcgaaaaaccctccggtttgttcgtaatcccaaataggttcctgccgaacagtgcccctgagatgatattctacgtaagggcccttctaaaatctggatattacatgcgggggaggggaaacacgcgaaataggactgcgctgtaaaaatcgaaggtcgaggggctttttcgtaaagttccgcgcaataacccgcgccccaaccctagccgcctccgccccgcctctcctcgactcctcctccctctcgtcatgcgccgtccctctccctctcacgccgccgcccgcctctcctcctccctctcgtccccccgccgcctctccctcgcgccgccgccgtcgcgtcctcgtcgcctccgcctccgcccacaaaccacattttttcttgggggttctgcggttcttgggcgaggagaggagatgaaggagatggtggttgggtcggtggcttcggcgccggtggggaggtggggggcggcgtcgcccaggtgctcctggagaggatgaaggattacgggcaggagggcgttcacgctttgggacaacctctcgcctgaggacctggaactgctcgtcagggatatcgaggtgagtaagcccaatgcgctgcaggttgggagaattttgcgtcaaatgttgcttcttgcgttggtaacttttttccaatcgggagcttctgtccgtttctatttgccagggacgaactctgtataaaagtttgatatttttgccggaattctgcctgaaagctctggtcctgaatgtggttttggtctaagtatgaattctgtaggagtagcagttgatttatcaattgaaagttttactacggttcgtgggaagaggagtttggattccagtgataatttacttcacactttcacagttttgttgtcactatcaacaattatttatctgctctccatgggtcttaatcttcattgtttacactgcaaaatagcacaagagaaacccgcagcatgtttttgttgtcatttgagctagccatttcaacagtgactaatggacctacatataatgcatttttttcagagcctagatctttcaaggattgatcggatcatccagcgctcccttggatcacctcatgcgaaaaaaaaaatgtctttccaatgtagaacattagagttatttataattttgtcatcacacttgccttaggttttttggataatgaaagctttacagaactcagtcaattacatcaagatgataaaaccgtactgtgaaactttcttagtacttgccttaatcttatggtgtgattaatgttctttccaagtgcaggcttcctttgcccaccgtcaagctggtgtcggagtccagcgtgttgaaggtagaggagaggtcggtggtggaacaaggggctgaaggccatttcggaggggaagctagccgttatccttttagccggtggtgagatgctctaatagaaagattacctgaatttgctatttctgtactgtgtgcattgggaagcagcctccttatggtttgattcctcttcatgtgtgtgcaggagacttggcctggcagctctgatcctaaagggtgtttcggtaggttgattccactgcaatcttattaataattgactttatatgaacaaatgtatggatattttttcagttgaaaaaagtgaggtgctctgaattgtttttgttttacacaatgtttttttggttcagaaaccctttcaatattctaatgtgatgaacaaggttatgtcctttgagctcactgaatctgaaattttcaccttttatcttatttcacagttcaacatctggtgggataatcgatagagctatatatgcagaggataggacatggtgactttatgaaattggtaattgccatttgatgtactacaataaaaagttactttaactggcggagtacagtattaacaatctgctttttagtctgtaacagtgaaatatcttggaatatatgtcgattacttaagatcttgttgaaggatatctggaattggctgcagagacaatcatttttgtggcagtcatgcccgggtagggtgtagagtactgcattacagtggatgttgatctacatgtaagtataggtgtttgaactactgccctctaatttagcatcatcttgagtcttttttctccatgcttaaatttaatttgttcatagttcagacatttcatctttattaaattaaatttatgctaagtatttggcatacaaactgtacactctaagttgacaaatctcatatatgctattatctccaaagatgttgcttccaaagataaaaactcaaaatctttagattttaaaattctatctcaaatctagtgggactgcactcaacttagttgatttgtgattgtttggtgaaacaatgtagtttttcaaataattatacttaacttatcacctatgtatagcttactgcaaagcataactcatgtatttcagtattgcatttctccttgcttttcaccaaataatatatagtacttgaactctatagtttcccgtcctgaatttgacaagaataagctaaaattacgggtaaagtttgctttggagtgtaaatttgctattctgccatagatttatagttacagctgggagctatttctagacagtcaactctcctgaaaatcgattcatattccaaaggcaaggcatcaggtatacctaacctctctttctatctaaattgatttgctttcttcccaggatataatcaaatacaaacaattacaaataacaaaatacggagtaacacaaaggcagttactaaagactccctatagtgttgtcactcgcattttagcatagcgatctcccacggacaaagttgtgctgaaacacggtctacatctatcatatagtgctgcagcatatgacctcataaaattttcagccctaccacccaccaacaacagaagatattcactaagtcgcttcagtgctacacgttctagcaatgcctacgaacatctatagacattgttattcatttacatcatctgcatcttcccatccaatgaaaactcacatacaaatatattcgtgcaggtaaccgcgggcgtacatttagggagctgtgcttttgcgaaaaaaaatgtccagcccacaactgatctaaaaaagtacatcgaagctattaagcggttcctacaccattcaagcagcttctatgctgtaaccatcaacagcacattcatcaagcaagatagagttgtaagctcttgcaacaattatttatttttcccacccctatcattcatgataatattgcttttctaccactaataaagaactaacataccgtgcaattacagtactttacaaaggaattttcacagaactacataaaaccgctaatggaaggtaaaaaaccgtcgacactgaagtacaagtagcaggaggtatttcaaccagcatgatcctccacgtttcaacagatgaccgttgcaacttgaagaaagggtggacaaagttcgcagcacagatgacatagctctcggatcagtttgcatcttccatttctacaggacaacctgcctggaggttactattgatgtcctgtgaagaccatatgggcattcatagctatcttatgatcatgcttctgctgccagtaaacaagctgatcactatcaggatcggccgcttccctcccctggaattgttaccatgcttattagttctacaccttaggtgcttactatccatagtgcactagcttggacattttaagaaacgtctgtgtatatccatgttgctgctaaagactactagatatcggtatgcctataactgtttggcactgcagtttacttctatttcacttcctgctttcttgctctcttttttaacaccaaagaatacttacatttatatctcatcatctggcgtctttgctaattacccatttcttgcccaccgtaattccgctcaggtggcgcgccaacggcacgccccaggttctagttgattttaaacttgtatgtttatggagtgatataacataatgaattacgttagcaattttttttaaaaaaaatcattactaattaattggtatgcaagtaatggtggtatatcatgttaagggatgacatgactttccctaagtgctactctatacaaatgtagagtgtgtttccttcccaagttatatacacattaacgtttttggggtcactactggaaaaatcattgagtaaaatacaccagcggttcttaaacttgtcaggaggtttcacttagatccacgaacttgcaaagtgcacatcgagatccctaaacttggtttattatatcattccggttcaaagccgcatttgactgtggtatagcctacgtggcacatcacgtggataatgacatggaattttttttatttttttctcccttcttccttctttttttctctttcttcgggctgc

SEQ ID NO: 7038 - DNA, 22122 bp, Oryza sativa
  unsure (1)..(22122): unsure at all n locations
tccaccggtgggcggggggtagtagatgcctccaccgccggtgctgctgccgcctccaccgccgctgtaggaaggtggcggcgaggtgtacatgacggtgcctccgcctccgccaccgcctccgccgaggggtagaaaggtggcggcgggcactgcggcgtgggggtgacgaccggcggcgggggtggcgggtagtagaaggggttgcaggggttgtcgcaggaggcgcagagcttgcaggtggtgccgtccttgagcacgatggtggtggcgccctcgtcgttgggcggcggggcggcattggcgagggcgaggctctccgcgaggaggaggaggaggaagaggtggagcgccatggcgaggagagagtgagagagacgagggggaaggtggtgatggggatgggagtgggagtgaagtggaaggagggggggggggggggtattaatttggtggaggtagcagcgcaaagcaaggtggcgtggtcggctgctgctctctcctcctcggctcagcgattgcgctcttgtttttttcctctccatgtttgtgtaaagaaatggtgaattggaagggaagatgactcgacgagtaaaaaaaaccaaggagcagtttctcacggagcaaacgcgtacgctaacgctagatggccttttcttctttttttttttcgatcgtcgtggtacaatgcgtgcacgtgaacatgtacaacaaccatcgtcaaagaggataggaagaacgacatactactgcagtactagtgcagtagtgctacgcatttccgcactttttactcttcgtgggatccgtccgggcagttggatccttccagatccatccgcgttcgttcacattgactctggccttggccttactgcgtctcacacactctcatgtgcgctcctgctggcaggcagcaacgaaacacacacacgacgggcacccgcaccagcacgtgtcggccccgttccgccgccccatcggacgtcctaccaccaccaccggttggattcttgtgcagcggcgcggcgcgcgtacaagcggccgtgcacggtgaacgagacgggagcacgcagcggcggcaggggggtcagtttccacccggaggaggcggaagctgcgtggaggtgtcgactcgaacgcacgcaaccgtgcacgcacaccgctagatcggactcatcaaccccggcgttttccacatgcgtgcgcacgggtactctcgctcgggcggccgctgtatgggcggcggcgttggccccgcgcgcgtcaactcagtagtcagctagctctcgtggctggatcggatcggtcgccgccttgcataccgaccgttcgccgtgaggagagatctgcgttctgcaattctgcacgcatgaagtagctacaagtggggagagggaatagttaattggggtgatataggttgatctgcaacgacggacacgagcaacggcctgatgcatatttccgcgggtatccacatgcatgcgtgatgttgaagtgtttgtgtttagcttaactgccacttgcagcttccgtccattttgggattgcatgtctgtgtagtagtactccgtggtagtactagtactagaatattttggttgttggggaatggcaaattaaagcacgagttgtggacggttgaaacacggtcggtccgaactctgaacatgccgtgagcccgcgacgcggcgtgtcaacactagccaacaatcactgtatccatgcaaaatttgtcacttgcctacccaaattgtacctgtgatctgtcgaagctataggttgtacccttctgtagtactgatcaaaagcaggttttcctcctccagaaataataatcacgtcgtaacaatactaaaagagggaggatgcactaatctttctgccacagctgcaggtatcctctctctctctctctctctctctctctctctctcacagtagctctttacacctcagagatccatcatgatacgaacgagcgatccccgccttccagaagacacattgcacatggggggcagtcaagcaaactgatcaagctgagggcgcagacaacagaacatactacggagcagccaaaaatgacaggccggccagccaccgctctgcccactgccctgcactgcacaacaacccccaccatcccaatcaaactcagttgaggctcagccccacgccgtggtgcgtgtaaaactggtagaaatcgccgaacgggctgatccgctgaggcttcggccggagtaaggtggcgatagtggtagtggggttggtggtgcggtgcctgaaccggaatctccacgcatgcctgtgtcactgtttgtgtgatggtcatacctgtgtcactgtgtgtgtgtgtgacggtgcgttgggcccgcagctcggtcaaacgttgtgttgttcggtctgtttgatggtcggggggagcggacggacggtgcgtttggttcggtagattagtctgtggatgtagggtaaaaacggtacggaaaagggaggaaagcatatttatcgttttcgtttttattttttttaattggaattggaaacctcggatacgaaaacgaaatcaaatattatcgaaatcgaaaacggagataaaataaaccggcgcgaatacggtaacgaaaatttatcggaataaaaaacccctcaaactgataaatccaattctcaagtctcaacggtcaacaatctatctattatatctataaagtaataaaaaaagatcctccacgtccgctctcatggtctagaaattctcacattaataaaaaaaaaagaaaaatagaactagattaggattagtattagttaaaaactgaagaaaggaaaaaaaaaaggcatactaagatacttgaatcggacagcagtcaaaaactttaaaaaggaaaaccaaatcatattatacactggaaacagataatgttatgagaatccgcgtgttcacaccgcttttagaaacattgaaagacaaaccagtactaatcaaactctgccggttccgaattctattgttcgctctcacgcgctagaaattctcacattaatcgaaagaaaatataaggaaatatagaaaagatcaagaccgtagaacatattttgcttcagattatacgttgtagattgctttcgtaggatccaggaaacggacaaggtttctttcgatttagaaagggtgaatagtcagttcagtccttcaacttttgctcagaggtcgaattagtcctttatattttataatgtccaaacaggaccctaaaaattatcatacggcttaatatagtccttatacccacttaaaacgccacatggacatgccacgtcattcgtgcatgtaagataacatttaaatgtccattttaaccttcaattttctatcaaacaaagaaaagaaaataagaagaagcaatcataaaacaaaaaatgttattttttttatctatcaatgctacatatttttgccaatggtcaaaaacttttttttgtgtgtgttttctcaatagtttttctttatttcctataaaaacataagggtgtaaaggacatttaaatattgaatttacatgcatagatgatgtggcatgtacacatggcatgtttagagggtctaaggaccatattgaatcacacaatgaacttaaggtatttgtttggacaacacgaaatgtcagggactaaattgatccttaagtgaaagttcaaggatcatgttgggtattcacccatttagaaaggaaaaagtacgaatcacccccccccccccgaactatcgcggtcgtccgaattacccccctgaaccataaaaccggacattattcacccccaactatgcaaaccggatgaattacccccctaacccaatccgcggtggttttggtctacgtggcgtatacgtggcagtacagtcagcattttatttattaaaaaaatatgggtcccacctgtcatactcctattccattattcctcttcctcttctctctcactcttcctctctctctcttctctcactctcaactatgcaagcagcgggcggaggagctgaggcgagccgcggaggaggcgagcgcagtggcggaggaggcgaggcatcggcgaggaagggccgcgcaggggcgggcgcgagcagcggctgggtggcgagcggcggcggggtgcggcggaggaggcatgtactatcttatcccgagcccaaccattttcgtcacgacccaagctggcatgctgccatttgccactgtgcacgtctgcatcgtccgccaacgagcacgtacgacgagcttacctagctagctgactgctcgagacgtgcgatttttactcctcgcggtaaacgattcttgtgaaggccaggtctccggcgctccatgtagccaccgctccctcgccgatggtagtatagcatggtggggggtttagtgctctcccaggcgcagcaccaggtcgggatcgccgcgagtcgccggcgcaggcgcaagtggcggagcaggccgccttcaggggaagggatcaccgggcgccatgcgagagcctggacgaggcgaggaaggcgcacgcgcgacacgtcaagctcggcgtcgaccgctcgctgcggcacgcgcggccgctcctcgcggcgtgcgcgctcgccgccgactggcccgggagcatggcctacgcggcgtccatcttcgcggcgctcgacgaccctgaggcgttcgactacaacaccctgacgcgcgactactccgcgtcacccgccgctgccgcccccgccgccgctctgtccctcgcctgccaccgccgcctccgcgtcacccgccgaggccgacgctgctctgtcccctgcctgccgcccatgagagagaggaagagtgagagagaagagagaggaagagtgggaggaaaacaggtgggtcccataacttttttaaaaatagaattgctgactggactgtcacgtaggctaaaaccaccgcagattgggtcgagggggggtaattcgtccggtttacatagttgggggtgaagaatgtttggttttgtggttcatgggataattcagacgaccgtgatagttctggggagtaattcgtgctttttcctttagaaaacgtatcggacactaattttgaaaccgtgtgagacactaataaaagacagactaaaaaaccatcatcgtcagattcatgcaatctgaattgtacacaaattacatgccatggtaatatataaatagtacgccagaaatcatctctccacaatccaccgcaacaaaaaaagaaaggaaaaaaagattgagtactatttatgaaactctctaccagccaaaaagacatcaaaagggatccgacttttagcgatgaaaaaattgtgagataaaagcaagtatttcaggaaaatagcaactaactgatgctctaaaataccatagagctgaaacgatatcaaaacaagaaggcaaactcaatctattatcttaataaagaaatagaaataaaaaaaaaggagccaccactttcatagactaaaaatttccacatgaattagagagaaatattaaaaattctaatatatgaaaaaagagcccagatggaaactaatagaaaaaaggagccaccacgtttgctctcacggtctagaaattcccacattaatcggagaaaaaaaagtagagtatataggaatacaatttaaaaatagctaaaattcggtattaaaaataagaaatattgaaagaatagactagagtccatacaagcatacaatttagaattaattaaaattcggaattaaaaaataggaaaactaaaattagaagttagagtccatatagaaatacaattttagaattaactaaattcaaaattaaaaaaagtaagattgggagaagagtcatagtctatatttgaatacaatttataaataactgaaattcgaaattaacaaataaggaatactaagtaaaaaaagtctagcgtccatataggaatataatttagaaataactaaaattagaaaaaagaaatattgaaaaaagaagtctagagtcaatataggaacatagtttaccaacaactgaaattcaaaataaaaaaaataaaaaatattgaaagaagagtttagagttcatatagaaatataatttataaataaataaaaatgaatattggaagagtagtttagaatccatataggaatagaatttatgaacaaaggaaattcgaaagtagagtccatataggaatacaacttaaaaatagctgaaattcggtattaaaaataaggaatattgaaatagtagactagagtccatacaagcatacaatttagaattaattaaaattcggaattaaaaaataggaaaaagtaaaattagaagttagagtctgtatagaaatacaatttagaattaactaaaattaaaaattttaaaaaaagtaagattgggagaagagtcatagtccatatatgaatacaatttataaataactgaaattcgaaattaacaaataaggaatactgggaaaaaagtctagcgtccatataggaatacaatttagaaataactaaaattaaaaaagaaatattgaaaaaagaagtctagagtcaatataggaatacagtttaccaataattgaaattcaaaattttaaaaataaaaaatattgaaagaagagtttagagatcatatagaaatacaatttataaataactaaaattcagagttaagaaaaatgaatattggaagagtagtctagaatccatataggaatagaatttatgaacaaaggaaattcgaagtttaaaaataaggaatattaaaagatgattcttgagtccatatagaaatataatttataaataactatcacgtatatacaatacaataaaaatatcacacatttattagttcaaccaagaatttaaaattatgttgttattttaatatattttaataataaaatgtgaaaatatttaaactattgtataagaaaaaaaatctaacaatgctagcggcgcaatctgcgcgggtcgccatgttagctcatcataaaacacaatcatataggtccaattgttaagtctcaacagtacatcacaaaacgcaatgtacggaataaattatctatgtttaagagagtaacactgttgataaatcccaatacatgaaaaaaatattcttatgtaacttcaaatttgaataacaattatttttaaaaaataacagccaaacaccatggtattcactattcagtgcttaaaaaataatccagggtattttagtcacaaaatttctacaaattccaagaaaatttctggaaagttttcgaccgattccgagtttcgacggaaactgcgcttatcattttcgatttcgtttccgagaaaatatttccgaattcgttttcgtttccaaaaaattctgactgacaaattccattttcgaaaataggttcggaatccgaaaaatttatgtaccgtttcacccctatctggatggaagatgttgctcgattttttttgttgtgtatggttgagagatatggtggatggggcagtccagaaaagaaaatattctctcaatatgatggttgagtgaatcctaccaatttagtcgtatgaatgtaacatcctggcctagagcttaataggattaatagaatactcatatcaacaagttgcaacttcttttccggaagccaatctccaaagaactccaggcctagggcttaataggattaatagaatactcatatcaacaagttgcaacttcttttccggaagccaatctccaaagaactccagggttaggataaagtgtgcagaaaagacatgtgttggtctgtgagggcagtctatgacctatgaaagctatcagatgtaagtgggcctggcctgggggaaggcgggacgttacaatgaagccatgcatgttttggtttggggtgatgtggtctattttgataggcggtggttggtttaattttctgttagcaagcttcaaatgatttttttctcctaaaccgtttatctaattcgtgatccgattacatcattatatttattacaattaaatatttaaaacaagatcgattatattttgataaaaaaattatatcacaaataggcccactaaaaatgttggcttatcccatccatgttatactcttccaaaaaaaataaactgaatcattctatccatacaaataaaaaaaattaatcaccatatccaactaaacatgaatggctatatcctatccacacttttagctagcagcttccctgtagtttggtcggtctcacccggcacgacggcacctggggtcgggtccacgcatgttgcacgcacaaaggtgccacgacctttgcaccactgccgatgtcttcttcatcagccatcaataagagagacacactgtcgatgggatacccatggacttataatataggtattggggtacgttggtatgataatatacacaatttaacatcaaacaaacaaatgggtaagaattatactggtacaatagataacggttgatttataaaaggggcatcggcccagactcgatggcggtgtggcacgggtgaagccgaagggagggagttgcggcttgtcctagactctcaactcaactcatctggttctcttaggcttgcgctgttggtttttgttttgggctattggatttggttacttgggcctaatttttttttaggtttttttggttttttttagggggttgttctctgggttaaaatcagagtaattacagtcaaacggagaggttagggctaatttataaacggatttgtaaaatgttgtcgccatattttatggctgattacagtcaaattggatgctctgtgctggatcgttgttcttgttcacagtccacctcaagtcctcagcatctctaccgattctctctttgcttttttactttatatgtgtgaatctatataggtaatatcaactagataatcaatcattttgaattatttctagccccttacttatggtgtaagtatattaaatttacaatgtaattacacaatacaaatttttactattataaaaattgaattgaaaatatttttcctggtattttggtacgtcatccgtgtttgggtcggtttttaaatttgttcgcttttgaaaatgcatgtccgtgtttgagttggaattaaacacattttcttttgaaaatacaaaagaagttatataagaaatctctttaaaaaaactcgcatgataacttgatatgaaatactggctcctaattgaaatacgggctcctagttatagctcatgattttcttaaaaaatatccaagcgaattcccacgataaattttatcctagctaaaccatataacaataataaaattaaaatagcatttacacgttgcaaagcacgggtattttttctagtatatataatttacaatgtaaaaaaatcactgttttttatgaaaatcgtggtgccataatataggtcgtggaggaagacaggcacagccgtgctgctggctgtagcatccatagttccatacatgatgctagtacacgggaagtgcaggaaagatgaaggccggaagccagtgtaggatgtatacggagtatgctgctgcatattcacctgcgtcgagcccttgacgattgatcgctaggaggaggcgtataggacggtcaatatgggataggagtatataggacgaagcttacaagcgaaggcattgggggtcggagaagaacgcccggggaaagaatggcagagcacgacagcgcctttgctaactgctagattgtgaacttttgggccggatcctttccctttatcagcggccctttttctttgcttctggcctaattagctagctggtctctagattgcatctttacttctaccgcaatctattcatgactcatcgtagaatcagtatagcgctggtttatttcatgttgcgcacatacgtccaatctgtacgtagtagtagcagctaggcagtagtcgatcgacaaatctttgcaaacatcgaacgacgtacgtaatgagctgatgaagtaaaagcacggtcggaatcggtagtatctcttctagatgatcatatttatcatttattatactactaagtgtcgatattaatacgatgtagaaataaattaaaaaaacaaaatttatatatagcccaaaacaacaacgagaacaatattcttataagaaaacggcgctcgatcaatcaagaatttccgtggtcatttttaccccaaaaaaattatatataacccaaaacaacgagatcagtatccttataagaaaacggcgctagatcaattaagaatttttgtgatcattttcaccccggctgatgggctgatggcagccagaggctttggtccacaataatcgaccatgcaatgcatgccttaaatgctgcaggtgatacgtacaccttagttatataacactacttcgatgatgctgacggctactaatcatccactatcacggctaggctttaattaatcattgtaacgaaatggccgaacatctccatacgtcacgtcacgtctggtgatgatcgatcgatctcatttatcagttcattcacacgtcattatccatgcattcgactactcgagagtcatagtcatactgcctccgttctaaaatactccctccatcctataaaaaaccaacctaacactagatatgacatatcctagccctacgaatctggacatacatctatccaattcgttgtactggaatgtgtcacatccaattctaaatttgtttttctcgacggagagagtataagtgtaatcgcgggtatctgtgcccaaaatttaacggttcatgttatttaaaaaaattatgaaaaaaattagaaaattagttacacataaaatactattaatgttttatcatctaataacaataaaaatactaatcataaaatattttaaaataagacgaacggttaaacgttgaaaattaacaatgcagaactatatttattttgggacggatatatttattttgggacggatgaagtagttgttatatatgcccgcctttttaatttgttcaatcttgtgtactaataaactcggccgatcaacgacaaaattgttgaagagatcactcaatctcgacaccggcgaagacagaaaaagaaaaaaaaaaacctaaaaataacttgtctcttttcttcactaccaaaaataattgtttggtgaggtgatgacttgagtcaacctcttggttaagaccaatgccctacggttttgctaaaaaaaactgatgatatttttttcctggttgatgctaagtttttagaacatactacttatgatggattttcagataagcccaatgccctaagcaaccagatactccctccatagttataaaggaagtcgtttagaacaatgtttaagttaaaccttgggaatataaatcataaataactctcaagttgttgaatttgaaaatgtaaaaattatatgaatagatttgtcttgaaaaatactttcataaaagtatgtatatacatatacatacatacatacatacatacatatatatatatatatatatatatatatatatatatatatatatatatatatatatcactttttaataaactaggaaggtagctcacgcattcgcacgggcatgtgctgtacgtaggataaatttgagaaacttataacggcggtataccagcgaaataatatctgcaacgtttcataattatgttttctcatgaattttcttcattagaattgcatgatgaatttaattgttatttataaaattacctattggagattagggttggtaacttacggtataaaagatggtacctaagacatatgactcttgaggttccatagggaaagagaaaaaacttaagttataaaagacattacatacacaaccatatataattaatggctctattgatttatattgaaaaattgataattagtttattaaacaaaatatatgaccctctattttaaaccattatttctaaccattggatatgtagatgatctaacatattgtgcagagtccaactaaccaaattattcgtcttccctcactatggacggtgaacttgttaattcgtgtctctggcagcatgctcgcatcatcatacttagaagaaaaaaaagtgcccctgcatgtatatgaataatacatgtaactatctcagaccctatttagatgggactaaacttttaagtccctatcacatcggatgtttagacactaattataaatattaaacatagactattaataaaacccatccataatcttggactaattcgcgagatgaatctattgagcctaattaattcatgattagcctatgtgatgctacagtaaacattctctaattatggattaattaggcttaaaaaattcgtctcacgaattagctttcatttatgtaattagttttgtaagtagtctatatttaatactctaaattagtgtctaaatacagagactaaagttaagtccctggatccaaacaccacctcatgcccctcttttcatcttagaaaaaaaaattatatacccatgcatgcacaccgggatgcaccggctagccctccaatttgtttactccatagacagtatgttccattgttagtgattagataatttataagtacaaataagtatttgaaatcattttttattagtaaaatatccataagggcagctctgtagacccctctctccttcttcttttcttggtgtattagttggatttgagcaacgtgatatacgcattttgggctataagttaatgtccaacttccaagggattaaagtttcccaacccttaacgccaaacacagcataagatcgttcatttatccttaaaagaagatcatgtcttttatcaaggcattgggattaagtaaatagcatccacatacacattgagagatataattaagttggttgtgagtcaataggcccattgatgctattattaaggttaaggttaacggtttataggttatttgattttattaaaaaaagtggatattttgatttttaatgagaacttttatgattttttatggaatggatgtgggtccaaaatataataattttattagcaattaaatatagttggtatagatattaaacttttgatttaataaaaaaatacaatggttcaaacagatcataaattgaatatataatttaaaatttacagctattgaagattctttatttttcagtaaaacataccgtgatcaatatgtattaggtatattatctatgtctatatttgcaagtgcatgcagtctttgaaagtacgatgaaatgaacttactaatatagaagatattagatacccttcagccttaacttaattaccttagaaaaaaaaagagggaggtgagtaaggaaaaaatcacacagaccctttttttaatatttttagctagcttgcaatgggcatgaaatagtgcctaccattttccacttcgaaatttgtgttacataattagaattttttatgttcgtggcaatttattatgtctgctacaatcatatatataattatatacttaaccatcactaagtataactaatgttatttttctcatctctcaatttctagcacctcgatgattaatctggtggaaagttctctctctcttttgtttcttctttcataaagccttaccaccttaatttttgcttatgatattggatctatatttgatctaaattttcagatcacatcatcttaattgtgtttatagctttttttggatgattaactaaagatgcaaactatacaaagtaacatataagattacaatgtttagctacgaaataaattcattttgtactatgtttctatcattatcatacaacatttctgcagtaatattttcttatacatggttttatctaattaggttagttgtgacttatttttctcgattatcatcaattgctatgttaagccatacttcctctatgcatgacacgatcaaatttcctttttctgtttgtttaggtaatgtcaaactttatttgtgcttattctttgatgtttcatattttaatttgtctacagtgaacatataaaaaattggtttcgatggactgcaacacggcattacggttagtctggaagattttatcagatgaatgatgcctcgctttcttgtagtgagctacgttaaatgatatggtgttttttttttcatttgagtcggaatctctctcgtgcgaacggaacatatatgtggagtacttgttgctgactcatggatagcgtcatcaataggttaagattaagattggatctagtgattgaaaatattggccctaccaattaaagaaaagaaataaatggttagatgtttttctttttttcttataatttattttttcataatttattagagtaccacatggttgtttatgagtgtttttaggattgccacatggtgacttaggagcgtttataggatctaaatttaatatttgtttaagatatgatgcttaaaaatttgctcttaaaacatttatattagaagtctaagctatttatacgtatatgtatcttgaattgtgcatttaattataaataacacaataattcaaaaagaatgagaaaaaaaagtaacttgaatctaaattcagaaatccgattattaattttgatagattaagtgttagctagaaaataggaaaagataggtgaaaaataggagagagggaagagtcaggtgggtggatgaagtacataactaatacgtgtgcacacattttttttcataaagatgtaatgattaaaattaatggaattatctgttaaagttcaatagttaaattagagaaagaaggaaggaaataaggagggatgtatgcacgtagttactgtgaggagaggaggtccaggaggaaagggtggaggagaagatttttgatgggttttgggattttttttaaaaaaaatgatagatctaagagcattaccaacagtctacctatatgattcccaaaactaattttgagggattttagttcaaaaatcaactctaacagatcccatactctcctacccgagttttggagttcccttcccccggttcctcgctccgtttatatgcgggcatgaaagtcgctcccaatcacgcaatcccacctctctccttcgttcccgcgcgtgggagatagcgatctttctgcgtgtgaaagaaaaaaaaacggaattttctcttggtagtttaatagaagggcccacttttaagttttggggattgaatttaggctatctgttggagggaggagttttttcacttcctattttcagtttaagaataacaaaaacaaatttttaggagaaaattatagataatctgttggtgatgctctaacggtgtaaaatattaggtccaccgtattaactgaaaatcgatgtgtagatgtttttcttttttctcataatttcttcgatttctctgatttattgggtgccgcttgttataaataatcgacacatataagcccagccacgtggcatgatggtccagaatcggtaccaataaattggtataggtgtcggttcttgatacaaaaccggcacttacatatattataggtgcagattttacgaccggtgccgatatccgaagtcatccatgccgttatctgggtgttggttcgaaaaaccatcagctaagtgatttctcgttacctatggtgtagttgaatgtgcacccagtccacctggtcatcttgtatgagcacatacactaattaaaatctttgtgattagctggctggtttgcaatcccattggatgagtttctagaagaaaaaaaaactatcgatttttttttcataataactccgtaataaaaaaaagttctaaaactactggattgacgaaaaccaagcagctttcacggtttttttaatcggtaatgaccccgacgtctttttttttttgctccacccctgacggcagtatagatctaatctaacggtaataacaacgggtccatcaatttaaataaaaattaatggtgagattaggctgtgccaagtggcggcctcggaacgtttataggagcgccacgtggcagcttgagagcgtttgtatgaagtttaatggacttttagtatataataatagatatttttatagaaacaagagatcaaagttgtgttttggagaccgtgtcgctgtccaaaacgacttcctttattagtatagagggagtatgattttgcttgttccttttcccattggagaaacatttacaggtaaaagagaattttttttatttttaattttttttattaaaagttttaaaaaataatttttcattttgaaaattgacagaagtggtctcctaccgccctctgggagggcgatttttaaaaatcgccatcccagagggcggtgaaagtgacgtggcagacggccgttcgctctcgggcgacggccgtcaacgaaatttgcaggcggcccccttgccgccctccgctagggcgattttgtactgtgcggggggccgcctgcaaatgggcggcggggggcctggaattttgcaggcggcccccttgccgccctgggggagggcgattttatactgtgctttatattttttataaatatcaatagttatcaaatttttttatattgaaaactatacaagattaaaatctccaagactggtaaaatacaattttattattttttaggcctatttggaatgttaccgtacaaatattttgttagtgccaaaatataagcaagttttggcactaccaaatatttggtagggtaaaattgcatttgatcatatttggtttgctgccaaaatgtaaaattgtagtgaagaatgttctacataatctcaaatctagattacgtattaccaatgaataggcttcaatcgaaatcaaacacaagtactattcaaattaccaaaatattggtagggcatgtttttggtagcaatccaaataggcccttagtcttacgcatacaaaaaatcaccaccataattaaacattgtaatgataagatagataagaagtgccatcgatacacggtacaaatttgtcgatcccgacgaatcaagcatgcggtaacctatcggccccttctaggtcggtcagaatgcattgcattctcgtggtccttcaatcgttgatactctacttgtgtttctgactctgttatcttctggccatgatatgatggagtgacattgtcgatccatcgagtaaatccacccatccttggattgccctgtaaaaatagtaatgttattcagtttgggtagtaattttgtgcaaatcatagcggattttgtaaatggttagacatacaacgaaatcgttgtctacattggggcagacaaaatatctccttcgaaatgtttgttcagcaaaggatgtagccacctgccagcgatctctgcacccacactttggacgctcggaccatttatgtaaccctaatggattgttcctccagtctaagcttgcaatttccacccgacgttcatactccatccaagcatgaatgaactgtatggtcggttcaggttgcgttatcggcccgccacttgaagtaactctgactgtgtcaatccattgtacgaaagtgtgttgtcgtgagcataagttgttctagcaccatatgaatgaaaagaactatgtagaggagacaaacacaagtagtactgcagtagtaatagcaaaagtagtactgctttacaagtttgtaagccaaaagaaacggtcacataaggactgaagaggtagaacactactgacgaggcctcttacccctgtccctcctaccctacgccctaatgtgcccctgggagtacgtgagtcggtccgggggtacgacacggccaactcgtcctgcctgtacaggtgtgacctctggctgctcctgagtgtgcgcctctggagctcctccaagctgagaggagcctagtacgtcgtggtggtgtgcaccgtgcaagtcgtcgtcgtagaactggctagtaggactagtcctaccggcgtgagacgaagaggccccagtaccgaagatcccggctgcaaatcctgctggacaaggaccatcagtttcatacatgtatttaatagtattaataaaaagtaaagtaccgtgtgggcgagggatcgacgctccgtaagaggaagagctggcgaacgcgcccgaagaggtggcgaacgcccctgcggagctcgcggaagcgccggtcgtgcctgcgaacgcgctcgaaggcagacgaggtcctgcgatgaggaaacgtgcagttaaaacatggtgacatattcgtgcaaaagctgaaaaaaaaatgaactaatctctgggttgaactgtaccgtgcgaaaccggtgctgtaggtcgcactgctctgaagctaggggcgctcgaaggcaaacgaggtcctgcgaggatggaacatcaagttacgacggggtgatgttttcgtacaaaaacataaacaaaacttaagaaacctctgggctgagcagtaccgtgcgaaataggtgccgtaggtcgaggtcctgctccgacggtaggcgcgcgaggccgtggttgtaccggaccagctggaggtacgacgtccacggcgctgcgacaggagaagacgcgcatgaccgcacgcatcttctcctgcatccggtcgaaggtcaccctctgctcaacgtcagtcaagtgcaaacctctgttcaacctcacttggactgcggtgatatcggcactgatatcccgtgcggcatcagcctatgcaagatggaaataaaaaattcagtagttgtcctatattatgtaagataaatgaaataattgtaagaactaatacaaattcgacgtacccccacgaagtagtcttggtcacggtgcgtgggatacgcgtccgtgacagcggcaacgtgcggctctggggcgtctggagtgaaggtcacacgcgcacgagtgcgaggaaggtaccagcgaaggtagtcacggtagttctcctccgtgtgtgggaagagctcgttgatcacctcctctgtagctaacacccagtcgtcaacgtactgctgtacacgtggagcccaaagtgcgcctgctagctgtccccgtcgagtcaacctgtgaagagaggtaaattatatggctcgatgaagtaagtatcataaaaatttagaaatgaacaatccgaactcacgagtggtcggcagggaggacggtcgactgcacattgcccggaaacacctgcctaagtccgaactgtctcatcacacgctgcgggcagtgaggctcaacgaaaatgtcgaacaccatcggcaggatggtgagccagtaagccgggtcgcgtgtgcacaaggacgaaagtcctagcggtgctctcgcagcgacgacctcttctgtgtacggctcccagatgacgtcgctcggctggagacggtaaaactcgaacacgaagtccgggtaacctcgtctcacctggacgtgagcgtaacgacgctgcaataaacatgatcggaattagacatgttatgtgaagaaaaaaaagaagacgactgataaacttataacgcagcgaagttgcactaaccctacgtcgacaccagtaagtccccatcgtgggaccgtcctctggccactgcgcgctgcgaccaaccccgtagggtgcgctgtccaccactggtcgacctatggcaaacctctcggctgcccaaagctgaagcaacatagggcagccagcgatgatcactcccgcgtcagtcttcgtgcacgcctcacagagggcatggtacgtggctgctagcacggcagaaccccagctccactgcagcacgtcctgtggctgagcatccgcgatggaccgtgcgtagtggaccagccggaagtccacagcgtgcccgtgggtgctagtgaacatcacccacccgaacaaccacaacaggtacgcctcaagggagcgtcggaccgagtaatcatcagcgtcagggtgcagaaggtccgcctacaattaagaatgaaatgttagtacaaaacactttgttgatcgcaaataagcatgtctgataataacaacttatttacttacagtgaattggagcaaccaagccttgctaggcccgactgtagagtacggaggaagggtgttggccggtcctaggtgtggaaggcgcatcacctgctcgaagcgcgcagtgatatcctccttccacccaacaacaccgtcaacgggaccaactggtgctcccgccagcggtagcccgagcaggtacgacacgttctgcagtgtcggagccatctccccacagggaaggtggaacgtgtgcgtctcaggtctccagcggtctaccagagcggcaaggagtgaccggtctgcatcccaccgcttcgctgggtcacggtcgtccgccgccgcctcaacaagcctacaaagtggtagaaggcctgccgcacgcaacctgtatagagcaaatttcaaacataagtacaacacaaagcaaagttgagttgaaatgtgaacatacgcgtaccaaggaacgtgacgggggtcgacacgcaaccactcgcgcgacgtgcgtggacggaaggtgccgagctatgcaccctcgactgctgacaggaacgagcggtggttcctgtcaatcccacggttcaacagcgccggtgtgtcgtacgccatacctgcatcaaatagattggtcagaaacatataaataattagtcaacataagtaataaatgttcataagcgaattactaacacatattaaacaagagtacaaacaaacaaaagtgtcaccatacggaatatttctgattacaacaatagctgcagttacacgatatgagtacttagtccgaacactcatcacgataacattatgatacaacaccgaatagttcgcaatactactagtacaacaatagtcggaggtactcattacaacaacattcaattgaaattacacgatagaagtattttgtccgaacacacatcacatcacaacagcgttttatttcctaaatcgatagcattgttacaccatggaatcgcctgctgcgcgacgacgccttggcctttcgcgcctgcttgttgttccttcaccatgtggtcgcctaccatcacttgcctgtccagatggactagcatctgcgccgcttggaacttctgcattcttcgggcatttcttgtaagtatggccgcgcagatcacacttgctacagcgtaaagtcctcccacctacttctgactcatccatatcatttctgatgcgtctagtttggcgtcgaccctttttcacccttaacttagatggatctggaacataaaaaacttgggcactttcaaggccggttttggntggttaaagaaatnccctttgnnagaaatcncccccccggggaaaaaaaaacccccccccccccccccccaaaaaatttttttaaaannnactcctcactccatgtatgaaagattgcttctttcctgaaataatttgagacgtacacattgggagatatgccacaatcaccggcagcagcaagaacgtgtgagcaaggaaggtgatgaagcttcggcttcatacaactgcaggtacatccaccatccgccttcaagacacattcctgcacggcttgcttgcgatagataccacgcctgctcctatcaacacacattatttcataccgatgcacttgtgtgccttgagcaacaactctatgtctccgtgcctttttgattttatcttccatgtactttgtcactacgttgccaaacactatgttgttatcggccatggacggaccaattttcttgtatcgatccctaaagtacgcttgcgtgccgtgaaggatgaattcaacaatagcaaccaatggaagtacccgaactcctcgcattacccagttgtatacctctgccaaattggttgtcattatgccataccgagatccatcggtgtcgaacaatagagaccacttctccttaggctcattctcaatccactgagtgaaatttctgatggccgaccctgacctccttctcattgttggtgggtcctcatgtaatgcaccaa

SEQ ID NO: 7039 - DNA, 692 bp, Oryza sativa
  unsure (1)..(692): unsure at all n locations
ctccgcccggacctcaagcgcggcctcctcacngacgcgaagaagcagctcgtcatcgacctccacgccaagctcggcaacaggtacccctttttccatgcatatacacacacctacgttacttgctctacctcgtctagcccacacacgcaaatgcatgcatacaaacgctaatagatttttcatgcatatgcactgtgccatcttaaaccatataggattttcttttgccgggtaaccatataggattttgatgtggatagagctggattaactctctatacaaataggagtagatcattaaaaagctcagtagtactagcagtttgatagcggtaataactaacaccgtatagtaatttaataaggtccaagaaattgagagaactactactagtactgtatgttagctacctgcatgcccattatttgatacgaagacgactgacgacatgtgtggctgtcatcaatgtgtgaggtcgcaaagccaccaaattacagtactttgacaatgaagctcataggtcgtcaatcactcatgtgaactaattaaataagtgtatatagcgcttacatgtacgtgacatcacggtcacgtaggtacgtaaaccttcatcactactactactgctgtcatacgcaagctagcagacttgtctccatgtgtactacgtcgccaagaaagtatctta

SEQ ID NO: 7040 - DNA, 7133 bp, Oryza sativa
tctatagggtgtcgatctcactgtcgtgcatcttctctatgatcttttcagctctcacatctccggtaaaaatccatagcacatctctcagaaattttgcatatcacatcgagccaaatccttttatttttaagttcaaaaaaaatccttttatttttaccttttcactttgtgttctttgggttgcttgctttccttttcgtttacccctttcactcctttttctggcaaacaagtttgtcaaaactatagaataaaaaatgttgtcttcatcaactagtgccgtagtatatatgtaactttatttgtccaactcaactgcaccgttgaattagggatacctagctacctactcaatcgttaataactatcattaagaaacagataaataaccatcatgcaagtgattaattaacaggttataatataactactaaaacctcaccaactcttcacagagaaatgttctaaaaaatagattcactaattaagtaaagtaagcaacacacgtgcatgctttgcacataagaatgtaccctacaatatctgaactcattagcagcacatacaccattgtatatatacacaaactagtgagctaatattattgtacattacccacccacatcttttattgaaaacatgtataggtactacaccaacaaatagttctatctctccaaaaaaaaaacaaagatctaagtatctccatttgagaagtaataacacttctagttaatggcacaaacccccgaatcaatctcaaggggaaaatacacaacaacatgcaccatctacgcataccctctctcaaatgcatcaatcccaaccgttgattggttttccgaagagcaaaggcctcgacttgtgatcaccctccgatcttggccggccatgcctagctgctttcacaatcttgatgcttttattaattatacacttcacttgattatctacactgatagcaacacaattaagtaagctgctgacatcttctagctagaagttggacccatttgagctgttgaccatggaggcatcgaccaccaagctcgagtctcccatcccaaaatcttggtagtcgagcagccagtccgtcgtcatgccgacgtcccacggcagcgccggcgtggcgccggtggcggcgatgctactgaactcgtcgacgtcgttgctggccgtgaaattgagccatggctcgtcaccggtgggcagcaggtcctcttccagcagccacttcaccagagggtcctggtgatggctactgctgctgctgctactgccaccggcggtgctggcggtgttagtgctcgactccggcgggctgtcgccaccggcagacacggacatgtccctgacgacggcgtcgtcaagctgccggctttgctgcctggtcgcctcgccggacttggacgactccgccgtgacggtggactgcgaggtggtggccgggctctcctgcttccggtcgaggggctcgtgcgtcaccgggtcgatgcccatcttgatgagcttcttcttgatgtgcgtgttccagtggttcttgatctcgttgtccgtcctgcccggtagcttggcagcaatcttggaccatctgcatagacacaattaacatcaacaatagaaaagtagtagtgattaagtttgtactagtagtaattctcacggagacatcatgcatacgtgcatgcttaagtaagaatgaaaattatttactgatgggaatgtttacgtagcacacgactgaaaaaaaaggaataatgtcaatttcgtaacagtagttaatttggatggagaaaccagttggtgatttcagccgggtgcgctatgcattcacttttaattatatttctaaaagatagatagaaataaaaaaagcaattcatccttgtcaatcattttcgcaggtaccccggcttgctgatgaaacattgaaaccgcatggaattaccatttctacaccatggaataaatggtgcagatgcctgttctgttaatcattagagtttgagggagacatggaagtatgatgactgaccaaactttactttctccataatttactgcctaggagcatttcttatgcaagtttttacatagccgtgaaaacatgccaccactttcataagcaaatagaaatattttactgatttgaagcgcaactctcaattaactagagatcacaacccatctctatctcatttgtttctttaagctatctaaggagtagccttttaattaagagtgacaaaacaacaaaggggttggtagtgtactttttaaaaagctttcttccattttccaatgaggcaactggacctaagaggatgctttctatttctgaatcaacgtgtagggttctcttagccacagaaatcaagctagtgggagccagcgctctagaatgcacatcaagaaagtgaaacaagaaatttccaatgttcttctgcgagactattttccatggctacgaaattgtatgccacttggacaccatataacagctaaggatatagagttcagcggttgtgtctaagagctgtcatagaaaggcttttatgctactctctagtttacaaggagcatatctaatatgtgtaaacccataattaattcagtgttgacataaaaaaatcaaaacaataaataagtaacattaaatttggagaaagaaaatattgtggatctcattgtgtagtacagtccttttgtttcttctacattttttttcaaaatatcggtatcagttggtacgacagtgatttgcacaaaaattagctatcttctgccaaaagtaaaagtaggcacttaattaattctccataacagggaccacaattaagcatgttcatacttggctaatcttgtacatctcccctccatcattgagaaactaatacacgcatgtgttgtttgatgtttcctcgtactatggcaataggtcaccagcatgtcatatgcttctcctaccagtgtggtgctatcttttttaaaaaaaaactttacaaatctggaagtaattatattattatttttttgctccaaattagattatttattaaatttccattttagttgattgaagaattgtgtgcttaatttttcttaagagcattacatgatggaatcaagtgctgttcaaactccaataaatagcttctactatctaatatataactcatcagattcttctaataaagaatctaaacaatgaatgaattgcaagcggccagtcacttgtattttctttacaatattgttctttgggtttaaattaactgttgggcttacaatattgttctttgggtttaaattaacaaaagcaagctagctaggtcaacagtgcgcaactacaattatcgtcgttttgcacacttctagtttttcctatcagatagctggcatataattaacttttgctataaagaaaatgcatacgtgctaacctcgtgtttggtttggatcatacaaaacaaagatagatagaaaatagtgtgattctagataaggttttccattctgtcttctccacgttatatctatgcatggcgatcgaaagttctagattctgactggccggccttcaccagtgtagaaagtctcgtttcttaaatggatttctcgtgcaagtagggttactatgtgctactgctaaatattccaagctatgttttgtctccttcaaagcaagaaacaagtaatccacaccttagacagcgacatgaaatgcatgcgagttagaggccagagtctacccttaatttggctgctaacctgtgatggttacattagggagttttcttccatggttttaccaaccagtggacagtaattcgtacgtttgatcctgtgtgttgacaaggaacgtacctacgcgctaatccatgggattaattacttcatcgtatactgggtaagatactttcttggcgacgtagtacacatggagacaagtctgctagcttgcgtatgacagcagtagtagtagtgatgaaggtttacgtacctacgtgaccgtgatgtcacgtacatgtaagcgctatatacacttatttaattagttcacatgagtgattgacgacctatgagcttcattgtcaaagtactgtaatttggtggctttgcgacctcacacattgatgacagccacacatgtcgtcagtcgtcttcgtatcaaataatgggcatgcaggtagctaacatacagtactagtagtagttctctcaatttcttggaccttattaaattactatacggtgttagttattaccgctatcaaactgctagtactactgagctttttaatgatctactcctatttgtatagagagttaatccagctctatccacatcaaaatcctatatggttacccggcaaaagaaaatcctatatggtttaagatggcacagtgcatatgcatgaaaaatctattagcgtttgtatgcatgcatttgcgtgtgtgggctagacgaggtagagcaagtaacgtaggtgtgtgtatatgcatggagaagggggtacctgttgccgagcttggcgtggaggtcgatgacgagctgctcctcggcgtcggtgaggaggccgcgcttgaggtcggggcggaggtagtttgtccaccggaggcggcagctcttgccgcagcggagcagcccggcgagcttcggcacggcgcgccagcagcaatggccgttggtcaggatgaagctcatcagcttcttgtcctcctccgccgtccacggccccctcttcacccccagcttgtcgcagcacggctgcctccccatcctttatatatacacacgtactgctcctcctccgctgccggtgatcgccgccgggaaagtcgaccacggcgagctggagccgctgctgtttcgaataggcagaggcgaggcaggttaagttaattgattagctaggcgtgcatcaaagcaaagggggtgggggcgtgacaagtgcctcgcaactgcaaccggagcgtgcgggtggaagggcgtatatatagctaggccctcctgctccaagctctttttaatctccggtgatggcgacggcggcgacggaggcagctcgctgacttagctgcgcccacaaggctaaacaccaccaccacttgcagtgctgcacacacacaaaaaaaagaagagattttgatacgtgtagagggctcaaggagtagtttgcggcttgtgtcgcacacctgcatgcaccccgcccggcctggagactgttcctcgatcgacgctctcctgagaaagaaagagtaagagatcaatatgtcaagatacattggtacagtctcaagctctcacgcactcttgagtaagggaaaaagtgactttccagatgatgctacagagcttgcacgttaactttggtgcgttatcgatggatgaaaatgatttttatggtaattattcaacataataaaaaaataaactattgattaaaaatagttctctgaaatattgatggaaaaagtttctataaaactcataccgtttagaaatactagtaaactaagtaaacatgctcacaataatccataatctgtaagctaccgagaatgccccttgaaagatcgattaaattattattacactaatcctccttccgtaacttcttagaatttttttctcaaatataacaacatagtaaaaggtgatttttattactgaactatccttagttatattatcgtccaactaatccagacctataggctataccaccacacaacctttactcctcctttaatagctgtgtaaatggttaaaacttattatattttgggacggagataatattattttattttcttaattttgcatcaatctcaaggcatgttggatggtagatcaatcgtttacctctgcttcaataagctgctgcatccgcgcgctgcaaattaagatttcctttttcagagggtaagtgtaaacatcagcaataacgtacctccaccacacaaaagctacagtccggtgtcgctgaaggctttgccacttccgttccccacggttgcatgtctgcctgcccgcccaccttgccgtggttgcgcccttacgcaatgatcccatcaaccattccgtcagccacaaaaaaccacggccccggcagaacaggcatgcaaagtggtagatgcaatgcaagcctgcaactcgcagcgctcagcatgcagcccagccaacctcctcggagcaagtggcatcgtcgtcgacgtcgtagacggtcgccatgagcaagcaacctcgctcagccgtgtgtccagatggccggaacgggtacatgctttgtacgacggcgacctctggcccgggaaagaagactcgacgaaccacagctgcagccagacgtctcgtgtcagccataccgatacgatccgtcagagtgtcaccttcctccggcctgtagttactgactgattgacttgctgtaattaacaggcaagacagccggccaaccgttgttcctgtgtcagtatcaagaaacgacgtaagataaggtgcaaagatagccagacgatccatgaaatactgtaaaactgtagggaactgttaaatgaattcttaggtggttaggtttcactacttcagctatgctattccagcaaactgaagaatgattgaatgaatatgtagagatgggccggtcatctgcaacagctaatgctactgaaaaggcgggtcaccatttacaagtacagatctagtttctaagtgcacttcagcactgcttgtcaataatgagcactggaattccttaagaccagttttattattcaactacattattaagggcacaaaccaaaaacaagaagacagggagctcattcatgatcaggttcagtatttcagaatcatgaacatggcggatactggtgcggtgtggttgaaaaatagtgctaccaatgcctgctaagtcggcaggagtctattttatgattatcttttactagcttctacttacaaatttacttgatgcgaagttggaaggtgcgaagaaccacggagaaacaaggtgacatatcagccatacttagcgaacacctccatagaacctgcatactgtagtactaattgacatcctaaaattggcaatccaaccagggtaccgagctcgaattcgccc

SEQ ID NO: 7041 - DNA, 7356 bp, Oryza sativa
tagtagaaagaaagaaaaaagagtcaggactcgagactagtcagttcattttttccgtaccctttttctgaaacaaatctgccttttgatttgaaatgactaataacatgtaggtttggaacgtgtgattctcgtgtgaagttctagagcggttcatatatccagtagatttactgatgcatctctggttacgcttgggatctatgtgtggggaaggactcttcgttgatagatttctgaatttgggataatgcgataaatatcatcagattgtaaaaagtgtaaaaggaatttcggggcgtataattaactttgtgcaccaccaaatgctcatctcatgtagttgtattagtattatgtaccttgggagcaatgataaatctactacaaaaggtgtgtagcaccagttgcttgaggcatgtgaggtagccatttagcttcctagcaagctagaactagtgaaatgttactttttggcatgaggcatgtgcaattgcaatagcctcttctactagtggatctataggaagggaaacttcgatgaagaaaaacgatgttaggtttatttggtttgattgaaggagatgcagaaacacgatgatttactgctatggcagtttagatatttttcttatcacaggatttctgcaatactctgacatgatatctctaatctcatctccaggttaggtcttgtggctacaatcaaggtaaacattctgactgttactttccatgatatattgggtgaactacccctattttttcaaagttgcgcttgcttggcagtgtacatacttgatagtataatgcctgcatgcacacaacagacttgaaagtttatataaaattcatcaggctgcttccatgctgcacgattccatgttatgtggcatgacttgtttactctatagtcagcttttggaaatattaaccgctgcttctttggacatatttcatttgctacgaacagtaacacgatgctggttgcttgtagctgtataatgactgtgttgtcttttctttctgaaggaccgagccaatgaaatatataagaaggtggaagatctcaagtctatcaggggaagaaatcaagatgccatattagctgcctgtttgtatattgcttgtagacaagaggatcggcctagaactgtaaaaggtacagtttgttctttgctgaatgcatttatctgaatgcgttctgaatgcatttatctgatgcgttcttgtttgatgtgatggcttattgcagaaatatgttcggtcgctaatggagcaacaaagaaagagataggccgagcaaaggaatttatcgtgaagcaactggaagttgaaatgggtcaatctatggagatgggaaccatccatgctggagatttcctggtctgtagtttgccatgtattctaatgagtccttgtctgaattgattgagtgaactcttgaataaactgataaaacctgcagaggcgtttctgttcaactcttgggatgaacaatcaagctgttaaagcagcccaggaagcagttcagcgttcagaggaacttgatataaggtttgacattttggattcattatgaaccattctgatgatcaatagatcctttgtcatggaagttattttatccgttttagcttcagtgtttatcacctctaaatcactgatgcttagatcaatgcattgactagaggaactaatcagataaacgagttgcaaatacagctatcagcaaatctatattcttaaagcaagtagcatacatatcctgtacagtccatacatacaacctcattatccccatttatgtattgggaaggggcagggctgcaggagagctagtttttgactattagacacaaactttccttattagtcaaattccaagtgtgcatcatgacttattatattcacacctccgtgcaaacctatgctgtgcaggaggagtcctatttccattgcggctgctgtcatttacatgataacccaactctcagatgataagaagcctctgaaaggtttggaacacagacccgttctatgtttaacttgcaactgtttaactcgttaataacaccgtgaaaatgttgcagacatatccttggctactggtgtggcagaaggtaccatcagaaattcatacaaggatctgtatccctatgcttcaaggctcatcccaaacacctatgccaaggaggaagacctgaagaatctgtgcacaccataggaaatttttttcttttcttttttgtcacataacatggaaattagatttgccagagaggagtaatgttgtccttggatgtgagttttactggcccatgtatcactgcacctaattttatgtgcatggacctgttagaacaaagttatctcgaatcgaagctaagttatatgcaaagcttatttaggaatggcaaaatttcatgcattaccttgtgagcaactttttaaattgttgattgataacgaccaaaacctacggaggagcgataagtttcacaaactaaaatgatctgcacgccacatatataaaattttgcaagtggtatcatgttcatgaattgccaggtagtggtgtattcgtatatatttttttatcggaactgcagatcttgtagggaaaaacaaaagggaagtgaatcttgaaagagctttgcagttcatgccatactgccaaggctcgttgcatactgccgaggatcgtgccgcatgatcgatgcatacaagggaaaaaaggagatcccttccctctgcgttggcacttggtagctcctgtgctgaagcagcggagcctttttcttgtcttgtcagccaccaattctccaaatgcagaaatgctgcgaggtgcggaggacgcgctcgttgtgccagccgcccagcggcgcgcgcgcgcggcgatcgaccagctgcgacgcacagagtgcagtggcgcaccacggccgccgtcgagcgcgggcggtgggatttggcaatgccgcccatggcgcgggcgtccacccgtttgacgccgacgcggtcgccgtatctttccttccctcccaacttgctgacttgcaccttgtttagattttgatacatggtgtcgagttgtcgaccggagagggtggagtattgacaaatgttgatgtacagtgatggttcgtttgaaaatatcattcgagactcaaatgaatgaataaaatattgaatggttgataagttctttttagataaaaaaagctttctaagaaataccgataatttttttaccgtgataatatatataatctgtagaaaaagaagggccctaagagcggtcaacagttaacacctctaaaaaaacagttgatacacaccaaacacgcaattgcccccaattcaaacgggtgtcttgtgcctacgcttagaaatcaatcatctaaaacttagctgactggatctggtttttccaccataagtagtttagttactgggttgtttttattgtgtaaatattgaaaactggtattttgttgtgtgaacactgttcaggctttcttgcagggccagtaaggtgtggaggatcaacgatcctacggcaacatcgattattatgctcaacaccacaacattccttgccttccacagatgtcgggtaacaccacatatagcagcaatttttcacgtgttattggtcactcactcactaacaaataataggctctcgtaacgccagccaggtctatgagaaaaaacaacacagtggcatcttgcattattccctcgtgtgccaaaacaagcacggtgattgaacacgaagtatctctatcaagcaatatggtgtggtagccgtctcgctgcctctgggtcatttatttctacagaagggttacatcaggctgcaactttcttggaagtcaccgagttgataatagtggcaaaatccggaccctgcaaaacggaatgttgcgtaatgaaatacaatacacaattacacaatagcgggttcattggtttaagaacacggcaatcaacaggctgtatttcaggatatgatgttaatttatcataccttcaaagaggcaccaccaacaaggaagccgtcaatatcttctttctttgctagctcggcacaattggctgcatttacagaacctgtaccagaacgaatcataaaatcagtgaggcatattgccacatcctagctggcatcaaattaataatggtgcaaatattctctgaagtcacaagccttagcaggtactgataccactagatcgggcttctagatatttaccacaaacaacatatttcaaggaataaccaggctttcaattgcttatataagagaaaaatagaaaaatccattttgttagatgctgttgttaaggacattcataacagagtgtttcataatatatcaatgttcctaaattctgccttccaataatcaatttcatggggtgaagagaggagaaacacagtgaaactcatccaagtgataagaaaccgacctccatatataattcgaatgccggaagcaacctcaggtgacacgttggttttcaaccaatcacgaacagcagcatgaacttcctgagcttgctcaggagtagcaactttcccggttccaatagcccaaacaggctcatatgcaattactacatccgcccagtttgtaatactgtctgaaagcaacatgttgatacatgaatcttgtcttcagatgatgtaggctcatcaaccattattaatttaactcaagatgaagaattgtcacctgcaaaagccttcatctgcttaaaacagacgtcaaaagttttccctgcttctctctcttccaacagctcccctatgcaggcaataacctttacattttgactcaaggcatatgcagccttcttcccaataaactgcatttataaacatggtatgtcacaatcccaatcagaactactgcatgtcaacagcaatcatgcatctcaaaggtgccttcagaatgttacaggctaacagcatggacaagtggacaagtgagagaactaccaatccagtagcatctgtgtatatagcgcttacctgatcatcttcaccaatgacatgtctacgctctgaatgcccaagaataacccattggcagccaatgtccaccaattgctccgcactatagacattttaggtgaaacatataaaaactccagtgtgaaaacaagaaacaaaaaattatctttttgcgcttgcttaaaattcaaagctaccataatcccgtaaaaaacatcgaacagaccgccaccatttatcatcaatttacacatggttctgacgccatgtaatgcattatactaaagaaaagaaaattgcaacatgtttttagctttacctgatctctccagtgtatgctcctccttttccaatccaaacattctgagcagatacctcaatacgatcagttagtgagttcttaacctgatcaatataaatgaatggtggtgcaaccacaacatctgcagtattgccacagcaagttaattgaaggtagaaaaagatagacagtggaagctaaaaagaattccggaggatggatttggatgaaaaagaaggcatgaaagaaccaatcaaatacacacatctaacacagtgtgtatagagaggaagagaatcatgcatagatgaataaaacgtgcttaccaacatcaggttcaagtgtagcagcattcaattcagtcacaagcttgctgacagagtccttcgttccattctaaattgagggacaagaaattatatcatcagaaccaatcatactgatagtaacatatctgaccaaaaagtcgggaaacatgtcttgatatagttagcataagctctcgataaaaagtgaagcaacatataataccgagatgattctccaaaaggaaaaatgagcaactgaatcagctcgtcctaaggatggcctaaagaagatgctactatctttatttttggacaagatactgatgcacactttcttaccctcggaccactagaactaatttattttggacaagatactgatgcacacactttcttatccttggagcactagaaccaatccctgtctacgtaacagtagttgctcgactccatgaaatttgggcaaatgagaaagccagggactgagaagatgaagtctgaaaaaaattatacatttttgcatataagatgcatattccccaagagaactgcttaagccaaaaacgactacatcttgtggcaccaaaagcgactccatatctagcaaacacgaccaggtgtggtgtagatcacgatgtattgatgacgacaaaaaatcccattcattccgctcatctttggaatgtcctaggcggcaaccacaaggcgccaacgactcaagatcacgaaggtgcagcagcagcagaatctccatccatcatcgctctgctcataggtaccccgtgcgtctgcaaaagttgattgatgaggaggagcggatacttacgcacttccagttgcctccaacgaagaactgcaaggacagcagcagcagcagaaagaaagaagcagcaagtcgtcagccacgagcacaaaagggcaacgaagggaagtgtaattaaacgatagcaggaaggaggatggatggcaaccttgccggatccggccatggcgacgacgcgctgggcgcggcggcgggagcacccgaggcggagctgctgcggatgcgccggggcggcggcggcgacgcctgcgcggcggaggtcggcgaggcgggagaggtgggaggacgcgagggacgacggcgccgccattctctctctccaatccaacccaacccaatccaatccccttcgtcgcgcgctgcggttggtgagagcggagctcgcgagctgaggtgaggtgaggtggtgatgatgcgggcagcggcgcagccaccaccaaccgcggaggaagggggaagagaggggagagcgacccgtgcggaggtggagggccacgcggctttgtatggccgcgcgcccacgcgcgccttatcggcccacggatagggcgcccagggccgtggcctccgccacgtcgcctggtatttcctgggccggcccgaccgcgacagcccaagcaacactccacaaggaatgttccagaatctctcttatgctttgtttagttcctggtccaaaatattttttaaagtatacggacacatattaaatcgaacgtagattaataataaaataaattatagattttgtctgtaaactgcaaaacaaatttattaaatctaattaattcattattagcaaatatttactgtagcaccacattgtcaaatcatgatgtaattaggctcaaaagattcttctcgtgatttacatgtaaactgtataattggtttttttccga

SEQ ID NO: 7042 - DNA, 7261 bp, Oryza sativa
tcagaatgcgaaacaacaactacttatagataaatacttaatgagccaataactacaacaaaatcaaagtgccagttagtttggtaaactcaccacataactcacatatcagaaatcctgagaaatagagctatcattatctagaaaaagcaaaaacgaaatggtgatctagaaacttatgagaagtttcgtattagtctgtcaaactacaatataattttgtaagaccatcaccccggccagattatgcttatcaacctaaacatgtatgttatatgtaatagaagttcagtggttcttaccacatagtacaatgcaaaattgtccttgtccaccatataagttggtctcaatttgaaccggatcatgtagattacaaaaagtgtagctgcaagtgtagcagtatctagcacagtatggatgtcatactccataacgaagctgcagtatagtctaacagctagaaacaacgcagttaaatcctgagacttgagggatagtcctgcaagagatacgatcataaccgagcttttaatattcttagttatccgtgcattaatacagaaaaaataaatcacataatcatggaatgaaatcataaagaagctataacaaacatatgcttctctgtatcgtcgagcatacagtggcatgcaactcattagtcacttctcttgttcaaaacaaaactatgaaacagtactttgggttgcaacctattgcaaccaagaaatgaatggaaacattctgctccagaaaccttgcccaaatatagaaatagctggtttctctaataaaagaatggtgacatactactccctccatttccaaatgtttgatgttggttagttcaattttgagctccaacgtcaaacaaaaagaaaaggaggaagtactattctattccagccaaagcacaaaatattgctccaaacaaaccaactcaatcttacagtaatcaaaacaaaactatacatctatctctaaatgactttacccacaaccagtttctaaaacaggacaggacagggcatcaatgttatctgatcgctgatcgatcctgatcgccaagggactgatcaggatgattaatcgtcgatcagcctcgattaatcgacctgatcagtactatgtataccagtactaataaaacaatcatagtactaataattgatggcaagatagtcacttacttgccctagtataaagcaatcacaatataaagcaaccagcagtagtagcacatattcacatgtactaaaccctaagacgttttcaaaaagtgatcaataggtgctctgatcggacgattaatcgtgcctgatcaacgattaattggacaatcagatttctgatcgaactgatcgaatgaatgtccctgatcggagtcaggggaccgatcaggatgattaatcatgattaatcggatgatcagatagcactgagggcataatcatggaatgaaatcataaagaaatttaaaaaaaaatatgcttatatgtatcggtaatgattcacacattcagtggcatatgctactcattgcaaaatggtacctgggtttgcaacccgttgcaaccagaaatgaatgtaaaaattctgttccagaaaccttgcacaaatataggaataggtatagctggtttctctaaatgactatacctacattctgtttctaaaacaggacagggtaaacaatacaccgggttccttggttaattctcaacaaactgcaccatcctccgcaagaggactatatagcttattacccagccatgtgaaagcatcgtgcagccaaatctcctaatgaattaatcaactatcactgcttcataagatggcacaacctgcagatcagcaattaactatttctcccgtacccaaaaccctataacatcacagtgatacgtgtatctcccgctccatacaaatctgctcgcggaaaatcacaactaagcgtgaactgtcagaaacattttccgacaaaaacaggaaggagcctcagaaatcaaacagatcgagtgaatttcagaacatgcagagcccatcgcctcctagatgttcgccttagcaaaaccgccaattctcccagaaacgacttcacggtcgacgagacgaaacacaaaaatccacaaacagatcctactccggagctacgcggttgcggatccggcgatctcgacggatcgacgcgcgcgcgcacgcgcgcgcgacggaactggcaacaccgtacacgtgagccgagaggggggggcgaaccggcgcaggtcttctccttggtgagcttgtagatgagcacggcgatgccgagcgcgtgcgcggcctccgcggcgacgaagaggttgtcgtggtcgtggacgatgaaccggatgaagacgagcgcggccatgccggtgacgacggccaggaaggccttcaccttgggcggctgccgccgcacccacgccatcaccgcgccgagcggccgcttcgcccccctcatctccgccgccctcgcctcgcctcgccgccgatcggagaacacggggagggtttttttctccccttgttttttttcttttttttttcctctctcgtttttttccccctcgatgcggtggcccggatagtgtgcgggcgcgtgtgcgttgttttgtttttgggatagatccggatggctggctggctgcccggctgtttgccgttttggagtgcgggggttgcaattaatgggaggcccgtgccaacggggggaaattcttggcagaattctgcacaaatcttggcactctacttctagcagtcacatgttccatcgttttgtggtgcaacttaaagaaaccttatctataattttattagtagcattttctctacacgtcttccgttttttctatcggttctggtgatactaaatttagatacataaataaaaaaaattatatccatgcaaaatgcatattaaccatgtgttagttttgtgccttttttcatagataaatagcttgtctttttttaagtagggaaagatagacaacacgagaagtgtgtattgtgagtaacatttatattgttataaacgaacaatttaaattgtgttatggtcttgtctagcttgtgtagaagatataataattgtttgttgactaaatactcgtctatatgcttttgtagtgctgggtgctggagttggtcggtctttgtagtggtgtttgaattctcgtaactactacaaaattccaagacatgtaagtagtgtctctgttttattgtttgatagattttgtattctaccttgttttgagaaaaaaaacctacatataacgatgtttgcaggcatttctatttatgtagtgtcatcattactaaagttcacatattaatgaattgttgcagtttagactttagagttgtgtcgtgttctttttatcacgatgctcgtaatattcataaaacggttaaatgacacaaggaaaaaagttagtatctataacatgttcatcaactcatcttgtatatggcatgccttttatatttgcaaattagtaaatggctaattttgtatagggcatacctcctccctctataaactctcatgtaattaaacctctcatgttaatatatttacagtatgagcctcttctactattttcccgtaaaagaaaataataaatgactatttacttgcatcccaaccagatgttacatatgaaagtcattgctgcaaagctaattgaagcagatattactaccatcggaatagtggttaggctcctcagacttcgaagtcacaatcttattattaacatgtggatccatattttgttgagcccacatatattaaataaaaatatcacgtcacttcaagtgcacatgatcatggaccgtaagtgcttattcacttcaccatcatttttatatttaccaggttttactgttatcaaattttaagaaagtagcaatctaaacatgtcttaaatattataccaaaccataataggttaatttttgttgtatttaatgaacacaccctaagaacccacggtcctcaattggctacttcctccgtttcacaataagtcattctagcatttctcatatttatattgatgttaattaatctagacattcattaatatcaatataaatgtggaaaatgctagaataacttacagtgtgaaagaaacggagggagtagttggcttcatcgcacaaggcgtccaggcgatgaagcccgctaacgtcgtttgcaatattgggccaggcccaaaacgcaacaagcacggagtggacgggctccttgtgtagtaggccaacaccttgggctccttacacgaggaacggctggcccagcgaaggtacgggttgcgttagcgtggcaacaaacacaacaccggacgtggccacgtgggaggattcatggatcatcacgaataacccccctccatcctcccgaaaattacagatagcaccatgcggttgaatttcgtccaaaaattcctgtcttgttatactacctgaagaaatagatgctaagaacaagggtgtaactgaaaaataccccgcccatcgtctctctcttctcccaccgttcacaattcctcttccccttcccacggaatcctcttcctccccatgctccgacgacgaccatccctccgattccccggccatggaagcagacgagccggccgccgccgccgcctccacctccctcgactccgacgactccttcttcgacgccctcgactccctcccttccccaccctctcctcctcacaccccttcctcctccaccctccgccgccgccgcccgcgccgcggatggagtctgaagcagcacgaggacgacaccgccgcatcacctacgttctctgattcatccaccatcaccgtcgtcgacgaggccgtcaagcccgactccgaggagacaagctcacaccgtcctcccccgcctcccgaggaggaagacgaggaggatgcggcggaggcggcggtggagggggaggtggagggggaggtggaggcgagggacgcgaagctaaatccggcaccggcaccggcaccgacgccgacgcctccgccgccgggcattctcgagtccctcgccatgctcgtcatcaaggcggggtgttccaagtcagcgcgctcatcagctgcctcacgttcccgattcggctgctgcaatggtggttcctcctcgtgacggaccctctcggattggtgcggcgagcgagggggtgggcgctcgaggtggctgggcacgccacgggcgccgcggccgcgcgtctcggcggcggggaaggggtggggcgcatggtggcgaggctggcgtgggggtcgctctgggcggtgtacgtctgcgttgttctgtgctcgattctggttatggcgttcctcggaggagggctcttggtggggaaagttgtggaggagcccattcaggttactgagaccctgaattttgattacaccaaaccgagccccgtggcatttgttcctgtacagcggttggtgccgccgaatcagcggatgcagctcgaggtgttcctgacgctgcctgaatcggattacaaccggaggcttggagttttccaggtacattttgctgtttgtccttgtcagattgattttgcattggtcattcctttgataaaagggaaaatgatattcgattgaagcagtgtcgagtaaatgttgttagaaacccatattaacattctaaactgtaaaaatttatgacatagtccctgagcatacttcacaaatgagaagataccaactgttaactcagttgtgcactgagatgttatataatttgaagatttgaaatgtttagtgaaaagttagcaggattaaaaggcttatgtgttgttctgtagaatcggttctcaacaggggacattatgttttgagttttcactatttcactcagccgtagttttcttatgacaacctaaatatttttaggaacacaaaaggacatctataaagcatgatagttatactgttttttccctcaacttattactgtatcaatttaagacatgccaatagaaatttttttttgagagaccaatagcaaaacaaattatacactagaaaagatacaatcttacttctaatataatatgggtctcaaaggaatctggtggacatgtgacacctactctaaaatgttgatatctaacacaaaaaaaactttgccatacagatgaatcttgagcatgataggtgtggtgcatgtggtgtcactgcgttatgctgcaaatgctaattgttgggtaattgagtgagctttatgcagacatgtgttacactagcaacatggctaataaggcattgatagaggaaacttttctgtccataaggttgcgtagcgggacaatatggttatcaatgagagagttatgttaactttcattctgtagctcaaaggtccaatatcatgacggaacatataatttccctgctgtagcgtgtcaagggagcatatacccagtttaagttttctttaattattttgagttgagatattataaatgtttcatacgcatactttttggtctttcatattagataccctttttttagtaacatcgtgtttagcatgtctctattttcaatctgatttcccttctttcattgagtttaggtaagagcagaatttctatcagcagacggcaaagtgatctctacctcaagtcaaccatgcatgctaaagtttaagagtgcccatatgcacttcatagaaacttttctgcgaagcgtgtctcttttgtctggctattcctcagaatctcaggtcataagactaaaaatgaggggcattacagaggcttcagaaccagtaatgggaataaggataattcttgaacaacgagctgaatttagtcctggtgcaggcatcccagagatctatgccgcatcactaaagcttgaggcagaactacctctgctcaagagaatactctggaactggagatggaccctttttgtctggagtagcatggggttctttgtttttgaattattgctggcccttatttgctgtagaccctgtatatttcccaggagtggacataacgctgcaactccttaggctagctcatgtaatgtacacttcaaaataaatgcaaaagggatgttaatgttgcacggtatacagctatcgcagtgatgcttctttatttgattttgacatctggtggttgcataacaaaaggtgcatgttaggcttgatgactaacgctttactccacacttattatcaggtacgctg

SEQ ID NO: 7043 - DNA, 19329 bp, Oryza sativa
  unsure (1)..(19329): unsure at all n locations
gaggaggaggaggaagagaaggaaggaaggggaatgcgagaggtggaggtgggcgattttatgttgggttgggtttgccctttttttttttcggtttcggttcgggtcggctcggtcgcgtcgcggcaaggcgagagggggtccgtccgactgggctgactggtccgggtcgcctaccgcgtctggttttttcagctacggtttggatggctgaagaaacgtgcgggtaggctctccctgtcgcgtctcgcttcgttgtcgtaggtgatctcgatacggtgtttgcagtggtgatatggtcgacgtattcatgttgttctgcaggagatggacgtgtcgagttaaacgattagtattaccgaaatacccctatttcataaatcttaatgtaattgtttttcactttatcaattctcaatgtaattattttatactagtacttttataaattttgatataatgattacttaaaaatggatttattttaggacaaatagaagaagctaaaaatgaacttactgtgagatgagatgaagaaggttgtgatttctgctttagcaagagattctaagaaaccgctatttattctcataaattagatgagaatttagattatttggggatcagatattataaaagttgtttataacagtagtgtaactccacaagcttctaaaatagatcctcgttacctcaacagagcattcttgctgcagcaaagaaggcaaagtttaacaatggggaccaaacctgttcaagtaagagggtggccgttcgaaaaaacaatggggaccaaacaatgcaagcgtgtttgatgaattttaatctcagtcagcttttccaaaccaactgacaacgcaagcagggagtcatcgtcaacttttcctttcgctagttccctgggccgggctttattctggttggtcaacaaacccaaacatttgcacacgagactgatgtgagatgcaagctacatggcatgagacaaccgctaacctccctacaattcaaccagataatgtagattatgcgcataaccagtcagtaaaccagcgcgaacagtatgttaaatggactagcacctggcatttgacgacccccaaatgcccaatgttacgagaacacgactagccgatcttcatgacacttccctgcaacaaaaataaataatgtaattcctgcaaaattgttgtactcacttcttccctaaatgtttgacaccgtagatttttttaaacatatttgaccattcgttttattcaaaaacttttgtgaaatatgtaaaactatatatatatatatacacataaaagtatatttaggaatggagggagtatttcataatgaggcctgaagatataggcacattttatcatgactggaatatcacatcgcaaccgcaaacataatcaaaagacagcatcatcagttcaccgccaactttccattgtaaaatcacgaccaccatatactcagaaactaaattgaaacaaagtatcagcacattcgcaactataaacagtcacatcaacgacctggtctatgtttaagaagactctagtgcatttttgtcattaatagttatacctcaaaatatcaagtaaaaagagctccgtcgagacgccgaaaggaattcttattcagagtatataaaaatggtgaagctgataaagttcactatcaaattacatatctacactagtgaccctaaatgtaatagcagaaatcagcaaggatgaatgtatgaacgatttcgtaatgtgcagtgtgctcccagtaaattaaagtgtaaacaaagagaactaaaaagaatagtcactccaaaggacatagatgattctacgtcagtgggacgtcgttcaactcacgatctccgtcgaccgtcgcttgcacatcggacggactttgtcgatcttgccatggccggaggccgatagtcccagtgagctcagtaaggctcctgcttgcttactctcacccaacacctcctgattccagtgaatccacagcatatgcagttgacggcggctacgtacttctttgaatgaaagattgtctccagtgggtggtactctccgacgaaatgcatccatgtcagtcaaacgaccgacgacgaaccgtcaagagagagatggactcggattcaaggtacgtagaactgtacttcgtttctttttagttgtaactattccgaattggatatggcagcacttagtttttaatttgcctggaagggaaggaaagaagacaactgatcgatacaagcagtcaccagatatcatcatccattcatcatctctgcaattcagttcagcggcatcgatcaccatgagcagcagcatcaaggatgagatcgacgctgcgttcgcggcgggagcaatgccgccggagtggcggccgaggctgctggcgtcgccgcggctgggcgagcgcgacgtcgacaggatcgcggcgtccatcgccgagatccattggaacctgcagctcgacgggtcgacccagctgtccgtcgcttgtgtggcgttctggttcgtcgtcggcgtgctggtcttatgcgtggctggccttttcttcctcgaaaacgactacatgagtggaccgttcgccgtggttggggccgtgccctgcgtagtgatcactcctatagtaaccgtggcttatgagcgccgtcgacggagggccaagatgctcatggtgcgaacgcgaactgtcctcgagcactttctgcttccacctatttaatctgtactggtctagcttactattgtattgatgatgatgtcttttcatgtaaaagaaaaaagaaactatatacgagcttgtttggattgaagctaatttttatatcaataaatgtttagtatgctactagtttttgcctataataattaaaactagtcacatagtcacactttgctcgacttttgatcccacgaaaaaacttctatatataatttattagtttagttagcttttaagaaggttttgacgtaagttcatttatctagtaagtataaattgtctaaccaattatagatttagctaaattatactagagtacactccctccgtaaagaaaaacaacatagtatgtgagaatttgataccacttaggaaaatgaatctaggcatgatgaatcactagaaggctcctgttttttcatcgtaattgcccctctctttctttgttcatgagtttaagaggtggcactataaacctccagaaattttcatatatttagctcatttgtgtttttctttaaatgcatatacttttttatctaatggccattgtttattcaaactttttatccgacggtcaatacgtttttgatgatgtgccgtattcttgtgtaggaaaacttgttgcttttacttggtagcgccaacaattgcaaggttttagtactaccaaaattttgttaggccaaaatttagctttgaacctaacaaacccttacctcttttttacctctcttacgtatcgccattagacttcctccatgattgctcgtcttgagtccaacatgcattcgaggatgcactggtcttggcctgtttgacccaataatatttagccatggaagcctcgttaattagtacgaaaatgcaagaggtaaaacaccgattggcatcactagatgtctagatgtaaggggaaggggacgtatggtggattggtggtacgcatggatgtaggactgtggataaaccaaagtagtgcggcggcctcgacattcagaatctggaattatagaacaaggagaaaacggttatttaggttatgtaaatagagtagtatggcaagattttcttatgaaaaagtactcacacttctgataagggttgatgggtgttaaggctgatatcttaaagtttgggacttttgatatatagaacaacactcagctgagattttgataacaacactcagttgagaggatcgtaggatagataactcctcttttgttaagttgtctgtagaataccgctacagagcgttcctgctgatggggaccaaatcatgcaagcgtgtttgatgaaccttaatcccagtcagcttttcaaaatgaaatggcaacaaacaaaaggatttgcacaccaaactgatgcgagatgcaagctactaggcatgaggcaactgataacctccctaaattcaaccagataatgtagagtatgcacataaccagtcagtaaaccagtgcgtacaatatgttgagtggactagcacggggcggctttgacgattcaatgtaacacgactaggcgatctttatgacacttctctgcaaacagaaattcgtaccacaagaatctctccgtagctttgcccggtaaacaatataactagccgtgccccccgcgcgatgcgccgacatcatccaagataatcttaatcataaaaaaaaatcataatagtaaaaaataagcatgattgaaaacaacatagcacataacagagctacacaacaataataataataataactcgatcagaaagagaatatcacgatgttctcaattttgagtgatttaattggaccataatattttttatataatcaatgttacacgaacaacgggtatctcggtgcataatacaattacatcaacaaaagtaaaataaacaacattagtatttcaatacctagcagagtagcagttcccaggaagaccaatcagtgggcgatgattaatttggaaggatagtcaaacaaaactatgtccacagcacatcacagttgtgtcccctgcgcattgcgcgggcatatgaggcaacctataataactcaagatcagaattgggcatatcacaagataacatgcaacactgttccacagtaatagcgcaatatcaaaaagggcatataatctaacaatgttctcagttttgaagtgatgtaatcaaaccaaaagtttttttaagagcaatcttacactaacaaacatggatctcggtacatagtagacaacattcttaattcgataccagcagatcctaggaaaaacgaatccttgggcgatgattaatttggaaggacaacggacatcacatcatatatatggcagtggcaactcatattgtatatgttttacaatctatacaaattggccattagcaataacaaatagaaattaaggtttactgctccatgacccagaaccagtgattttatagccaattctggagatatgagagttcagtattctcgccagcttgtcattaattagcatcgatctattttagccaccaataagaaaaggaaaatacatccacattttaaccttgatgaagagcatgcatatcccacactgtacaaacaacaaagcataatttcaacagaataaaacagtttctaatttcctaaatgtcacgcccagaaattcccgaatagaattccaagcagaatgtgtattaaaatccccgtccaggaccagccggggtacacaaacgacaatgttgacattcagatccacgtcttacaaacatcataaaagtcttacataaatgcagcggaaaaacgaaagataacaggagctaagccttgacttgatctgcagcgggaacaccactccacaggcatcctcgacggcacggacgaagcctactcctcggagaaaccaccatctgacacatactcgtactctggggttggggaaaatggagcaagactgagtactacccactgtactcagcaagtcataccggaataggggtatgatgcagggaattatcataggagagctagagtggttcatttgcataaagcgagcatttataaacagaagtttaaagaaaaaaacagtcgcaataattaatcaatattaatcatctgctgtccaacgctatcccacgttgcaacaagcccaaccatccacctaaactatccaatttcattagactaaactagggtgagactaatcacggtgaatctggttgaccgcccataaccgcgggcacggctattcgaatagttttactctgatcagaggtgtacaactgtacccacaagacacagccccacgacacgtttccgtgcgccgacatgccaccacgacataccggaaagaggccgtgacaggacccttcgcataaccccctctaaccaagcacaccacacctcaggtttcacccccactcctcgcaaggcagcgggcagtcccctctcgtgcctaggtgaatccggaagccgcataggccgtcgcagggcccatccaaactccatcacgcccacccttgcctggatgcgtcggctagagaaaagctacactacaagcccagccgttgcccacgctggcttgtggtaagtacgataagttcttccagggcatcccgcgaaccggtccttaactgccatgggtgcgaccaacaaaaccatgcacccacagcccaccatgtgatttattttaattaaccaacaccgaagcggtgtcactactccaacattaccattagaacctacagtctaaacattaataggattttccccattgtgtattagttgaactaagcatggctaagcaattcctagtccaaagtctattcatgttataacccaagctaacaaaggagcatggtatcaaaatagcatggctgtaacaataggtaaacatcccatactaacattataaaacaatgcagtatttgaagaaaaacaatagagcatttgcaatataggatcaacatgttcaagtaacaggcatgacttgccttgctctgctgctgaaggaacctcggcgactatttcgaagtacaccggagcgtcggaagaaccggaatctaagcgacatacaaagcaaacaatgcaaacaggctataagactactgaaacagagaacaaaaccatttttaatggattctacacattttccttgatttactgagacttgaatgggcttaaacggagcacggatgaattagttatgaattttagaagattcactgtgtttattactataacaaaaagtccttaaataatttattgcgcagttaattcccagggctgacgtcatcaagggggcggcggggcccgcatgtcagcggctcaagggaagagaggggcgccggcaagtggggtccccgggtcagcggcccaaggctgccggtccaccgtggaccgagaccacgagggtggtccacgcccggggccgatcggacgggcggcggcgacccggctcagttcggctcaaggccggccaaccggccacggcgatggcgacggcccgcgcgcgcgcacgcgttgctggcgacggcaaccggcggcggaggcggcggcgcaaaggcgacgcgaaggcggcggcgctaagcggcggctaggaaggagagggaggggaatagaggggagaggacgcctcaccaagggtggccggcgcggaggaagacgacggcgaacggcgacggcgaacggcgacggcgaccacgggcaaacggcgacgacgggcggacgaggtccggaatgccctaagggaggaaaagagaggttagagggagggagacgaaccacggcgaccggcatccatggccgaaggggatgagctcaccggagcgcgaggggatgcgggttccggcgacgaatctcgacggaggaagggcggacggggtggatctcggccacgcgaacccgacggcggcgacggcgcggcgcggcggcgagtctagcggcggctagaggcggccggagtggcgggaaaggcggcggcaggcgggtgcacggcgcgggagcgatggagagctcgggagagttcggcgaaaaggggaaaaagagagagggggtggcggcggagcttaaatagggagagaaggggccggacgtggccgggagaggcgggaatcgccggccgacgtgggggagtgggagaggagagagaggcgggattcgaaaattgaatcccggtcatctcagacgcgggcgcgagcgggagagagggggaagcgggtgcgggagacgcggcgcacgaccggggcggccaacgtggcccggagggggcgggacgtgggcgcggcggcggtttcggcggtggtggcgacgtggggtcaggcggccggagaaaggggacgaccccgacaggtggggcccacctgtcggcgtcccggggagagagggaggcgggcggccggcccgcgcggcttagctgggcctcagccttcggccggcccagcgggaggagggggagaaaaaggaggaatgggccgacggcccattcaaaggaaagagagaaaagaaaagaaagaaaaaggaaaaagaaggaaaaaggatttttcctgggattaaaattgcatgtgctcaattttaattggttaaaattatttcgagagctctgaaaattccactaaaaatcttgttagcgtatttcggcatgtaaaactcaagaaaaattccacatgccaattccgattattatttgcattaatttattaaggtttactcttgcttgacacaggtattttcttgagaccatttataacttcaatttaggcttgggaaagaacttcggggtgtgacactaaagcatgctaagtaatatagcatcagtatataatagcatgagaaagttgaaattacccggactggcggtcacaaaagcatcagtgaaagcctgtaggaagccataaacccatgagctatataaaatacgcaacaaaccactaaaatgccatcacaatattcagttatcgtgttagctaaggtccaatgtttgcctcatattgtggtctctgccatgcgcccatgcctgaaaacgaaaatggatgaaagtggtcagtgagatgctgccaaatataaatattgacccatgcaaaaatatatgctacagtttagccgaatactggtttatatgataaaaaatagagtagggaaggtcgtttatcaaaacaactaattaaataatgatcatgcatagggatataacaattggacaacaaataagacttcccaaggaactacccaaaaaactgaaataataccaggcaataacaggtagagaaaccctaaagagcaattgccaagtagctggaagccttgaacctgaaatatgaaaaacataggaattagcaaacgaagccactcaaagaagcaagtacactattagaaaataaaaaaagataaatgaaacgaaatatgcccatgtgttgttgtggatgattgaaaaatcgtatagatatatttgagataggatgatggcacataaatatgtagctaggtatttaaacaaaaggagagggaaactgtgttgcatatatctgttttagtagtaactgagctactcatcatatagtattgggatcacatgtaccaaaacaaaataaagttaaatacctgaggcaaggaaaatagaatatgcatttaagtgtatggcaggatgatatgaaaaatagcttttaagcaatactacactacaacaggaagcaagtggatttgacaaactttggtagagataggacagtactcttcatcaactttacattgaaatcatccatgcatttcttgggcatagaacaatggccatgtaaattatcaattgtagagtaaaggatggtgaaataaattaattggacaacataatgataaaaggggatcagggagctgacgaaccactgtcctggattaaaatgaagatatgcaaggaaaataaataaaatattcattagatattgatgccagacattaatattgttttggcagtgagaagtggccaaacggcaacaatcggaggacttctttttattgaaaaatcgtatgacttctggctggatgggcctagcccaaacctgaatcaagattagggcctaatccagatagaaaataatggggagatcatacctcactatcccaaggaaggtgacggcagcacaatggctagaagaacacttgctccactccatagcttgtacccaaaccctaactgactcacaagataggtcatccaaattgacgctgcaaaggatagaagcaaggatgctgaagatggagaagcagattgagttagggcttggcttgctctgctctactccatacccataccctaactacagatagattcatcacaaaataagtcatccaaattgatcgctgcaaaggataaaagcaaggttgctgaagataagaagcagatcaggctagggcttggcttaccagactgcacatgttgtcaacaccgtgcgaagaggtggacgaaggcaactatggcagcgggcgtgcacccttcgtccaccttgagaaattggccggtcgagcaagcgaatcaggcggaacggtggcggcgcttgcaggtggctcgcaagaaggcgacgaccccggccgctagctccgcaagaaggtggcggcggcgggcttcgcgactcgcaaggggaagatgaagatttgagtattttgggaagggaggcgcagaggatgtcgaggatcgaggggattggggaagctatgccgggcgcagcgatgtgcatgtgaggcgtggacggttggatcaaatcaacgcgtggacatcggacggtgcatgctgggtgatgactgtagtactgtagcatcttttcctgggctgaggttgatcaaatcactgctagtagtgggttgtaaaaactaaggatttaatatgatatgatatgatatgatatgatatgattcctactacaaaattgttgtatttcaaaatggggcctgaagaccaaggctcattttaccaggactggaatatcacattgcaaacacgaacataatcaaaagacaccatcatcagttcacgcgccaacttcccattgtaaaatcacgaccaccatgtacccagaagctaaattgaaccaaagtatcagcacattcgcaactataaacagtaattcaaggacctatgtttaagaagactctagtgcacttctgtcattaatagttatacctcaaaatatcaagtaaaaaaaaggctccggtctcggtcttggtaagagatacagaaggtcgaacactagaacataactgaatgagtacataaaaaatgggtgaagctggaagttttgtatccttctacaactcttacaccaccccagatggaagtcgtagaaccagctgcccaccaaccaaactcagcacaaccggcggctcaggtgggtaggccggcggccggcaaagaggtgagctctctccacagccttgtccagagacggtgtcgacttgtgtccaccaggcactagccgactcacgcggcagagaagttttgcagggtaagcaacctgaagctgctttcatgcagccttgcagatgtaatgacagaaacatacataatacatgcaaaatcatgatatgtaatgctacaggagaatcgaataaggttggcgcttggaaagaacaacatttttaattgttggtaaactccggttacatttttacagcaagtgtatttggggaagaaaaaaaaaagggggaacaaatgtctgtcctgcagtcctggactaccgcaaactcagaacatcataatgtccattaccatcaaaaagaacctgtattgcattccgtccatactcctttccgtatttggtgaataccctcaaacctccagttttttccaccacgaacacggtgatgggcatcctagcatagtaaaagtgaatccatcaagcccaatgtacatgcataagcattccaataggataggatactgaactaatatgtactgcatctgaaatatggataatttaaaaagtatcaaaaatcatggctagtactcactttaaaacatgtgacgccatagagatttctatctcacctccccacacatgaggtttcctcatctctttgatataggaatggcagtcacctcaacaagcctgcaaattgatgtctcataaagaagcataagaatgcataactcaacaatatttcaatatttagaagcagagaaaccaaggacaggtagaactaaccagggtttgtcagcacattccttctccaacgcatcacaaacctaacaatggcaccatttaaacagatcttttaaatgataaattgacagagaaatggctgtgttgcttccagtatttaagaaacagtatagattcacattgcaagtaaatctgaacattacaagcataccttttttcttaagtcatcagccatatctttctcaagattatcatcaggtggaatcatcattagtttaatataagcaccatgtactatagatcggaataggcatcttccatctccacagattcctgtaggttattatgtcagcaaaacacgaatgatcagacgatgcatgcttcatattgtaatttttttattaaaaaaaatcctctcaccggtaacagaaaatttagtattaacttctctctcttcactgctttggagcctgatagcattctccttcacaggaaggatatcaaccttttgctttggggcacatttgttcacttgggatttgttaggtagctcgtccatgatggcattctccttcatgatcctctccatgttagcaacccagctgtactcgccagtgactggacagcaggaagagtccaccacacggtcagaaaaaacatccctctccactgtgtcaacgagcacctccttcatcactatgctcaaattgtcaaacttctcatcaagcttcagtcctttggtggcagagatgagcttcttgccctcaaactccatgaactgaccgacagcgtactcatcaatggcatcaaccatgtacaggacctcatagtccttcagcttctcaaggaagggggagttctcaacagccttcttgctctcaccagtgatttaatagatatcacgctggccctctttcatccgggctacatagtccttgaggctggtcaactcatcaccactcttggtggagtggtacctcaggagctcagcaatcttcgtcctgttggtagagtcctcatggatgccaagcttgagatttttggagaaggccttgtagaatttgttgtagtcttccttgttctcagcaatctcaaagaacagctcgacgcatttcttcacaaggttcttgcggatcaccttcaggatcttgttctgctgcagcagctcaaatgagatatttaggggaaggtcttcataatcaacaacgccctcgacaaagctgagccactcagggatcaactcctcacagttgtccatgataaacacccggcgtacgtacagcttgatgttgttaagcttctttctggtgtcaaagatgtcaaatggtgctcccttgggtacaaacaggatggccttgaactcaagctgaccctccacagagaagtgcttgacagccagatgttcctcccagtcgtttgtcaagctcttttagaaggctgcttccttggtgatcacctctgatttcctcatccagatggcttcctgcttgttgatcaagttgcactcatgacagacttccttgatcttcttcccttgttttttcttctcttccttctcctcatcaacatcctcaacctttccctctttagcttcctcgttctcactagtaatctcctttgaatctgagagaggtttctgcttgttcgaggaatgccactcatgagagacttcattgatcttctcccctttcttttccttctcctcatcaacatcctcaacctttccctcttcagcatcgacttcctcatcatcacagatttccttctcaatctttttctcattcagggagatagggtagctgatgaactcagagttcttcaccagatccttgaggcgatgctcctcaacatattcaggctgtaagtaaatagcagttgtgaacaaacagcatagggtgcaaataccaacaacatacatcgcagcaaataaaatcatataatacatcactaatagctggaacatggttcacacaagtaaaagtaaaaacgtgttgtttcatttcagtgttgacggaaatcacaatatatttacacaacaacaacacaacattaataattggaacaagaccttaagcaaataatttcacttatatatgcacattgaataatactttaatcctaattgcagaaaaccacaaataaagaaaactatatgctcactcatatagataaatcgaatggtgttcaaaggaaaaactagtgaaccaaggttttacctcataactgtcttcagatagtgaatccatttggagttgcaaggtcctagtggggggagatcctcttttgatagatcttgaataaatatgacttctcatcctctttgaaaaatgaatttccttgtcctagagaaaagtggagtaaggtcagaaagcaggaagaacaatattgtaaaacaaaatagaatgggaaataccctcagctctatccatcgtcgctttctttgtaagattgttattcttcttcttttggttgaagcagtatcctacggaaaagtgcacagtgagcaagaaaatacaaacaaaacatgtaaaacagaatgcaggtgaactatacgttgtcgctgtgttttctttttccttggccaaagagcccaggcggcgcaggaagcaaataaacttccgtgaaggtcgttttcttctctgccctgtcctcttgacgctcattgtgatgtttcttttgcccatcaatctttacaattgcttgattctcgatatcgattgcttcattgtcagaatctggattatctgcaaattattgtgttcaataagtgcaaaccacaaggagaaaaaacaagtgaagagttttaatagagccctgtatacttgagattgagagttacttgtaatcattgcgcgaatcatgacagggagctcaatcacatagaagattgtgttcaaaatgtatgagagctaaaaggagaaaaaaaaacaaattaacaacatgactggtatcacagactgttaaagatgatggttatcctgtcatggcctcaggtcgtgacacttacctggacataaattttcatgctgtactgcttgtagacaatcaaaaccaattcactggcagcaaatagtatatttggtacatagaacagtatgaaaacgtgaatttctagtgacagagttgagtaccactgcaaattcaaatgagacaataattaggaaactagtatactctttgattgaaagaattcaataagtcacttaccaagttattgatctgaactagatggcacaaaacaatcataacatttcccagtgatccaaataaatgctccagcagtctcaatatgtcgtctcccacatttgtttccagcaaaaccaggattaccagaaaactgatgcatataaaacttacaagacaaattgtcttgtagaacaaaataggttagaacgtgaatgctctaataacaaagggaaaaaatatttgaaaagatacttacttttttcctttccttgttgtgtctataaatagacagcaagtggtagatgttcagtccacaagcgactgaattagtcattaacattgacagctcaactcccttattgacggcagaatagatcatccacgtcgtgtttcccaccaagttaatgatcgtaatgctagcattccaaagctctagtgtcagcaagtatctacccttcaaggcaccgtaaattattgggattgctgcctgaaatattgatatggttcctccaaagattgaaccatattgttggataaaagtggccgtggccttaaacaacaaaatagagacaaattaactttcatatgttatattgtcatcataactagtaatatggagcatttgataatacaaatcaaacaaataatttacaatttcttttaccaaattttacaatttgtcctgtgacaataatttaacaaataaaagttgtggtgacgttttacaactcaaactacttatctgtaataaatgttgaaatatgagtgaattgtgcggtaggacgacaaagggcatgttcagtgtgctagcattttctttttccagagaaaagtttggtaccattcaagttcaaccataccaggaacaaaagtaatcctaagataactatgaaaacaaaagcaatcctaagaaaactaacaaaagccctgccgactgccacggtagctgctaccacacacacgttctcaggcgtcgccctgcgccctcccctccgaacgtacctggtgggctggtggcccggctgctggccgcgctgccgtcggccgcacctccaccgtcaagcgccatgctcccctcggcgaccagttgcgcctccccgccggccaccgccgccgctcgatccgcaccaccgcggctccggctccggctccgccgctcaatccgcaccaccgcggctccgctcgcctccgccgccgcaacctgctcgtagtggtaggccgcgctcggttttccagtctgggccatgtccaaattgggccggccggcccatcaacccttcctcctcttgcctcgtgactagctttttctcgccatccatggcgacgaagacgacgcagtgcagttctacgactagggagtacccactcatcagccggacgaagaggagagcagctaacctagcacaagcacgaggagtccccattccttatcgaatcaccatttctgatccccttcctcatctggagtgcggaacaagcacgatgtacgactacgagtcccccattccaacgcgaatcaccatttcctcgatcgatcgcctccctcatccggaggccagaacaagcaccctcatccggaggccagagcaagcacgactagtcccgagtcctacgcgaatcaccattcctctcgacccccttccgcatctggaggccggactggtcaccgagctagcttagcgcccaacgcgtcctcaccgagttttcgcctaggcccgccgcttccgcaagtatgtcgtaacgcacgccgtccccttcacctacacgcacctactccgtcgatcacctgcgctctactccgtcgatcacctacggcccggccgactcatcagtccatctatcacccttgcgtgaacgtacctcattcatgactgcgtacatccttagcgacgaaggtgacggcaaaggtgctcccgggacgccgggtgatggcccagtcctcggcatgccgccgaaaatccgacgagacgcccgagctggagtaggcgatgaagcgatccagggggacgaagaagcgaatgtcgtagagaacgccggtgtagtagaaggcgacgccaccgccgtccatggtgaggaggaggacgccgccaccgccgccgccaccgaccgcatcgccttcctcgccgtcctcgccgccgatgcagagagagatgagaatattttgagtcgaaccattctggaggaggagggggcgaggggcgaactagttgtgagttgtaactgggagatctatctggtttagcttttatacccacagcctctccctccacgccggccgggtccggacccctccacgcaattgtctccaaatttcaaattttgaaattgcgtccaccgtgtaagaatttcatcgacgcctggctgcattatgtgtactcctgtaaaaagttatttttttgaaaccttagccagcttagctggttttatatttcagaagataagcacggtacaaatgccaccaatggtgacaagggggaaagacagggggaggagagcagaaaaaaaggaaaattacaacaaaggatgagaggttaaggcgctattctcgcaagattttttgcnnnnnnnnnnnnnnnnnnnnntatttcgtccattattcttgccgttagttgagggatttgaagttctttatctttgaaaactcgtctgttcctctcgcaccagatttcccaactcaagagcatgtgcagtgactgcatccccttactttgacatttgctttgttgctttgttcttgattcccaccagtcaactaggctctcgtccggattgtgcaccgggaagggttggttgtggttcattctagccattattttgtcccaaatttctcgcgtgaatggacaatccttgaataaatgttgcgccgtctctaagttcctgtagcagagttggcaaaagtagttattgggccattgtcggagttgcaagcggtcggatgtccatatcctgttttgcaggacaagccatgcaaagtttttgcatttggatggcgcccatgtcttccaaatcaaagtggcggcctttgagtcttctctaccggcgaattgggctaaataagccgattttgctttgtatttaccggtatttgtccatctccaggtgatggtgtcttcaactccttcctccaggtttgtctcattatcccagataaggtggaacactgcgaagaattctcggatcagtggcatggacagctcatgcctaatatcctcaatccatttgtcattggttaacgcatcctaaaccaagcgttgctttcctttagagtggttgaaaagcgttggcgctaggtatttcagcggctggtgtccaatccatttggatgtccaaaattttgccttccgcacattaccgattgttacctttgttgtggccgcgaagatttgctcatctaactcatcgcaggtggggtgttgtcccaacccgaggtttgtcagggcactcccactcaaaccatagccaacggagtctcaaagctctcgcgaatttatcaaggtccaacacgcctagtcctcccatctttattggggagcatacttttttccaattcactttgcacttcccnccgctaatctcttgatcgccggcccagaggatttcttcctaatcttgtccatgtctgtgaggaactgtttaggcggctttaaggcggtaaggaagtaggttggtatggagctgagaacagacgtgactagcgtcttccgccctgattgctggattaacttccctttccatcccgctaaccttgattgcaacttgtccatcaccggttgcaggtgtattctcttgatgcggcctggggtgagcggcaatcccaaatatgttatgggaaaattgccccgctgtccattgaaattttccaacacctcagacaggttctgctctgcgcatttgatggacacgactgagctcttgtgcagattcacttgaaggcctatggcctcgccgaagaacttgagaatgctaatcaagttgttgacatcattcctgatcgggtttataaagatcgctgcatcatcagcatataaggatattctgaaccgcgctgctcggtttgataacggagatagaagcccctcttgcatggccttattgagtagtcgttgaatcgggtcaattgctaggatgaagaggtagggcgagaggggatcaccctgctggaggcctcgcctgtgtgtagttggttctcccgctatcccattgagtaaaattctggatgatgcagtcgataggagaagcacaatccaatttctccagcgctgactaaagcctct

SEQ ID NO: 7044 - DNA, 19149 bp, Oryza sativa
atgctaatcaagttgttgacatcattcctgatcgggtttataaagatcgctgcatcatcagcatataaggatattctgaaccgcgctgctcggtttgataacggagatagaagcccctcttgcatggccttattgagtagtcgttgaatcgggtcaattgctaggatgaagaggtagggcgagaggggatcaccctgctggaggcctcgcctgtgtgtagttggttctcccgctatcccattgagtaaaattctggatgatgcagtcgataggagaagcacaatccaatttctccagcgctgactaaagcctctccactgcagcatttcgacaaggtattcccaagatactgaatcaaatgcctttgttatgtccaacttgaagaagagggatggtttccgttgcatgtgcaaggaccggaccatattgcgcacatagaggaagttatcttgtatgcatctcttcttgatgaaagcactttgggcatgcgagaccaaatcaccaagccgtgctgccagtctcattgccaaagttttggatataagcttcgccacagagtggatcagactaatgggtctgaagtcattcaccgagcgtggcaagtctttcttcggcagcagtgttatcatggccttgttgatgcttccaaagttccctcctgtgaggttgtgaaagcttgcaaaagcgtccacaatttccttttttattatgtgccagcagctcttgtagaaagctccagtgaaaccatctgggcccggcgctttttcctttggagagtttttaattgcttcccagatttcatcctctgtgaacggctcatccatgctatcatcttgtattgtactcagtcctaatgcttcccaatttaatgtgcagccacgctgtcttcttgtccctaagattgagttgaagtgggcatgaaggtgagctgctttgtcctcatgtgtgtgcagggtatttccatcttgctgcaagcaatgaatgaatttttttctccttcgagcattcatctttatgtggaagaaccttgtgttagcatcaccttcttttagccattttaccctagatgcttgcttcttcctcgccttttccaccgctgctagccctaaaattcttatcttgaggtctttcctgaattggtgttcctctgctgtcagagttcttgtttccagggctacatccagcctatagataagttcttgtaccatagcgaattgtaattttgattgcccaaacttttgcttgctccatttcctcaaggttgcttcggtgtttctgagcttttgacttagccgccaagtggggtgaccttcctggataggctcgttccaagcctgggttacgacgcctaggaaaccttacactctaatccagaaattttcaaatcggaacctcagtttcctctttggttcttgcattggtgctagcagcaactggcagtggtctgagcaagatgtggataatgctagcaaggaatgcccagagaaaagaatatctccctcactattgctcagaatcctatctaatttgcttagaatcgggtttccctgctcattactccaagtgaactgcctgttttgcaatctaatatcttttagctccaaagtatttaaggttgacctgaagctcctcattagacgcctgttcaaattctggttattcttatccctagcctcgtataagatgttgaagtcccccatgaccaaccatggcgtgtctgttggtggcttggctgcgactaattcagcgaggaaattttccttgtcacagtcttctgagggtccataaactactgtgacgatgaagctgaggttatcagttatggtcgttgccatcgccgaaagatggtgtgttccttgggagaaattcgccatgttaacaattgtgtcatcccagaagatggcaattcctccacgagttccattggcaggaaggaaattgaagttcgacaacctgtttccccgatccattggtctatactacttaattttgtttcttgcaagcacaggatgcctgctctggccagctcggctgcttcgaggactgcctctcttcgtgctgggttatttagtccgcgaacattccaactgagaattctcagatgctgtaacatttgggcgaagtataacacacaatttttttccaaaaggatcgatcccatagtgttttccaaatgaattagttcataagcagatagagggctatatattttcttccatgacctacaactacaaaccaaacatgaccatgtagaagcaatttcactatcttctagcctgtctactctgctactaaccagctgaaggccggtgtctaccgggagcgctattcgtatcaaccgactaaggagctccggcttaaggccgttgctgcatgggagcgctagtcgcatcgaccatacagcgagcagcagcttaagaccgcagagaaatgtaaaggatacatgcagatgatgatggaagaccatttctgcagctctaacactgatgcggacaatcatgacagctgacgacttctctcagggcgcggcagcgcgtgcctcagaccaccgccgttgtggtggttccttcctctcctggcaccgggatgtcgtgcactccatccaggcgtgtgagcacccgcagaccggcaatgacatgcgacggaagcggtgtgtcgaaggactttgcataagcctccaccgccgcatccccgaccggttcacccggggtgagaagccccatctcctccatgaggcgcacttctgcgcacttagacaccggcaccgacgagaagcgcgccttacggccgctccgccgtgacggcatctgcaccaccttgcgtccgcaccccttcgtcttggccgcgtcgggcggcgccagctcgagcagcgcctgcaggatgatcggcggctgcagctgcgagaacagaggagataagacgaccttttcacgttcaccttctcctccgtggatgggctgagtctagaccgtggcctggtgttgctcctcgcaatcggcctgctgcaccagggtgggctggtctcctgtggaagcttgggcctcgtcatcttgagtggactgagcgaggaggtccatcttgggggcctgctgcgcatctgggccgagatggcccatcttctcctggcccaactcagctgccgactccaccttatcctctcccagtatcggttcttccccacccgtcctcttcgtcttgttctccgcctcccgtgaagacttgggaacgatctctgccaggagcggcagcatcgggtcgtggtccccctgttcgtctgagaaggggaggagaggtgaggagcataggatctggatcagagggtcggggagactcacgagagcgtcgactggctactggtcgccatcagcctggccactgacagcgaccaccttggttgttgcgtcgcctgcatcgcccgtgccgtcctgaccgcgaggagtcaaggagcttggggagcgcgtgcgacgggatctacagcggcaggagcatcgggagttgtgcctggtccgtgagcggccttggcgcccatcaccgtgcgctcgctggcggccggaaggatgcggcgtgcggctccggtgtcgcgccccttccgccgcccgcgactcaaccgactggccccttccaatgatgacatcgcgcagcgagcggcggcgtggtggaatatcctcagcgtggcgccgccgcccgtcgtcatcctcatcatcctccgggtcttctcttctctgcggcggtgccctgcatccccgcctcgctgccgcccgtcgccgaggaggctgggttccgtcggcgcagcccaggtaccactggaaggtgcgcaccgtgggtatcgggcctcccaaatcagacaagtccgaggagggcagtccgctcaccccggaagaaggcgagcagggcggtcctggagtccagtcctccatctcgtccagatggactatgacatgcggcagcctccccctcggcggcggcgcgatctcgtccggaagcggcggtgtgatgccggaggtgacacgcctagctcccggcgggaagaaggtggagagcactgttcatggcaggagatcaggattctgcatccacatccagcatgagaagatggccgtgttctgccgctgaaccgactcatgctcgatgcaatcgaagaggtagatgggacccatgacgccctccaatcctgccctgttccatgcgtactgcggcaatccctccaggcagagccgcacgcgaaaccaccaattcgggtggtgcacatgcctgtcggcgctccatggcgtgatggtgaaccttcctccatccagagtgatgaagcctctccgcgctgccgcggcctacccctctgggaaatcgaagaagacgaagaaatcttaggggtgatggcgcgtgactcgcaagtctgagatggggatcccaacctgctgggtcagtgcacgcaccacctccctgggggatgtctcctgtccctcgacctcggccgagatgagtgcgccatgatagcgaaggcgctccaactcgtgctacatgagctccgtcatcggcaccattgcatagccgactgccggccgttgattcggcagaccaggtatgtgatccatggtcaccgctggtttgtgcaaacgatggaaaaccaaaccagggcgggtcgttgttggttgctgttggttcttgctgggaagtggtgggaagatgagtcgggattgaatggagggggcttgcttggggaaggtgaggcgggagtgaatgggttgctttgatttgtttgggcagcggaaggagatgtgtccactgcgtctacaagtatagcagcggatgggatccctgcaagctgctgcctggtgatctgaagcgtcagcaagtatctacccttcaaggcaccgtaaattattgggattgctgcctgaaatattgatatggttcctccaaagattgaaccatattgttggataaaagtggccgtggccttaaacaacaaaatagagacaaattaactttcacatgttatattgtcatcataactagtaatatggaacatttgataatacaaatcagcggaagcacttgccgtgcaagatctccttgaacttttctctgagatttagtggattgaaggaggcagctgggcgattgaagacggcctgaaggttgatgaagaaggatttttgcgcttccgccaccaaaactttggttttaccgcttgccattttgatgaaagatcttgttcttctgcctcgatttgagacttgcttgtagctcttgccggggctacgattatcgactttaatgttgcttttcctttggccttcttctctgcatcttcctcttgtgccttttcgggagggggcgtaatggcgctccgtccctctcctctctctgcagtaatgtcgagctcctcttcctggcttcgggcattgatttcctgatggaaagccttggacgccggagatggagaagctgctttgcgtgctttggcggtctgcggattgaatgtctccgctgaatgttggtgtagctccagagcaatgacgtcatcctcatcctcctcggcatccgttccccaatcaaggggctcggatagcagtggcgaggcctgacttgcttggggcgaaggcgtgactgggggaggtgagcgcggttgtgcggtggccgcctggtcggagtgaccagaggcgcagggctgtgggcgccggtgacggttgccccgccggcgctcaggttgacgagctccctaggctctcgctctctcatcatttctctccatgccaaatacctaacagaagttggtttaagagccgttctacaaatcctgtaaaaaagttatgatggtgattaatggtaaataacactcccaccacaactctatactttttttttaaaaaaaaagagagaataatatataacacataaattagagggtccacatgtcaaccacctcatcaccaactcctacattttataaaaaagaaaaaagaactgtgaggccaatatataaatatatatatatatatatatatatattagtaacaactatattatatataaattaagcgtagaaaatgagggtaataataggttaatttttatttttgtaaattgaaataccgttgtaccgcatggacaataataagttttctagttaattagatggagtaattaatataatgttgttggcattcgggcagcaagccgattgcgccgtgcagaacgtgtccctcgacacgctgttcctcctcgtcatccaggccgccgctgtgtcatcgtgctccgcaagttcatctacctcacgctcctgcgccacgcagcccacgccatcttcttctcggaatctgtccgtactccatctgattagaaatgggcgggcgagattaacttggtcgttcttgcggcaggcggggatatcatgcatggggggtatagctagcctccctcctgcacgagacatgatttgttcatgtcgacgtcgacgtccagagcgtagagggtgcggatggtacgtctccgagccgatcgaggcgcgcgcatctcttctacatgttccagatcgatctggaacgacatgcaccggtgcaccacggtcacgtacgcgtgatcgatcgagcgtcgccacctgccttgatctcgttgcgggccacggatatcggccggctcggtcgccgtacgtctccacggcgatcgcgaccaacatcatcggggacgggctttcttgcgctgacgtgggtccccaccttcttctggtcgccttgcattggttcctcgggttcaaggtggggcgggttgtgccgctaacccgcttggttggcccgccccactagcccactacccacatccgctaacccgcttccaaaatccaaagaggcggattgatacatgcaggcgacccgctttgcccaggagcgccattgcatcctccttctgttcctcttcctcgtagctaccgtgccagtggtgccacccgtcctcgttggcttttactcgctccgttttaaaatatttgacaccattgactttttatacgtgtttgaccattcgtcttattcaaaaaatttaagtaattatttattctttttatattatttgattcattgttaaatatactttcatgtacacatatagttttacatatttcacaatttttttaataagacgaacggtcaaacatgtgctaaaaaatcaacggtgtcaaatattttgaaacggagggagtacagcatacttacatcgctataagctttgagatctgtggcgctgtgcagtttgaaacgacagccgcatcaacctagctatggccatggcggccagccatatagcagcttaagaagaaacgacgcgacatcgacattatatatgtatttttgctcgattcagtctgggattgagggattttgatctcttgatcatgggacacgatatgacgcgaagactgtttggctagacacgcatatatcaagccgattgcgaagagaacataaatccctaactggagcatgtcaccacggaaagcaagaagatgataccagcggatcggcaaagtttgcacagcattcatcagcaataccaggcacaaaaatatggaatgtatggacagcatgaaatgcgttccagcacatgtcgtggatggaatctcactgaggtgatgatcaagaactacatcgaacacttgacagcactctccggttccagcggacggagtgacggtagagctattgacctcttgtgcattcacggacggcatacagagaaacaagttgcaattgacgcagtgacgcagcggatttcgttttaagtggtatcgtgctgtgtgtggcacagtgtcgatagtgcggctgctccgctactgggtgttctgcaatacgcatgccaactaatgctgtgatatttagttggtaaaatttactacgggacacttaaaagttcatggtctttgctgcagtatatccaaaaaacacatatttgctataggtcaccgtaaaaacatgcatggtgattagctgttgaacactagacgcattattttattatatttagtacaaacgtagagagaaacagtgtggaatgcaccaatttgcccccgtgtccataggttgtaaggtgattggatccgatgcaaacctgacccagaccattctcactcctctgacccggtccatttttactcccctagtatgggttcagttagaactagacctgaatgggtttaaaacaaacatgccccatagacaaaattgtcttttcttaaagtttctctctccatttgcaccggataaaataaaataatttgttcggtgttcaacagctaatttacatgtttttacacgttctttgagtgtcttgtagcatagaccataaactatgagtgtcatgtagcaaattttgccaatttagacatatcaccacatgcgcaattagcatgtcacacccaatgccaccgccttgccgccgtcgctgttgccagaaccctaggccaccactgtcaccggagtcagagctcccgtcgttggcggggaggaggatgcagctacggatctccccgagcatgtgcagcatcaacatcccgagtagcaacggcgtcatcgactcgatgaaggtgtgggtggcaccgtagccataaccgccctcgccgctcgcggggggtgtcagggccgccgtggtggtggtggatggggggcggggtggtaccggcgcgctgtggggctcggctacatccttccctttgtcttcatcctcgccgccatctcggcgctcgaggctgacgcaacaagtgctcctcgagcacctcgcggtcggcaaagatgccgatggtccatggggcacgctcgagcacctcgcggttcagctagctggccatcttgcgctgcgctctttgtggtatggcaccagcagtagggccggcggggacgtcctccatgcaacggtatacgtggatgttcttcgcgttcaaggcgcggcgccgcgtggtcgatcggcgatgtgtcgacctggcagatggaggtgaacacgttgacgcccccagttcacctgcgtgcaggcgtcgtcgatgcggcgatcgatgtcctttgtcgctgtcctggacccgctagtggtaccgcttcgagcagtaaaatcgatttgtttggtgtcagaacttatctaatggtgttatagtatactaactatacttagatcatgatgttatagcatatggataaacagtttcgctataggttttatcgtcggtgtcagacccgccggcttttttactgtagatctgcgcccctggcttcgagccgatcgacgtgcttgcattcggccggtatcgaacaggtttaggacctggatggtggcttatgcgcggggcgtcgtcgcctggagctcgaggaggctgagcattgccagcgtgtaattagtagtagggatgcggggcggccggacgggcaagcgggtttttttagcccgtttatctcacttctagtttattttttcttctaaattttatactattatgtagaaaataaactagcaagcgggtttttatgcgggttacgggactacccattatctctacgtattagctatccagcacccacaacacgattcaatagaacacgagatcaagatagtttgatggagatccaactgaattcgccgtcaccaatcacagcaagtaacatatgtattttcatttatccaaggagacattccctcgttaatttattgcatgttacttaaatataaaaaaattatatcactatatgaacatgcaagtttaaatttcacttctaccaggtctaagaaaaggaacaaattaaattgaatatattcactgttatatctcttctttttatataacttgtaactcgaatttaaatctatatgattgtgaagtaatatacctcaagttaatcaatcttgtcattggagtacgtctcgctcgttttggctccaggcccattgcaaataggacacgtatgagcctcgctcgcgactcggctaccaagcccgtctcggctcataggctcagatctcttgatcataatgctgctgctttcttgcactcaaattatcaataagcattttcattaagacatacataaatgatcaagctaattgtctcttgctgattgcatttgcaaatggccaaatgctatgtactagtattatatatgcatggttaattatatgttcaccagttgcagggtgtgcagataggcatcgatgcctccatggcgatcgagctgcgagatacgccaccccaacctgctgccgctgagggcctattacctcgcgcgggtcctcggccagtcggtcccaatagcggcaattaagctgctcgtcttacgatatgtagagtcagttttatctaaaataggaatggagctgagtgaaactctcttacaaaataaactgtagggtggagctgggtttagtagttggagctttactaaatataaccttagacttcctgcacaacggcagcttctcccaatttctccacggcttgcttcttcctagcattgtgcgggattacatgattgatcaagattgatttgattagctagttcaatttgggcttctacatcccaactattatactccatccgtcctaaaaaaacaaaccctggatctacgtgtccaacgtttgactgtccgtcttatatgaaatttttttataattagtattttcattgttgttagatgataaaacatgattaatactttatgcgtgacttatccttttaatttttttcataattttttcaaataagacggacggtcaaacgttggacacggaaacccagggtttgtcttttttttgggacggagggagtagttgttaactgctacatttcagaagatgcgtagtctgaacatttgcagattctaacaatgctaatattgatttaacctttcatcatgtagatttgatacatctaaaaatttaggagactggtatattttatttagccataagaataaacatatcccatagcaattactaaattgagcatttcatttcttcatggttacttggtcagtgcacacatttcagtaatagagtttcatgctcagttaaaggaattaacgcagtttttaattagatcaacacatgtgaaaaaatggtaaattaaatggcagacttttgtttaacagcagtgctttgctggcattattatgctttctggctctaaacaaatttgctccgcactcaaagtacatctcttggggttcatgcatctatatgaactgaaaatatgatgaatagatgatggattgctgatcgtctactccgttgggggctcccccaccccatccgctgtgttctatgcgaccagcatgaagagaatagatcacatcttggtcgcttgcccggaatcccgacacctctgatggtgggttcttagggtgattaatcagtcggcctgcctccttccatcagtggctttgcaccagtaggaaagtaggaagaaagtcgcgaaggatctctgatggggatttcatactattgcaacgctggtcacctggatgatctggaaggaaataaagagttgggtgttcaatctccagcagcggccctaggcggaagtagcgaaagctatggctgtagaagcagagttatggcgcctggccagggtggcagtgctggcgcttggtctctagtttcaggagtccctaggccgtcaccatcgtttgtgagattatagcttcaagtcctttgttgtacctctcaggtatcccgtcccgcttcaagttttcgtttgttcagtttataaataacatttatttctcttaatacaaagatgtgtttcttgcatattcccaaaaaaaattctgcatacttggtcatgttcttttttgataaatatgtaaattctatctcggttttcgttagcacgcttttcaaattactaaaaggcacatttagtacgaaaactttctatatagaagttgctttaaaataccaaataaatccacattcttgtaataattaaaactcaattaattatacgctaatggtttatctcgttttgcatgcacccaaaaatctaatgccactaacattttcggatggcaatgatagtgccactaacattttcggatggcatgacgtgcagtctcaagaaggcgagtgtgccaagactgacgtttacagtacagcatgggcatcatcatcctcaagctctgaactggcaaatctcccgctggcaatagcatgggtggtgacctgctgcagtatagtgggtggtgtccattgtcaacaaggtgtgaacctgaaccaacgagaggtgttcgcgctcgccatcgccgccaagcggatgacggacgagagaagagaaaggctgcagcggcggacgagacacagtagacgttgacaagagaggcggcggctgcggctacagaggagagatgccgatcagcgatggatttgagctcgtgagccgagtcaagcgaggctcatacacaccgaggtttacaaaaccagtggtacccacacgataatcacgcctacaaaaaataatcacgcctaccgtcggggcacaacaaaataaaaccgtgataacccattaacatcaaataaatttataaactaatttaattttgtgataaattctatacggtttgccacggttaccgtggttaccatacggtaactatgctaatcgccagagtgcggtaactccacctccgacagtaagagaaaccctacagatccatactatttgtattgcaccggaagacgtaacgagcgagacgtccgatcctgcgggagtccacatggcaatcatcggggggtggggctgcacaggagctgtttgcagccggtctccaccaaatatttttccccatcgaacacctgctagcgagggagaaggtatcaatcagacgctagcatggagcgacggcctggctctcgcttcgcgtactcgaccgtgtgtaaatggagaggaggataaaattgcgctacgctgtccttcacctcgatattgaaaactctctttctttttcgaaacgaacagtataagacaggacaagtttcaagtattgatatagcaagagaaaaatacaagtttatagtctggaagactatagtcaggaaaaaagaaaaaaaaacaaccgcactacgcgtctacaacaatacccgctgcaagagcgaaacaggagatcttcaagacgatgcctctaagaagggaacgacaacaagagcgcctccgctgcttgtcccggggagccaggacaaggttctcacctgaagaaagtaattgggagagacaagaaaatgcagcaacaccccaaaaggaaagcggcacccgcatgcgtcgttgttgccagcccgaaggcagagctttcgcccaaattttcacccctcccaagaactaaactactgcacactccgctaccaccaccatcgaaagccttcgacacacactgtgccggtgtcacgctgtcggccaatcatcacaggggagctcgaccctcgacactcgctggatccatccacgtagttgggttgggtttgatcccccgtgacagagtaactgctgactctaccacgatcccgttgcccgtgtcacctcgggccactagaccgtttcgccatcaccttgccaccctctcatgcgccaacttcctccctctttgccatggtggccaccatcccgctccacctccgctggcgtatcgacctcgtccactgcctttgtggctttgtgcccacaaccagctctggtaccgtcactgcccacgccatcatcgccctggaatctcctacacctcctccgtcggcgctccagccccgctccctgctccccaccccccgtagacggactaaggggaagagaaaggggagagaaagagagagggaaaggggagagagagagagagggaggaggaagaagggaaggagaaacagatgatgacatgtggatctcacatgacgtcacgttagcaaaaaccacccctcaaaaacgtctaaaaattaaattgcaccgtttaatagttgggggggtcgtgagtattgtgcggttcaaagatacgattcagactcagcaactagtcaaggagaacgatgggcccattgcgtaaacggcaatcgggctcggattcacggtagtacgtactgtaaccttttttagttgcaacaactattccgagttggatttttttttgcacgaatattccgagttgaatatggcagcacgcgttataaatttgccctaggcggaggtatcgcaacaaaatctgcctggaaggaaggaatagtacgcagggacgcagaaagaagacaatcgattgatacatgcaaaaccatcatatccattcatcagcaattcagttcagaggcatcgatcaccatgagcaacagcggcagcggcactagcaacatcaaggatgagatcgacgcggcgttcgcggcgggagcaatgccgccggagtggcggccgaggctgctggcgtcgcagcgactgggcgagggcgacgtcgacaggatcgcggcggccatcgccgaggttcacgcgacctaccaatacgtcgggtcgaccaaggggaacatcggttatgtggcgtttttgttcgtcctcggtgtgctgttcttatgcgtggctggccttttcttccgcgaaaacaactacttgaatggagcgttagccgtgcttgtggccgtggccttcatagtgatcattcctatgataatcttgctttatgagttccatcgatggagggccaatatgctaatggcgcaaacacgaactgtcctcgagcgctttctgcttccacctgtttaactgaactccatccgtcctataaaaaacgaatatagaaccaaatatgacattgcagtactataaatttaagatgtgtcatatcggtactaggttgttttctatggggacagagagagtactgctctagcttactctattatatgatgatgatggtctttttccatcttttcatgtaaaagaaaaaataaactgtgagattatttggattgaagctaatttttatatcgacaaatgtttggtatgctactagtttttttcctatagtaattggaaattctatgctaccaaaacttggtagcgccaacagttgcaaggtaattttgttaggccaaaaattttgaacctaacaaacccttacctcttttttacctctcttaccattagactttctccatgattgctcgtcttaagtccaacatgcattcgaggatgcactggtttgggcctatttgacctaatatttagccatggaagcctcgataattagtacgaaaatgcaagaggtaaagcgctgattgccatcactagaggagaggggaaggggacatatggtggtacgcatggatgtgggacctgtgggtacggggcaaggggtaaacaccaatggagtgttccatgcaagctaaaggagtgcggcggccttgacattcagaatctagaattacagagcaagtgtttgctaagaaaacggttatttaggttatgtcatgaaggaggagtatggcaagatcttctactgaaaaaattatgcccacgggctcacttgtcaatctctctttctctggctcgccggcatctctctttctctggctcgccggctggaacacgccgtcctcgccgagccaccgctccggcctgtactccaagcagtcctcgctcgatggcgtatgcgctgtacgtcacggaccaaccggcgcggacgagcgtgccgtcggggagtgtgtcgtccgccgcgcacgactgacgccggcgggtacaaccgcatcgactccgtgagtgcggcatggaggtagtgcatctcccagagcgcatcgaaccgaaacggctcgccgaggcgtgtgtcggtcggcttcctcaccgcgcggacctcgtcggcgatgcgcgccacgacgtccggccgggacgacaagagacagaagaaccagctcagccccgacgccgtcgtgtcacggccgacgatgaggaagctgaggacgatgtcgcggaggacctcgtcactgtgctcgtcactcgccacaaacctcgacaggacgtcgtctctgtcttgcacggacgcgctctggcgccgggcgcggacgatgtccatggcgaaggtgtggacgtcggcgatggccttcctcagacggcgtatggtgccgacgttgagccacttcttgatcttccaggagacctcgatgagatcaaagaagcgtccgacgacaaggttctgcgcctcgccgaaggagtgcatgaaatccgacctggcatcctccatgaccccgccgtcggcgaggcagggcaggtcgtgcccgaacgccaccatacagatggtatgaaacccgaatcgctggagcacgtcctgcaagtcgaggacgtcaacatcatcgctatcgctcgtcgacggcgactttgacatcaccatcaactggtccggcggcattcaccacccctccgcggcaccctcgatttgaggcacgcgccaccgtatccctgccgggccagtcgccattgcgccgccgccgagctccctgagagctcggtgccaccgtgcatcgccatgccgtgcgccgggatgccgccgtgcgtcgtcgccgtcggcggtgaaccccggcgatgcgccgccgccccgccgtggccgagccgtcccggctcgagccggcagcgttggctgcgcgcgtcacgcgtctgctcggctcagtactaagcgcgaggaagaaaaaggggaaaagagaagagagagagcaggtgcattttggtacttacataactctttctctctccattttgactggaaataataaaataataggaggagtgtccacttttttacagtgtccacgaaaagattcacgatcttcggatgtctcatagcaaaaaccgtaattttttggtgccctatagtaaattttgccttgttggatagataactccttttctgataagttgtctgtagaataccgctacagagcgttcctgcggaagcaaagaaggtaaacctttaacaatggggaccaaataatgcaagcgtgtttgatgaaacttaatcccagtcagcttttcaaaatgaactggcaagacacaagcagggtcgtcgtcaacttttcttttcgctagttctcaggcccggccgtattctggtttggtcaacaaacaaaaggatttgcacacgaaactgatgtgagatgcaagctactaagcatgaggcaactgataaactccctaaattcaaccagataacgtagcgtatgcacataaccagtcagtaaaccagtgcgtacaatatgttgagtggactagcacggggcggctttgacgatccccacatgttcaatgtaacacgactaggcgatctttatgaaacttctctgcaaacaaaaattcgtaccacaagaatcgctctgtagctttgcccggtaagcaatatagttcctactacaaaattgttgtaattaaaaatggggcctgaagaccatggctcattttaccaggactggaataccacattgcaaacacgaacataatcaaaagacaccatcatcagttcacacgccaacttcccattgtaaaatcacgacaaccatgtacccagaagctaaattgaaccaaagtatcagcacattcgcaactataaacagtcattcaacgacctatgtttaagaagactctagtgcacttgtcattaatagttatacctcaaaatatcaagtaaaaaaaaggctccggtctcggtcttggtaagagacacagaaggtcggacactagaacataactgttattcagagtacataaaaatgggtgaagctggaagctttgtatccttctacagttcttacaccaccccagatggaagccgtagcaccagctgcccaccgaccaaactgcacccagcaaacatgcattagatgaagttcacaatcaaattaaatagttaaactagtgaccctaaatgtacctcttcacatagtagtagcagaaatcagcaaggatgaatgtctgcacgatttccgacagaagcaccatagatggccacaagccatagcccagagcagtcaacaatcgaccacgagtatccaatacctgcaggatgaatttgttgtctttaaattaacataaattccatgcatatataaagtgtcaaattcaacattgtggatagttttttgtttctgaaaacccatgagtaacaactattgaatgaacaagtacagaaatttccccaagatgtccttaaccattaaaaaaagagcttttaagatgatgcaattatactagaaaaaacaaatcaaggtaaacaaggaagcatcatgaccaggttgttcattgatgatacctctaaagtacatgagttgagaaaactaacataataaggtcatttatcaaagtagaacggctaccataaaacagacaagaaatgccaaacctcaaaaaaaaaacattattgtaaattaagtgttgggattctgtgcgctgggtatggtacagaagaaacaaagaaagtaatgacaaaatcaataaacaggggaacacatataaaagtaagcttggggtttgtttagaagacgaacctgaagaacccagtgtgcacagctaagaaaccttgcaactcccaatgcaaacacatagtgtgctgtgaacggctcaacaatctgcaaaagatggaaaacatgttcaggaaacttcgcccctgcagtcaaggaaaatgcatgctatttacctttgtgttttgcatcaaacgcagctgtggtagaactgagacagcttccaagtaaacacaaaatgcccagctgatacggttcacaatgttatgagatgttgaaggatgaataagcagtgctagcacagcacaaggtaccaccttcaaaaaagtaataaataaaagaacccgataagtaagcatccattttaactaagagatttatgagcattacagctgacttcacaagcaaaacagtttggcacacattatgggttcagcattttcagtgagtaataaataaagtgataacacttctacagacccattactgactgatatctacaaggtttcacataagtacatcacgtcttcagcagtttatgcggcacaagacaaccagagtgatacttcctcttaacgtttgtattttgttgagtcgtcagaatgcgaaacaacaactacttatagataaatacttaatgagccaataactacaacaaaatc

SEQ ID NO: 7045 - DNA, 59976 bp, Oryza sativa
tttcctgaaccatgttatataaaaatatgttcagtcctatcttttgaatttcaaaccatattacgttcatgctctcaattgtcaggggtttaatccctacaactctagaaggttctgccagtcaatgtatatgctcatatggataacatagcagcaactactatctagtgcttatgtacttaccaacaagagtaataagattaaaatacaatatcgagcagctaagtacagcaatttcctaaagcttcaggttaatatcggaccaaacggattcagttcatgatcagttagaaaaattcaacaaatataattgaaacaggtccgacatttccaatcagctaaatccactgaataacaacctggattatcaactttgcagctggaaaacgcgtaatccaatctgagtttgattatagcgtaatggattaggtaggaaaaggtcaagtttcatctagttctccactcctagcttcttgcatcttgaatacaggttccctcagtaagacatccctataaaggcacagacttagtgacttatcgcaagttcacgtaaaggcacagactgcagcaatcaactggaatattgaactgccaggaaaatgtaacttctagtgcctactaaattattcatgagtatttttctttgacagacagagtgtattctattggaacaattcaattcatttgtctctgcaggaatcatacagaagttggcgcactactcctatgccttcatggggtttgattctgaaatatgaccatgaatggtgagaagttatatccagaaaggttctaatctaactaggctaactctttcaaaacaacaagctacgatgatgagacaatggaataatttaccacgagttctaactacccctgcaagttgtacgatgatacagtagaaatatatatatgtatgtatatatgaccaattaatttcactgccacaggatattgggatctaggaaatcattggtagctagcaagaccgagtggattcatatcttccttttcaatcaagcatcgtatgtcattccacgacgcttagaccataagatcttaaactaatgtccaggattttggggccgagtaagttcgatttctcaagcaatgactacataccgtgggtccaaaattagccaatcgccgttatcatctgaacttgttagtttgcttattagtagttcctatatgctgctacatcacgcctttgttgttgcctgttgggcgttcgaactaaaagaggatgatctaaacccagccaggtcagatctcactcataaaacacccaaaaccttacttggccctgtcctaaccaataatttggcttaaatgggacaccactatggctatcatccatgtcagtcaaattgtcaagttaattctacacgagccaattaatcgggttggtccagcttgctccgcctacaagagaccagactgcgtcaggcaggttgcaagcttgcaaccacagtagaggacgcaacaacactgacacaatctgaaagaagtcaagaacagcaaggccagagaagatgtaccttggtgaggaacagaactgaccagcagcggatgtctccatgacgacgacctcgcatcaggggattcccccgtggccaccagcgagcgaccttccacgcggctgctgcgcctgaaggggggaacagcatggggatggacgcgacagtgaacccaaaatgctgccccgcgcacgagcgccccccgattgcaacctgtgattccaaccgcgaacgtgaggtgagatgcatccttccagatcgcgaaatcgcgaggcaacgcgagggatcgagtgcgggggaagggttcttcaggttacctcaacctgtgacctgtcccctccccgatgcgtccctcccggatgagaattttgctctcgtcttggcgctgtgatcaccgaccccgtgggggcaagggacgcgaggtgagtgaggaggaagacgggagggcactgttgctcacgtctccaccgtgccttccacggcgccgccgccacgcgtttggtctggtcgtctggaggagaggcactgccgcgagtccccccgcgtcggcggcgctatggcacgccgtagaagcgggaatggtgagtgcggaggcgaaggggctgtcgccggagcggcggcgatggctggaaggcgagacggcgagccggcgagcggtgagaccggcggcggtggctcggtggcgctggcccatgggtccaactgcagtttgtacttttgtggaatctggaccgtacgatgggcaaggattcgatggtctggataaatgatttgaaatttgttttgtttggctatgcactccaaactagagttactcataattcaaacttatctggaaatacaactacttttccactcatctcttaatcctattttctcatctcaatcaatcacaacaattcttatcgtaactttaatctcttaaataaaatgaatataaatagttgtactttgggacgggaaagtatttgtctataatcaacgctgacataaactccctcgaggcatgtttggtttgttgttcttcttagctataaaaacagaggcaataccaatgtgttaagttttcatctaatttggtacccaaaatttggcatgtttaaaatgttagtgagaaaaacaaataagatatatacataactaaaacgttataacaatgtgcaaaacaactattctttgccaaagttttggtatgttagatcttgtcgttgccaaataatttggtaacgtttggattggcaatgatccaaacaagcacataatacttgagtttaacccatatcttctttgcgccttcatttttaagttttgcaaaagctgcaattaatttgtgtggtcaatatctatatctggataattaaagtaggatgagttgagatagttcggttcagttcaatggatgaccggccttatgtttagttgaacggatgtgacaagagaattcacgaccgtgcgacacaaataatgttgtaagatcatgtactatcaccttcagcctaatccactaatcatgttgtacgatcttgtactatcaaccaaatgaatgcatgcatctttctatacacctaagtaaatgaattgacatgataacctttgtgatttgattttgttcttgacattttgaaacggtaagaaataaaatatgtcatatgctcttagtgacaaactattattgttccatcagtgcaaagtgcaagctaaaatgttcataatctgactataccctttcaactagagaatcataaatggattgttcctcgctcgtatcaatggtccgacattgctcttttgcacaggaatgtttttctaaaccatagacttcatttctcggaggcaatggattaaaatttaatctttggtcttgggggtcactgaaaagaaataatatagctatgtttaagggggcttgagattataaaaagcagttggtgaaaatttagaaaaagttgtgattctcaacttttggcaatctagctttccattcactatttagattccacaactaccaaacctcaaaagttgggtgagaagttagataatttcagtctcagagggttaaagatttgtagagaaactgtaattgtcaaagttctccaaaagctcaaaatttgggtgaaaagatatattgtataggagaggtaggccctgtttctttcagcttgatattattataatccagattattgagagtaagctgaaataaacagacaaattattaaagtagcttattataatctgaagcccagcttattataatctgataagctcatttaggtaacaatctagcttatagtaatctggcttaataatctaaattataataatcttaagctgaaagaaatagggcgttaaagattttgagaaaaggggtaactgtcataatctcttcaaagaagatcagatatctataaaaaaaatcttgatttataacattcaaacgttatagaaattagttgatttctagcctcttacttactcttgggttacaagtcgtgaaaatttatccatttagtatcacttattcatcacgtaacaatactatttttctattaataagaatcacattgttctttttttaccaccgataaattttattagaaacctagaatgaatagggatcaagtggattgaaatactatgcagtcgactgcatcatgcttttatcactgacatatgggtccaatgatatccgagcacacatattagtgataaaggcgcggtacaattgactacaggggatcctggtctggatcaagtctttgtgggacttacgagcaattacaagctcaatgcttacacgtattcagatcttacgggatcaggagaggagaatatttacgatccacatgaaacgagaaaagctcattagcatatgattaattagatattaattattgtaaacatgaaaaattgatttatttaattcttttaaacaacttctatatacaaattttctgtaaaaaattgtagaaacgtagtaacggaaaacaacaaaattgaattttagatttggagtatagaactgaaccttagactttgactacacagtgagcaaccactgcagtcggggcccacctgatacactaaaggccaaaaaggtcaaaatttgacttttccacccatcgtctccaggctccagccgttcagcgagagaggagaggcaccgaaagagagagaaaaaaatcccaacctcccaaaaggccaaaaccataagccacaaatcccctcatcggctcatccccgccgcccacccaccccccgggatcgagctccatccgcccaacgattccgccgcgcgcgccaccggattccgattttgttctcgcgtttttggcgcttttcgatctcccccgaggcggtagccgcctagccgcccgccaccatcaccacgcgcgcggtcgcggcggcagaggcgcgggcaggtgggcggttggtggcggctccaccgcattcacttgaccgaaaatggcggccaacaataatagcgacccgatcctggacgagggagggggagggggcgtgaagcacgaggcggtgggggaggcgggagaggggaagggtggtggtggtggtgcggcggcgacgcaggcgcccgcggcgatgctgccccgatcgggctcgcggccgcagctggacctcagcggcgcggcgatccacggcaacctggaggaccgcaacccgaccatcctgctgcctaaccagtccgacgacatctcccacctcgccctcgacatcggtggtacgtacgttcgtggcggagctagctcacactccccccgtttccgactgatttcgggttggcaccttccgttcctcgttcgaatcagctcagtagcatcaagtcatctggcggaagtagttagtgtagagtgcacgggagatagttaagtgcatggaagcttagaatcaaatgcttgatggattctctctctaatatcagtgtgaacaagctagcagttggtcgtaatgctgttgtacttgcatttgcatgctgtgtgtgctcgctactaaacgttatggacaccttatgtgtgctgttgctagttgatctcaccaataactttggattattaagtaaactctggatttgtgacgttggtttctgaactagtaatgacgaatgtggtgattagttttattgttcagaagctccatttttggctagcaatccaaaatgagagctacaatctcttattctcttcttggttcccaaatttcatgcaaatttgtttactaagtactgaactgtatattttctctaggttctcttataaaactggtatatttttctcggcatgcggagcactccagtgaggacaagcgtaagctatctacgaagaggagacttgggatgttaaatggtggcaggaggagctatcctgttcttggagggaggctccactttgtcaagtttgagactgggaagctaaatgaatgtttagacttcatttcttccaaacaactacatcgtggcggtatgcaaccatttctttgtattgttaaaaatcgaaatcatttatgttttggggtttggattgtccacaaattttgtgtactaatgttattttaatactgcaaattgctttggtggtcatagattgatgtttaccacattatgaacagggatttgagaatatgtagatagttgctagagttactaatttacttttatcacatgcatttatattagcaatttcaagttggccattatcttctgtgtttggctgaattgtgccctgaatatctttattatgatggcatacttgagtttgttcatttcatgttttttcacattcttcattgtcctgtccattctggaagtttaccagctgtctaatttgctagagtttggctgaatttgatacttaaactgtgatcatcacatttttgtccacatggtttcctaaggttttgttagtctaggccgttggcctgcactttcttagcattgagtagaacttttttgctgcaggggttgattcaccttcgtggcgctcaggagctcagcctgacaacattgtaatcaaggtgacaaataatgagacagcaccctttaggtttatgaaagtttgtttggtcaatgtttcgattaatgtttgttattgttcattagcacttgaatatttggatagcaatccattattctcaatctaccttgtgttgttggtgtagatgatttcaacctatggttttggtgaataacaatcataacgctgtagaacaacttgtagtaaaccatgacaagaataccttccttcccatttccccaagattagctcttgtatagcacttgaatatttggctagcaatccattattctcaatcctaccttgtaggtgttgttgtagatggtttccacctatgattttggtgaataacagtcattacactatagaccaacctgtagtaaacagacaagaatgtcttccttcccatttcccaagattaactcttgtgtcataatgactgtatctcatagaagcaaagtctttttcccccacttatcaggaacagactgcgtactgatgttttcatgtacaaaatactgactgagttatcattatcttgatggcattaaagttatatattttagttgactatgatattttgtggaaaggcaacaggtggtggagcattcaaatatgctgatctcttcaaggagagattgggagtcagtcttgaaaaggaagatgaaatggactgccttgtagctggagcaaattttttgctgaaggtttctatctctgagttaccctaccctatttaggttgagactattcagttttatattctatatgatctatgtaatggactaaggcagtaagtcatatttcaaatttatctgaagattgttcacattcaaaaaattaaattacattagtaagacttatgtgttttcagtctatacgccatgaagcctttacgcacatggatggccaaaaggaatacgtgcagattgaccagaatgatctgtttccattccttcttgttaatgtggggtctggtgttagcataatcaaggtaccttgcagtttttttttttaaatatcttttttggattggacttctttttttggtttgctggattttgttggtcgtcgtttttgaaggttgatgggcatggaaagtttcaacgagtaagtggaacaaatgttggtggtggtacatactggggtttggggaggttaatgacaaagtgcaagaggtatttcttcttctgctcatggacatcatacatttctgttgagatctgagaagtttgagaactcctaaaagtatgattttctttcagtttcgatgagttactagagctgagccagcgtggagacaacagcacaatcgacatgcttgttggagatatatatggtggtctggactactccaaggtaatagcaccgatgatggaaaccgtcttgttaacatttcatgttccataaagttatcacacaatgtagacctatgtttgaaactataaattgttaaaatctgctagtcagacttggtacttgcacaactcacgatgtgtcagaaacttcagaatagaggtccttcaagtgcccaattcttctttcttactaattgctgcgtgcttcttctttatggcagattggcctttcagcatcaacaattgcctctagttttgggaagacaatttcagatgacaaggaactgtcagattatagaccagaggatatttcactctctctgctgcggatgatttcttataacattggtcaggtatgacaaataatgataactatttgatacaagtggcccaatcttcatcagaatttttccatagagatgcacatttaccatttcttttataaatttggaagtttgaaaaagtggtccaaatattgtagcggtgagtctaattccacacaaacaacagtaatcttatctgaaaaagaaaatcaatagaagaacataatttttttacttgtattttgttatgttgtgttctttaatggaaaaaaaaggtggtataggtgtcagtagggttggaaaaaatgagtctgggtagtaatactgccaaagatgatattagatgacaattctaaacaatgggttttggtgttaagggtctattatcacttcctatggctcaaggtagtgatttaggataatgtgtgttgttacctattgtaggatgtaggctaatagcataatgtgctcaaagctggtgttaatttgtcttccatgttccgggttgagtttatggtgtactgatttttcaaaaatatatttagccaaaggatttacaggcccattgaattttatcagtggctgtatcaattgtgatgttaattctctcgtttattttactgctttttccaacttttttgcctctttccattgaagctaattcaattgttttggtttgtagatttcctatcttaacgcactccgatatggacttaagaggatattttttggtggattcttcattcgtggtcatgcctacactatggacacaatttctttcgctgtaaatttttggtaaaacttccatataggttcttgtttttatgttgctcgacagtagcttagcttattttgaaaacagtttcctccacaagttctgttcaagaaaccaacgtatgctatatatttgtaaaggtcaaaaggagaggcaaaagccatgtttctgcgtcacgagggttttctaggagcacttggtgcatttatgagttatgagaagcatggtcttgatgacttgagaatacatcacttggttgaacgcttcccaatgggtgctccatatgttggtggaaaaattcatgggcctcctcttggggatctcaatgagaaggcaagtacatctactcttgatcatggtaaccttaatggttttgttggtcattggggttttagttgttttagaacaaatttattgcttgaaagaagtccacattgaaatggaaaccacactcatccaactaaaatgaacacatgaactgaaacgcacactcttggacttctttttcccccctataaacagctgctgggatgagttgaaatcttttccacctgttgttactcttggctcgtggttaacattctctggctccctgttattctgtttgatctattcatcatgtatggctgctagattaataatcatgtggaactgtacttcttcccagatatcatggatggagaagtttgtgcagaagggtactcagattacagcacccgtacctgttggatttcctgtgacaacaggtatgggaggttttgagaggcctaccgccaagggagacattttgcggtcagatgcaagtgcagctctgaatgttggtgttctccatcttgtacccacattggatgtatttccgctgttagaagatccaaagatgtaagccacagtcatccagttctctataacaattattgcaattttgaaatataagggtacctgcagtaaattcattatggaagctggaggcacacttttggtactgtaaaaggtccaaaaggttgggtgaataatgggtaatttgcctcaaaaagctaaagaaagcatcaaagtcatcacttctcaaaacatttttaggcagaagtaattgagatactttagcatattatctaaatatttgaaattgcagtctccattttttttaatataaagagctgcactgcaccccagccaaacagaggtcttgatttgaacttaagaatcatcttgtgttagctcagggttaagaaatatgagctctttcaccgaatcacctaagcagctcttactgtatttaccaattaaaacaatagtagtctatctatagttctataccttttttctgacattgtggatcaacttatttaaagcatttttatcctacatatacatgccaaaattgcttgaggacaagtggttttattgtgcataagcttgctgatggtctgatggaacaattgccatgtgcagctcaattttagatcatgcgtaagttgtaatatattatctgtattgcaggtatgaaccaaacacgattgatctcgacctgaatgagtacaagtattatttctgcttcccctatttctagatatcttgtaggaattgaatcatttgatgatatctgagatgtacaatgccaggtactggttcaagattttgtcagaccatttgcctgaccttgtggacaaggtatggtgtacttcttgcaataaccttgtataacttacgagataagacaccagagttttctttgacaatatggcttagtgataattatttttttcatgctcccctccctccatatgagtgtgcatgtgtgctgctacctatctcatcctgttcctaaaacaatgtcccattgggtcctcataagttatagctaaatacaagccccaataacatgccaccagtttgcagtattttttttattgcttttgttggtttacacctaagaatgattatactcactcaaatgttcccacaaactcaacatttcttattaagaaaatttggcattataactagtaacaggtcaatcaatattatacgttataatttatttgttagcaatttatgaatacacaagtaactgtttatgttggaatctccacctcaattcctcttgtgaatgtgtgaaaaatgttcttttttgtactaatgtgcgcatgttattgttggtaggcggttgctagtgaaggtgggactgatgatgccaaaaggaggggtgacgcattcgcacatgctttttctgctcatttggcaaggtacgcagttgccattacatgacattagttagtacggagtatatttcagttttcttcattcaaaatcgagcattgataatctgttagtctgtaaagattgatattgtaaaactcattacactatgtcacttagcttcctaactcttttggttaagtttaggttgatggaggagcctgctgcttatgggaagtttggtttagccaacctgttggagctgagagaagaatgcctgagagaattccagtttgtcgatgcatatgttagcattaagcaaaggttagttcctgtctttctcgctctttatgtgtgtacgttcatgtgttcatgtgcttttatctaatcttacggttttaattgtgtgtgaagggaaaatgaagcttcactggctgttttacctgatcttctgatggaacttgatagtatgaatgaggtaggagatagcagggcttgtcattcaggcgtcattctgcttagctcagcacccaacagaattgatctgaatatttgttgttgtgcaactatgttttcaggaagctagattgcttgcactaatcgagggtgtccttgctgcaaacatatttgattggggctctcgagcttgtgtggacctttatcacaagggaactataatagaaatttatcgcatgagccgcaagaagatgcaacgtccttggcgggcaagtattccaattctgaccttttaaatgttatatttgtactgcaagatttacccaaagtttcaaattacttgcaaacttcttttttataattgctttgctgtgtttatatttttgtctcttatttcagattgatgactttgatatgtttaaaaagagaatgcttgctgataagaagggccaaccatacaaaagagcactgctttttgttgataactcgggtgctgatgtggtccttggaatgattcctttagcacgggaattattacgcaatggaactgaggtataagttaagaaaaacaataagctaaagacaagtcgcccttttgttatctttatgcacatttgtgttcaaattataggtaacagacatgatgctgtttcaagagatttaatcatggaaacaggaaagtttggatattaacaatgtatttaattaacattcctgtgttcctgcacatcaaagtacagtgaatgatagattgggagattgtcctttataacctagaattgagatgacttataaattttaccggccctgtgaaatattccttccgtttataaacatgtcgttttagacattgacatggtttccaagatgcaaagttgaccactaatttctattttagtatatttgtataacccaataaaattgtaatattatgaaagtggttttcgagacaaatgtacatatcattttcacgcatccaactattaaatgtaaaaaaaaaatcacacacctttattatagtccattttaatattatttgagtttaattgtatcagatctgatatccatacagttgacttgagctggtaacaaaatgttgattttgtaggtggttttggttgcaaattcattgcctgctttgaatgatgttaccgctaatgagcttccaggaattgtggctgaagctgcgaaggtacaaatgaatataaattctattttcttgtccatcctattgttatcttaagttctgttgttgcttgtaatgtactacagcattgtggtatacttcggaaagctgcagaggcaggtggattgatctttgatgccatggctggcatccaagatgatctgaaagatgaaccagtatcagttccccttatggttgttgagaatggatgtggcagtccgtgtattgatttccggcaggttagctcagaacttgctgctgcagcgaaagatgcagatttggtaagatagactgtagctctttgaactgaatgcattttctcatgtaaaataaattggaaagttatgtggtttgatatatcggttgttgttttaaatgttgtgcagttaatcttagagggcatggggcgatctctgcataccaacctcaatgcccgttttaagtgcgatactctgaaggtacttgtttctgcaaacagctgatttattgatgcgcacaattacaaacttgtcattcccttggctaaataccagtacaaagtaactctgctgtaattattgtactgaatatcttggaaaaaaatgttgaatcaacagtgtgaccagtatcggatctagaattattttagagcccgggcaaacttcactatagctagtatttattaccgaaattatatctcaatttttcctaattacatggaattttagtggattatccgctgacgagcctgggcagctgcctggggtcgccaggtggtacatccaccactgagtgtgaccatggtagggatgtacttacgatagagacaattctcaaatgcaaccatcagaggaaaaatacaataaccttgaatgaaatatgcaccatttggtcaacagccactgcgttgctgaatgctgacactttgctagcgaccactgcactgccagagccctgcttgcacgcctcagtcctcaatcgacctcccagcatgccagcaccaatctctgcccagatttgggtagagagtggtggtggtggagcaacaccaatggtgtgggagtggaggtataagagtaagaaagtccggaagtggacaatatgggggaaggggagtgcttagtaggaggaaaaggaaaaatattttaaaacagaacttttaaggtctaacagcgtagttgctttttgaagtaatggttctggcatctatgggttgaacccaactggaaatttattgccttacttgtcagtatgttcgggattgataagaaggctacattaaatctttgaataattgaattgtggtgtcatacttaaatcttgtgtgtttttacaaggttaacaaaatgactttatttgcagctggcgatggtcaagaatcagagattggcagaaaaacttttcaatggaaatatatatgactgcatctgtaaatttgaacctgttccttgaacaatgcggaagaatgtgccgtggatttggtttgctctagcacagaagcagctaataacaggtactgtgacactgtcagcacatcactttatcttatatggcactaaaattgtttgctgaaatgacgacttcgatttgtgcagaacctagataataatttgttcttaccagttttatcattttactgtaatttgcaggtacatctcacttaatctgtaaccagtggggtcatggtattagcagtgtcacatatccaagcaaaaagccataagaacaaatttcttatataagaactaaaagatcctctcaatgtactaaatgctcctttagatggtaaagaatcaaagaagtgttgttgacttgttgtgaatattgttatcaaaacaatttttctgaacatggagtagcgacataataaaggtttttaaagaatttgtagaaagcatacaagaggattcagcatttggaagaacatggattcaatatgcttgcaagttgcatcctcgaagtttgagaaataacaatcaacagatgcaatattgaagtttcatatgttgaggaataacagagagaaacacaaggggcaaaaaaaatgtaatgggggcaatatatagcaagttgattcgcaaatcaacaccattacaaatacaggcaagttctaagcaaagttgatgttataagccttgctcccgtccgccctgaagatgccgaagtgcctctcgaactcggcgccgggcttgccgtcctcgtcgtacaggtcgaacaggaacacctccacgggcacgcctggccgccgcggcgtgccggcgccgcgcgccacccgctccacgatcttggcgttgtaggcggcggcgttctgcggtgtcgccgccgggtgccccgccgtcggccacccggtctccgtcaccgcgatcggcacggcgccgaacccctccctgtcgagcgcggccgccagcgcgtccaccgtcgcgtcgaacatgttggtgtagacgagcgcgccgtcgctcaccgccggcgcgcccgcgccgaacagcgcgtagccgagctgcacgttgacggggtcgttgacgtagctgatgaacgggtaggtgttcaccatgaagggcgcgccggtgtcggcgaggaagcgcagcatggggcggaggacgtcgagggaggcggcgtcgaacgcgccggcggatggcgggtacgacgaggcgagcaccgacgaggcgtgcgcggacgagaccttgaccttgtcgccgaggccgagggagacgagcgcggcgtgcaggttgtgcatggcgggcaccaggtgcggcgcgtagaactggttgttgtacagcacctcgttgccgacggcgaggtagcggacgcggtcagcgggggcgtgggcgagcacggcggactgcagccaccggagcgcgccgtcgggccccgcggcggagaggaaggtgaggttctcgttgggcacgccgaccatgaggtcgatcccggcggcggcgaacgccgggagcaccgccgggtcggggaggaagagccgcgccttggtgatcccgttctgcctcagcaacgccgccgcggccgccggaggtggaaggttgctgccgacgcggccgtggcaaatgccgatcttgcccgggtcgccggccaccaccacggccgccgccgcgagcagcgcggcagcgaacacggcgacgtggcgccaacacaacgctgctcttgtcgccatcggaattgacgttgccaaggcaagacgcaagactgcgttattgttgctgtttttatttttatttatttatggtgcgttagatttggttgtcgctgtcgctgtttatatagatgttgctaagaataggagaggaggaggagacgttgagattgttggtgagaatctaaaagagagtgtggatctgttgctttatggttgccgaggctggacgacaggacgggtaaccgttggcatagccgttggttttcgaacaatgtcgtggtgcatttggagggagtatgaccatgagtatacacggccacgggtgggtcacacagccttgttgctctaatcatgtcgaataatccttgtgtcgttcaagaatcggtagaaaaaatccttgggtcattcgttagtaacgtcgcgtcttgtgagtgattaaagcgagcgtttttgtgcctgcgtcgcgtttactactgctgctactactaggacgttcctttttcgagttttcatcccacacggcaggactggttggtcggttggcagccgggacgagcgactgcgcgtcgtgcgccgcgcgagcacgttagcacgcacgcacgcacgcgaaccacgcctcccatccacccgatcaggtagacgcagggcatcagcgcgtgcgcgtcactgctcacatgcactgcagcattgtcgctggcttgctcctgctcccgatcagcccacggcgcacggggcctagcccaacccgtgcagctcctcggccaggcagagaggccgcggcccagccaggccgatgcgggtagtggactggtccaccgcggcgtccgcagcttccttgcacgacgaccatctcacgttggatttttccaccggtttcgcactttcgctcgcgctctgcctctctcgttgaaaacggtggcagcatcatcgtttttcacgtttccatcttactgtataaaattcttaatttttctaatttctttcggaattatagtgcaatcatcactacctagttaaattgataaatatataaagagctccgatcgatccacaatcattttcgtagaaataatatcgttttcatcatttaaggccccgttcttttcttgttttgctgttgcaagattattatttcctatcagcatgcttctcagattattaaatgtggtgttatttgaaaaactttttatataagagtttctttagataatctaaataaatctatttttttagtttgtaataattaatactcaattaatcatactctaatggcttgtctcgttttatggactaccgagcacatttgaactaagtctaagtcattaacttgcaatcaaggggtcaaacctattgagaacagggaacactctacttcgcatcggggaatccgagccgtccaaagcccagttatactataaacaaagtcgcatccacctcaccagtgattcctggattcctcctcactccactcaacgcccatcaacatggcctcggcgcctcgctcgccctccaacatatcctcttcctgctgctgttgctcatcgccgtggcagcatcttgtttttacttgcatgcttatagggacagcaaaaataaccacaaataaaatatcgaaccgaactgatcgagactgaaacagcttcaaacatagggttgttttggtttgaagccctacaaaaattttggtaatgccaaatcttgagcaagtttggcactaccaaaattttggtaaagttgtgttatttctaactctattgaattagtaagatttggccttaatccaaatagctaacaaatactattcaaaactaccaaataattggtagggtaataattggcttcaatccaaacatgcctataatcctaactcattcaattcaccccttcttcctggctttccttcctcctcgtcacaccgcatgccacccctccttccttgtgtggttgaaccacgccactccatgccccctttacttcaatggcaataggcgcccacatgtttctggcggcgacgctgcctccactccaatagcgacgggcgacaacggataccaacttggagcagaagcgtctacatacaataggattggggcctgcaaatccaacgccgccataaagaccactagcccaggtgccttcgacgagccgggtcggtctgccgctcttatggatcaacgtgccatgaattcttttagtttttttgaatggggataactaaagatttctatgatttgtttgtgattttttagtgaccagtgtgattatttccatctcagattttagttatgaccgaagatcaaaccaaaacggccgaaaccgaatagctcagtatttattactccctccatctacttttgatagtcatatttctaaatctgaaaaatttatttttgataggcatatttcaatccaacaacctattctcttaataactttcttagatttaatgcgtgattatccattcttccacacatgattggctacatgggcattgagaaatataaatattaataaattgtttgtttacgaggaatgactagtagcatgtttaaatggatgataaatagaattacttatcattggtctgtgtgccaagatgaagaaattttcaaaaaccacccctactcgcgcccacggctttcactcgctccgtcggttaaaaagtcgttagttaacctgcaattatcccattgtttctttaggagaagagataatggcgtcggtacataatacatatggattttccggtttcaaacccaccgaaaacaaggagcaccctgcatcgcatcgggaaatctgagccgtccaaaatccctcctcctataaacaaaaccgcatccacaccaccgtccattccggaattcctcccgagtccagtccactccgcgaccgcgccaacatgggcctcgcccaccggcgcctcctcctcctcctcctccacctgctgctgctcgtcgccgcggcggcggaggcggccgccgccggagcagggaggaaggagaagggtatcggcggcggtggggggctgcggttccggggcgggagcgggacgttcaaggtggtgcaggtggcggacatgcactacgcggacgggcggcggacggggtgcctcgacgtgctcccctccgaggccgccggctgctccgacctcaacaccaccgccttcctctaccgcctcttccgcgacgaggaccccgacctcgtcgtcttcaccggttggattcctctgccccgcccacccaatctcctcctcctccacccattccttgttagtgcttcgattaattaattaattattcaactatgagtagtttattctgatcaattttcgtatatcccacctaacttctttgtcgccttttcctacgaatcttggttaacaaatccatttctgataccgattactcagcagtttgtttgccactctagcaaagtaacccgcgtgacccaacgatcttacgagttttttttttttgcagcagtaattttaggtacgtaatattgcatgtaacataggtttaatgattctcgaacagtaaatgattggtgaaccggcgaatccgtttgcaacttctctgaaaatattacccgagtagtactttttctctgaaaatattctcgtaatggtttattgacagtacaataaattcgtattatatgtgctagtgaggtcattagcgagctgaatttgctgtacactggttcatacctcctctgacatttttgcagaggaagtgtagtttctgtgaacttgatacgtactcgtactagtagtactaaagtacaacaagaatgtcacgggtttccctttccgaagtgataaagatgtgtgggccgggccactgaagctcattcttggattggatttcaagaattctcatctgtagggtgggggttgccattcccaatcatgcagtgaggtctaggtctagattgttgattggtccattagatcactaccacgatgggatgaactggtctcgtgatggctacatccatgatacacttggacaattactgcacacctccatctgatcgagctagcagccgtactccctccatcctaaaaaaaactcaattcctgagttttcgcgtctaacatttgaccgttcgtcttatttgaaaaaaatatgaaaaaatttaaaaagataaatcatgcataaagtattgttcatgttttatcatctaacaataatgaaaatagtaatcataaaaaaaatttatataagacggacgatcaaacgttagacacgaaaatcgaagaattcggtctttttgggacagagggagtagagaagaacaacagtacaaatgttgcagcccttgtgatctgatcagctcttgatcactgtcctgttttcgtcgctttgtttcacgggtaaccttggttgatgttccaaagctgctacttttgcagcgtttggatgcagccactgctagctgttttttttttgtctgtttttccctttttgggtgcagacaatacatcaatttagtagcatttacataattacgtttttttcatataaaaatggcttgttcagttactcgtattcagaacgatgatggccatagttcatatacttcactgattattgttactttatttccctgttttaaagactatgtattgtttggtgatgctatttggcaggtgataatatctatggctttgatgcaaccgatgcggccaagtctatggatgcagcaatcgccccagccattaacatgaaccttccttgggctgcggtgatcggaaaccatgaccaagaaggtacgctgtcacgcgagggtgtgatgcgtcaccttgtgggcatgaagaacaccctttctcgcttcaacccagaaggaatagaaattgatggttacggaaattacaatttggaagttggtggggttgaaggaacattgctggctaacaaatcagtgctcaacctctattttcttgacagtggtgactattctacggtgccttccatcggtggatatggttggatcaaagcttcacagcaattctggttccagcaaacctcttcgaatctccaggtgaactttaagttgcacattgtacacacacaaaaaaagaatcaccaggtggaataagttgacataatgacaatgttgtgaaatgcagacaaaatacatgaaggaggaaccgaagcagaaggcggcagcgcctggtcttgtgtacttccacatcccattgccagagttcagcagcttcacatcatccaatttcacaggagtgaagcaggagggtatcagctcgccatcgatcaactctgggttcttcgccagcatggtggaggctggggatgtgaaggccgccttcatagggcatgatcatgtgaacgacttctgtggaaagctcaatggcattcagctgtgctatgctggtggatttgggtaccatgcgtatgggaaggccgggtggtcgaggagagcgagggtggtgtccgtgcagcttgagaagtcggacggcggcgagtggcgaggtgtgaagtccatcaagacatggaagaggcttgatgatccacatctcaccacaattgactcagaagtcctctggaacagaggctccaatggtatgacattctcctgtagagtctgcatgactgtgaatccatgatggtttttccaagctagataattatatctgattaaaaatgagtaaattttggtggatgtggtctttcatagtagtgtaccatcattgtttgttaaactactttttgaacaggactacaacagtttttagacttcaatggtatggcattcttctacatgactataaatctatgatgcttattcaagcttatgattatatctgattaaaaaatgagtaatcatagtgaattgtaatatttcatagtagtgtaccatcaatttttattgacctacttttcgttttcggcactactacaattaatcttaaagagttaccaattgacattttgaatatttggcaggaaggcgcaagaagaatcctgatggaaagatgagatagtgatatagatgggaagacggggatagtgaaatgttgcaacgtactacacgttatgatgtgctgtttgccaatttgttttacaaaattttcgatttatgtaaatgaacaaaaacatggtacacgacacggcatgcacccttttcgcggttgtaattctcaccgagaaaacagtgaattttagtaaaaacagttactgtagttttagtaaaaatgtcgcaatttgccaatgggatcaaataaacggcagctggaataaaaagagagccaaactggtggacacaatacactgaaaacaaaacatttattcaactataatcttattcgtgagccagtgggacaagataggtcaacgacattttgaggaacagcctcgagggctctttgatgattccttcttgtggtatgatatgacatattgatttttccctaaatagattacatatacagccaaatcaacaacagatgcgtgtacatcagacagtatccctctataaatatatgcagttgggaacgcaggcacaaacagaagtgcagaactcacatctgttttgtataactcgtatacagattccgaatgttgctcaaccgagatggattggcagcagcgctgcaagcctgcgtttggcgtgagattctacctcgtggaatagttgctctttcatggaaatctgaaccttgttttatggatgaatctccaaaataggtacataaccagcaggaaagtataccagatcaaacgccatcttcagattggttgatgctatagcttggagtgtggtctcagagggcatccaccttcaaaagcatggtcaagtacttcctcgatgcgcttcacaagcagaatctacagtagcaggtcgaagtaaagtcagcaatagacattttttagacagctacattgcacccaaaagggaaaactctatttactggtcatctacgattcaaaacatacgtctactatatggtatcggaaatttcttccaatgctactttatctatgatatattttttaactccgaaacaatttgtgcaccatacatatcaactatatgctcagggccttagagcatctctgactgtcgaaatacatagagcaaagctctcaatacatacctccaagccagagagaatgggtgctggaacctcagccaagtccttcatgtttctttctggcaatattactctcttgatgccatatctatgtgctgcaagtacctgaattccagaaaaaaacatttcaagttagtcaaagagcagagcagagaaaatggttaagctttcatccttctgaagtcaattaaataacatgtcaggaacctatagggcagtaccttatccttaacaccgccaactggcaacacaaggcccctaagagtcatctctcccgtcatagcagtgtcagctctgacttttcggtggctaaatagtgacactaatgatgttaccaatgtcactccagcagaaggaccatcctttggcaccgcgccagcaggaaaatgtatgtgaatatcacgactctccaataagttaatatcagaagtaggtgacagattaaggtcagcagctcttgctctcacctgtcaaaaccaaggaaatgatgagtaccactatgcaaaactaggcaccaaaacattgtgttttcttcttatgtaatattggagtttcattccagtaacaataattggagaaaaataacttcaaagggcgatatcagagaaccagcagaaaataaacaaagcagcatgatgcaaccaatgcatagataggtgaaagttaaagaagatgcttacccatgtcagagctaactgtgctgactccttaattacgtcaccaagttgccctgtcagatgcaaatcacccttacccaccatcgctgtagcctcgacaaattgtacctccccaccaaatgaagtccaaacaagcccaactgacactcctgggctcgccacacgatctgcagcttcgctatcatcaaatcttggaggctgtagcacaaatatagcatattaccataagtaagacaaacaaaaagaaagaactctgtagcttctcataaggctatactcaatactcaaatgtttaatagcataccccaagcactttttctagcatagcctcatcaacaatcatgggtgatggattctcataagtatttgatatgtcctggcccataggaataacttccatttcaacttcaccaccatcagcaagcctagaatccagtagagttgtagtaattggttgtatttccttgccaagtctaagcgcactatcttgctccgcaaccttgactgcagctgcacgggccaatgcagctaggttccgctcaagattacgtacaccagcttctcgcgtgtatctctcaatgatgagtctgaccatagcctggagaaatggcaagcatgacgaaatactcaggagtcaagaacttaacccaaaaatgtagcagttcatcaaagtactgctgttagcaaaatatcggaatgatgagatcaactctattatttagcagagcacaatcaggcagtgcctactgtttcatcaaaggtgcaaaagcatggtaaatagtatgcatctccagctctccacattcactaatcttgcattgattctagatcaaactaaactatttttaatcaaacaatatgccgaatttctttataggcaacaaaggatgcagcagaaaactgcatatcttacctcaggaatctgaagatatgtggagctcaagccatgctgttccagtacccttggtatgagatgtttcatggctatttttagcttctcttcaggtgtgtaacctggtagctcaataacttccatcctatctaacagaggaggggggatgggttgcatcctgttggcagttgcaacaaatatgaccttcgacaggtcaaatggaacattcaaatagctggtgaaaacatgttaaggaattctaaatgtatgataatatagatcatatatcaagtaaagaaatctcttctctaagcattgtgtagtgtacgcaagttataggcaacccagaacatagcattgcagataatgggggaaataaactgtaactatccaactaaatatgaaaattgagcggtacatgaaaaacacaatagaaagatgtccacaggtagtgatcccccccaactccattaagaaagtaaccaattaatcagaaaatgctgttcattatctgaataatttgaaaggatactgatcgttgaacgttttattctgctcagggtcaagaacttctagcagcgctgatgctgggtccccacgtacatcagaaccagttttgtcaatttcatcaagaagcatcactgggttgctgaccgatactctctgcatttttttaatgggcagaatatgaatatagcacaagagatttcactattaatccaagacttaagtatattagaaacacaaaatggtttgtcaggtggaaatacgacattaataagcaaaagtaaaacaagattggtctggtcaaagaaattgtaaggtcataagttactcctgaaataagaaaaacaagtgattaaacctttagtccatcaatgagacgtcctggcatgcttccaatgtatgttcttcggtgacccctaatatcagcctcatcctttacaccaccaagagagattcttatgaacttcctatttagtgcctttgctatcgacgatgctaatgatgtctttccaacaccaggtggtcccacaaaacacaggactggacctctggcatcaggcttaagctgccagtattaacgtgcacccatgagagagaaaatacatgatatcataagcacataaatttatgcatgtgtaccaaccttacgacagccaaatattcaataatccgttgcttaaccttggtcagcccataatgatcacggtcaagactctcctttgcagctctaaggtcaagctccctctcctcactgactttttgccaaggaagttcagcaagaagttccaagtaggttcgagagctgctatatccaggttgctgaggttgcatctttcttagacgcctgcaagaaaaaacaactagatataggaaccggcggtaccacatgcctgtacaattgtacattgagaatgagatgataagttaccttaactccctttgagcatgcttccaaatattagcaggcattccagcattctgcatcttcctttccaatgccgctacatcatcctcatcatcatcattatcgccaagttcctctttgatagcccgcatctgtgcattaaaagggttgatatcatattggaaacaaaacaatgtggcacaaaagaagcaatggaaacaaagcaaataaactccaacaagatgtgaatcgtaaaaaaagggttgtgctcatcatgtatactttcaaactttcaaaaaacatgtaagtatgatgaaatgtaacttatactgacataattgttgagagcaaaaacatcagcagcccgaaaatcctgaatcttcaagaacagaaaataacatgatgggcaaacaaacctgctggcgaagcaaaaactctttctgagactttgatagctgaccctcaaccttttgagttattttctcagctacaagaattgactgttcatcacaaggaaaggaaataagttaaaaactacccaatgtttaaacctttgatgatgaagttattaaaattaaggaaaactaattcactaatcataaatgtcttcacctgcaggtgcctgtcaacaagttcggttgccttggaaagtctaacttttaagtcaactgaatccagcattgacaactgctcctcaaaacctatttcaaagctagccacaaaaatatcagctagtctgtacacaggaactgtctcaagaagcaccttagtcctaccaactgtcttctgcttctgcaattagaaacaacatcattgccgtaagtcatacataaccttgaaagaaaaatgtcatggataacagaaagatgagactgcagatctgatagtcacattgggaatatctatttagggtatagcgctctgttaaatttcttcacctgttcaagaacggaaattagttccattgcagtagctttgaactgcctagaaagagcaatgagatctgggtcctgctctgcgtgctccaactctagcaaattgcacaaacattaataatgtaagtgttagaatttgatattaggtgaattcaaaaggcacttaacaaagaaggtacaagaataaactaatataccaccaaactatcggcataactacaatggaaagtggaagaaaagggtggagctgtacaaaataacagctacaacagacttatgacaatgtagtgcaggaaaatagcaacaaaaataaactaatatttttaacaaacaagatcttacccgtttttgtcatatcaagacgtgagacacgagcgacatgatatgaacctcttgcactgagctcttgaacactgaacctacataaaccttcaaggacgacaatatatgtaacccttccacttggtttctccacacctctggaaaggtgcaaagccctagcagctactcccctatagatggacggaatgaaaaagtgttacacacctttttttggagaaagggagacaggtaggaaaacacaacaaaattgactaatttccaacagttctcaatcaaataattgtgtcaaagaagagttgaccactatcaaccaatcttaaccctcttgctttatctaagcccactgcaagttaatgcaatgtcacaccaacgcatagtgcgcccaacagaaagaaaattatttgcttctatcaacttatcaagtgttcatagaatgtaataagagcatgtgcccacactaacactagtttgtttacctttagtaatcgtatgctattgttttcccactattcccgacatattcaaaggaatttcttctttaaatcttgttcagagatatgaccatatggaaaaacacatattagcaaagatggcaatgttacacaccggctgtgccagtgaatggtctccttcccattcttagtatcctgcttcgttgattctcctgcagaaccaccaggcgccttgctcccaccctcacctgaatcgctgcctacacctatatgcgagcaacagcaataacagtaagaaaccaccatacaacaatgcccacaaatggctcacagaaccaaattaaaaaaaaaacagcagcagcagcagcctttatctcaccaggagacagcaatgagccagcagcttcggagtcatgcacagggagcaccccgatcagacccttctcctcccgttgccagagttcctgctccacaagcttcacactgcaggagaaacaagtacattgatgaagtcaaaatccaaaccaaaaggcagaattttcccttcccaccaagtcaacacacactagcaaagccatcgtacgcatacacagaggaaaaatctcaatactaatctgaaccacaagtaagtacaacacgcctagaaggtttgaacaccaaacagatataattaggagctgaattagtcaaccataaagcaaccaaagccgctctaaaccactttggattcagcgagttcatcaaactgcgctggaaactttttaactgttcacatcacagacgagatcatcccatcgagaaaacaacaagtgacgactacaatacaaaaaagcagaaaaagaaaaagaagaaaaagcaatttctacttgctccacacaaattcacaaaaccacagacgaaatcgaagaaaaaggcctcacgaatcatgagctaagctgactaagccaatacaatagcatcaaacaaagctaagctactgcgattttaccaaccacacgctgattaaacctaacttggactaataatccatccaccacccaaacccccgcgcgcccaatcagcccatcggccaccacccaaaattccaccctagaaaacccacacaacccgagaccgtgaaaccccccaatctcgcggtgcgcggaatccgctcgaggggcgccgacgacgacgccgcccccactacttacctgctggggttggtgcagcggatccgcacgatggcccccgggaggagcaccttgttgcggaacggcagtatcgcgagccgtccaggcagctccaccgccgcgtccgccatggccacgcacctcgcccaccccaccgcgctggaatcgtacggaagtggaggggattacggctcccgcgctggaattgaaatcggaggttggagacgatgacgaagacgacgaaggggatatttatggggtggaggtggaggagagcacacacgagccggagccaaactgaacacagagagagagagagcgggggaagtcaaggaaggttgctgcaggtggggcccgcatgtcagtgagtggtgtgtgggtgggtgtggacgtggcgctctggtgggataagggaaagggggggaaaggtgggatgggatccggtgcgggggcaaggaggaaagctgattctgattggctgcggggttcgggttgttgtgccacgctggcggtcagggggtgggcgggtttcggtgtccgctgtttcggatttcggagctcaggctgcgggatggggggatgtcgaccgtccgagatgggatggcggacggtgtggatggtgatcttccgcgagtccatgctgccatgccggccgtaagatcgggatccaacggatgggagtggtttagcgagtcatctaggccctatcttggagagtttttagtcactacagtttcttgaaaaatctttagcttccctgcacctaggttttgattttcgtgaaaccgttaaatgtcggtttgtaaaaaccggtcgtgattagctggttttcgtacagcgttaaccaaaagtcatcggttttggaaaatgaaaaggcaaaccctacctacatcgtcacatttttactcagatcctaataaattgtaatataaaaatcagaagttgaaaaacttgtttattagattctcatctatttacaagttactactacctccgtctcaaaataagtgcagccatgagtttccacgcccaactttgatcgtccgtcttatttgaaatttttttataattagtatttttgttgttataagatgataaaacatgaataatactttactcgcgacttatgtttttaatttttttcaaaaaattttcaaataagacgaatgatcaaaattagacgtggaaaactatagctgtacttattttgggacggagggagtagtacatattcctcgaaatcttgagctctaatcttagcttccaaacaagacattatccaatccccataaaatcatgtgaaaggaaaaaccattcctaatcagatttgcacatcggaattcataaaattttttattagggttccgaaggagttgaccccataaacttgacctgtgaggtggagaattcttgcaatctcacgcgtattaaactagtgttaatttggatacgaagtactcgtacttaagttagcagagacgcttattaatcaattaagtccgtgcagaagaagcaattcttctactacgattatattgcaatttctgttgctaccaactgctatgatatgttcaataaaaaaaaaggaatcagccttccgccattaccggtataatgggtgtgtttagttcacgtcaaaattaaaagtttggttgaaattgaaacgatataatacaaaagttgaaagtctgtgtgtagaaaaattttgatgtgatgaaaaaattaaaagtttaaagaaaaagtatcaaactaaactcggtctaaatgaaagctcggattagtggagccatgtcggcagccgtttttatttattcgtctgttggcaaacctagatttgataacctaaaattcttgctgagcttttcccaaaagctgagctaggcacgtggaaatattagcatgtgaaatccatggctcattctaccgtacatgacgaatttatgaggcttccagtcaacttcagagcttactccaatagtactatatactacagtaggtaggcttgtccaatagtactctcttcgtcataatataaggtctcgttgagttgacgaaaaaaaaattttggatattacatcggacgtttgattagatattggaagggttttcggacacgaatgaaaaaactaatttcataaatcatctgaaaaccacaagatgatttattaagtctaattaattcatcattagcacatatgagttactgtagcatttatggctaactcaaaagatttgtctcactattttcatgcaaactgtgtaattagtttttcattttatctatatttaatgctccatgtatttgtcaaaaattcgatgtgacgtttttgggaaaaaaaatttgaaactaatcaaggcctaagtagtactccctccgtcccaaaatataaaggattttggagggatatgatttctagtacgcaggtactttgtccagatttacagtactaggaagtgtcacatccctctaaaaatccttatattatgagagagaggaagtataatttagggtagttgtccatattcgtaattttaggatatattgcatctatactatttatattgggatggagagagtactattgatcagtctaggattgattgctcacgtaactgtctaagagtttgaattgaaatataaaattcaaagtaatggaattacataatgcacaagatactatttagcaatgcgattaaacaccgcgtgaagcaacttcagttattacattcaggatatgatgtagacagggcaactagcatttctttatttctctcatttagtgattatgatttatgtgtgggatactgggattcgtggaaggaaagcagcaacctcccaaatatatagtagagttgcctcgtaacaaaatgatcagagtttgatactggcaccaacaatttatatatatgctacagtaactaaagtgataactgagtcatacggaccctgacgaattaattatacttcatcggtcccaaattataggacgtccttttttaaaaaaaaatatcaaaatcgataattttttaattaataattatattaaccatatagtatatgctaagtactatacacgttatatcactatatttatatttaaagtactttgatatgatgttaattttatatttgttggaagcataacataaaataaattaacagcaaaagtatattatagaagatcatataaaaaatatagtgcttataatttgagatagcacaaagcaaagtcgttagatcatactgtgttcccacgtgcaaggccggataactagacttggtcacgttcttttaagtttttccctagatttttaccgtggattacttgctccacattttcaaaaaaaaaagaagatttgttaaaaaaaaatcgtcttctgctctagagtttaagtcacttgttataagctacttcctccattttatattataagacttttttagcattgtccacattcatatatatgttaatcaatctaaatatatatgtgtgaatagattcattaccatctatatgaatgtgagcaatgctagaaagttttataacctgaaactgaaacagaggtagtatttcaaagttttttcttaaaatattacaattaatcgtgttaatcaggtaaacaatcagccacgataaaaagaagcaactagcaggagacttgggagtctacgagatactcacaggtcaccgccggcatgtgtcaaacaaacagtgcaccagattgcacgccgaggtaagcaaacggcaaggaaatttggcgacggttcagacctggattgcattaagatactcgatgtttagatggcaacacatgggtaactacctgtacgtcgaaggctttacctgacaggcagctctaaaatatacagcacgagctccatggctccacggcagcatctccaagacctgagcccaagtccacggctgatggagatgcatcccattgcttatccagaaaccctgaaagaattcacatatagttaaagatcagaatgcaaacaaatgcagatccaaaaatgatagatagatgtgaagtcatcgttctggatgtcgccgtcgtcatcacgacgacggtgtgggaaatttcacccaaatttcaggaatgggattaaaaaaaatagacaagtttgtttgaaatgctgaatatgatgcacgcacgccgtggctgtttattcacgtttctgaaacgctggatccaaatgggcaagtgaaggcgatggctggcttcaaccacttgccaaatcggaaagcgaggttcatcaaccagtacagcgaagtgactagtagagcaacaattattttgataaagacgctgaacaaaaaaaaatcatttttggaggcatggcactagtgttcatactatctttgtctctaataggggtaggccctttgatggttgattggcagcattgatcatctcatcatggtctcttgtcctgattcctgatcagtttcttgccttcacgggcttagggtgtgtttagttgacgtcaaaattgaaagtttggtcaaaattgaaaagttgtaagtttatgtgtgtaggaaagttttgatgtgatggaaaagttgaaagtttgaagaaaaaatttggaactaaacacgacaggtagttttgaaacttttcctgcaaacaatagtccctttatgagaagaatcgttatgagaaggtgaaaaatacagaactgtaactgattttctgaagcaagaaaataccaaaagatttttactatgcatcaaaatgagaaggaacttgtatatgagtatctgagattgttaggctttctaatctacaatttgtgaattaagtctagctaaatggtccttgcattcataaatgataaaggatgcatttatatgttgtaacaggaatgaggccttttgagtaccttcagcatcaagttggagtaagttaccagcctatgtgcactaggccataagggtagtggccctaagcctaggcccaaatttccatcgcagatttcacatttgcatctgctactcgaaatagaatttttttttccctgaagttgtggactgaaatttcaaggggtgcgaatcacatagcaagatcatcaaagcaaaaaactacatcgcccacgaaattcgaatcaggtcgtctttgccaaatcgtcagtgaaccgtaacacttggaagcacgctagtaagatcaccagtccataacgaattcaccggaagaaacatcatcacctcggattagagaattagaatagaacgaggcgacacgatgtatcgggtatattgtgaaatgaggaagatcatgtaaggttagagcaaggcgacggagatgggaggccacaccttaccgccggagaggacggaggccggagatcccggcggcggcgccccagatgaccgccgtcgtcgtcgacgacagcagcgaccagccgcggtagattggtaggcctcatagtctttcggcccactgatcaaccctatgagaagagacacaagttggccctctggtgcatgtgggcccaaatcacagcggttacgctccgtatcgcgttccggcccaagtcagctcagcaggattcttcctcggtttaatgtcctcgatttggaataagttcactttgactctcttaactactgacagaatcttattcgtcgtgcccttcaaccgcaatatcggatatctcgacccctaattattaaaaccggtacaatttgactcccttgctgcatgtttggttggagggagtttttaggagggattgggagtttagagggatgaggctatagacggccatatggcccgaggcccacggcccggcacgaagcccgcaattttggcccggcccaaccacagcccggcccgactagggtcgtgcccgtgtcggcccggcccgacagccgggccgtgcctgggctgcaccctcggcacggtgggccggcccggcacggcccgatcaaataaaaaaatacagggatgaaaaatagacttatataatcgtataaggcatggcccaagacaataggtatacaaaatagacttattatccagccatttaaacacagcccacagagttgagggaccaaaaatagacttatttccagccatttaaacacagccacagagttgagggaccaaatatagactttttctgtgaggcagcacaatagcccatcataccttcgggccagcccggcacggcccgagtagtattgggccgtgcctgggccgtgtatgccgcccgtgggctggcacggcacagcccggtgcgtcggtcgagccatgccggcccgacaagcctcggcccaggcacggccgggcttgggccgtgccgtgccaggcggcccagatggccatctatagatgaggctattaagtgttttgtttggttgggagacatgggaattttggtgggatggggatggggaattgagcaaggaactccctccttttcaatacctgggtaggggtaggtaattgggagggaattcctcctttactttttctaagcaaatctcagccatccgtttttattaatgacctaatctccaactaaactccctgtcaatttccatcacctctaccaaacaagatattgggattaaaaattaaattcccatcctaatctcatcatcaattccctcgtgtaaactcccaatccccttccctcgagttaccaaacaagccgatgattttggtcttttcgagagcagtttcgctaatgtgacatctacgtgatagtgttgacctgatctgtggcgttgacgtggcgcttagatagcattagaattaaaaacatatatgtgggcgccattcgtcattcacaaaaaaaattatgggaccgttcatgtgtctccccctctctgtccttccttctctctttctcttcctctctggtctctactttgacacgggatctggagcggtagggcgagggcggagcggcggcggcgccgaccaccttggtccccaatcccgactactacggcgcgctactctagcaccgcctgatgggccctgtggtcctcaaggtggcgaccaccgccggtagcggcatcggcgtcggctgcggaagccaccgatttgatcaaatcatcctcacccaccccacacaaagaagtgaggggagatggcgctcgcggtgttaacccgcattgctgcgttgtggaagccgtggttctcgccggcggctcccgttccacgactctcacggcggatggtggtgccgtccccggctcccgcggcgtggatgttgtcggctccgtcctctgctcctgcagttgcggcaccttctccacgtacgatttcctcgccgcgcgctgccgggtccagctaaggccccctcgtcgttgctgtctccctcgctacgctgtcgattttgaaatgtgagggtgatcatggaggatagcggttcgtgatcgatgatagaagagcgatgggtgaaggtgattagtgattcggaggagagtgttcgtgatcgacgcataaactagaagagcgcgctgcgtgggatgggtgagggtgatcacggaggatagcagggttcgtgatcaacgcatagattagtggtgggtgaaggtgattagcgattacggaggagagctttcgtgatcgacgcatagaacatataactagaagagcacgctgtgtggtggatgagggttatcacggaggagagcgggatgcgaaaagcggtgggtgatcaaggagaagagcagcggttagtgcgagcagaagctagacgcggtgaaggaccattatcttccttctgctcctcctcctcctcaatagaagtagaatcggcagtagctgcggccgccatggatgcttcgctgacctccgatattagttactccatccatttcaaattgatctacatatttcataggtacaccaagaccaaaaaaagctaataactctctcatactatatttactctagcaacaaactcgatgcatgcaccatccctactatttcctagccaatagcaaatcaatatattgcatgtgggttataaatacttgtgtgcatggatgcatgtatcaatgctaatttactccaatgcacaaataacgaatagacttaatgaatgaacagaaatatgtagatcatttaggaataatcttaaaaaaactatatgtagatcaatttggaatggagggagtagttcgttagagagagaggatcggagaaagaaggtagtgggtagtcatggactcggcccaatgacagtacacttttgtttttggcccattcaggccgtaggtgttctgtctcgttgataacagctatgtggcgtgtctagaaattggatttgtgtctcttttttttcttttcttttaactattttttcttatgtaaaattttctcaagacgacccagttttagaaaaatatacattagtctctagatttatctttctagacacgaagttaattaacctttgcggcgccatcatcccgtgcaacaccatctccttcctccacctccacttgtaacgccatcgcctcctccccttcctctacctccacgttgatgcgatgagagcgtggctggcaagtagggaatttgcaagcgtcaatgactacgtgtgggcagggaagagatgggaaagaggatgtgtgcatgggagcttgccgagggtgtggcggaagcagcaagacaaacgtcgacgacgccgttgttgtcgggacggagactaccagcggcgtggtgggtgaagtcacagggagtcgaggccgacaggacagggagatcgacgggctaagggccaacctctaggtggccgtgcagacaaaggagaagagcaggaaggcgtcggacgacctcaccgccgcactctccggctacgatactttaggggagaaggtaatgctcatgcgcgtccaggcagtcgaggacgaggcccacgcggcagggcaagagaaatgtcaaaatagagagagaagaagaagtttgtgtcgctgacacgtggggtccaccaatttttaatcttattttaaagctgaaatgccgtgacatgtggctcccacgttaacttagccgccacgtcagctaaaaccgggaacaatattaccttgcgaccaaatgtgatccggttttataagttgagggtcggatcatacctgctatgcaggggcgaattttaaactcgacgacaaattgaccgagtcccatcattctaagcccactaactctcctgaatctcccttgcggacttgcggttcgaacagaccaaagcttgggccctcgacttctagctttcgcagcctgcagtattggtaagccctatgggcttacagcccacgtgtcggcccaactcatggctgctggtgcccgtgggcttcatgctgcatcgagttcaaaagaaagggggaaaaaaaggaaaggaaatcgtaacactgccctaagcacgcctactttcaatgaaatctaatccctccgtcctataatataaggaattttgagtttttgtttgtatcgtttgatcactcgtcttatttaatttttttataaatataaaaaataaaaagttatgcttaaagtactgtatataataaaaaataaataataattttaaaaaaatttaaataagacgagtggtcaaatgttgcaagtaaaaactcaaaatcccttatattatgggacggagggagtagttatctaccaatcaaatcaaatgtattctcatactactatcctcatcctaaataagcctaaaaaatagaaaggaaaacaaaaaacaaaaacgccaagaatccaccaactcgtctctgtgtctctctttctgtacttttctttcttcattcatgccgtgatcgatgatagcagcagagtgcaacctcacctcctcctcgccggctgcggcgcgacgtcgaccctcttccccttgccggaggcggcggcggcggcggcggggggaggaggagggtcgggctgcgactggacggcgcggcggaggacgtcgacgacctcggacatggtggggcgctccttggcgttcttgaggaggcaggactcggcgagcttggcgatgtcgcgggcggccttgacggagtactcgccgcggagcctgggatccatgatcatgcggaagttgcggctgtcgggggcgaactgggcgacccactccagcagcttctgctccccctgcggccggtggcggtccagcgtccgccgccccgtcaggatctcgtacagcaccaccccgaagctccacacgtcgctcttcaccgtcaggtgccccgtctctatgtagtccggcgccgcgtacccgtgcgtcccaaccacctgccacacatcatcatcatcatcatcatacaccatcttgagctcagctatgtatgtatcatatagtaagaacatgaaaaagaaaaattcaaacctctgatcgattggactacgacaagaaaaataaacgaagcaactaagaccgatttatggataagacatgtttttagcgaaccgttcaaaagccaaaatgacatcaaatagggtacatgaaggtaaaaacaaaaaaaaaacaatttaaaactaagcaactacaaatagtttatagataaaacctttatatatgtgtgtgttattagtggtttaaagctaaggctattaagggggtgtttggataccctgactaaactttagtccctggtacatcggatgtttggacactaatttagagtattaaatataaactaattataaaactaattacacggtggaggttaatttgcgagacgaatatattaagcctaattagtccatgatttgataatatagtgctacagtaaatatgtgctaatcatggattaattaggcttaaatagatttgtctcgcgaattagcctctatttgtgtaattagttttataagtagtctatgtttaatactccaaattagtgtccaaatatccgatgtaacagggactaaagtttagtcagtgtatccaaacaacccctaaatagactatgatgaaaagacccaaaatcaactttagaattatgttttagaattcaaattttttgttgtggctaataagccaataagcagacaattatagcattgatccatttcctaaggataataacatagctcaaagctccttcgcaatgcaggaatttcatggaaatcttctaaaattcctatgttccaaaggtctggtatggtatgccatagagcagttctgcgtcaatgctgacacaaggtgcaaaattcagggggagaagagtgatgcatgcgtggcatgtgtgcatatgtaaggaagtggtggcaacttggtccatggcattgacttgctggattgcggtcaagattgtcaggtacacatcaaacaggtgcactggactgcttgcctacttcagtcaacgatgctttaaaggctgtagtatataagttgctttcagtgcctgatggatcagacaatgcagttgcgagaaggctatggttttgtttgtaattctaatagcaggttcagatggagacataccgctgttgagacgtgagtgtttgctcctgttggtccctcccttgctagcccgaagtccgacagctttgctctgaagtctttgtccaacaaaatgttagatgctttgaagtcccggtagattacctatcaaaattgagcaaatcagatgaggatcttcccttttgtacaaaatggaaatgtcgtaaccaaagaagaagaaaagctgaagtaactttgtatactaagcagcagtacgcaattagcactgtaaattatgacgatgacctgaaaaaatgtgataggtttagccttccctaacagcctgtatatcttgatgctcaccagctatagagccttcttgcctaagtccttaattgttttctagattggaatacttggttctacagctaaactagaacatagagaggacaaatcgtatacgttggttgcaactaggagtagttagtactgattatgctttcagaaagtgtcaatgaaatttggtgcctggaatcttacaggaaagtaatggagatggagatggaattgaacaaaccacttttgcctctttttcatctagctcatcaattcgtggtccttattttctcattgactttacactggaatactggattcactgcacctctattgcactacctctagttactatggatgcacggtcaaaagaacctattaaaacgttggtgctgtctctcatcatatatttttattgccaaactttctcccacaaaaaacgaaatcacctatttgataaagatatatcttttcagagaagttgaaagcatgtgggcaatgtatgtctgaagtatacctgaacttgcccttcatgcaggtaagctaatccttctgcagcacccaagattatttgaagccttctattccatgagagaggaggataagctcggacgaataagtgatcttccaggctcttattaggcatatactcatacaccaataatctttgtggccccctttcaccatcaacggcacaatatccaagaagctttacaaggtttgggtgctcaagaaccccaaggaactgtacttccgccaaccactgcttatgtccctgggagcaaaattaaaagaaactgcaaaatattaggaacagaagacaggattactcattagagggatagcataggagatcaaccgcatttgttttagtagcattatagcacaaagcaaatataggaaaccaacagacctaatgctgccttacaagtagtttattcataacatcactataattagcgtgcatcctaaattcctaatatacatcaactggtcaagaaaagacatcataactgagtcagtaaaatatcatctaattcgagtagagaaacttggaaaaatccttatatttttagcagacaccacttagagaaaatgaagcttatgcttgggtattctattaagttcaggacttgaaattaattatttcctgtactccactaaacgatatattcactaccggtttgtcagtctttagacatcacttgcataaattcagaatggatatagagtcgcaaagcacatggaaattgaagtttctagctgacttttgttctatatgttcacgcaccaaaatttttcctcctagtgagtgaataatagtcaaataagactagcaacatggttgtgcaggttgcccagaaacgtaatctattctatccattagtcttctttgattgagcaaattagctaacggaatattgatttagagtgaaaggttggttcgcatcattttctaggagacatatttctactgtaagcattcagagaagacatggtctactattaatattgattgccatttgttttatgatgaccatgaatgaatattcaacttccaagtttgaggaagtaaggttcctagatacttgaaaagttcattgccgttcaaattctatcctgtatttcccctccattttgctttattatgaataaacagttgccacgtgtgcccattggtcctatatttaaccacatctccacgcccagcacctcaactagtaatagtttatgcagaccagtaacttctatagtcaactgacaatggactgaagtaatccaatgcaatagattgaccccataaaatatactatcaaaattgtaaaataacagtaacaggcaatatctcatccttgaaagttctgcattttgatcctgtcttcctgtcaagattgtctacacagagagagatttttaacatactgataatagataaccaaaccaatttcaacatttagcaagccaggaatatttccaatattccggcaaactagaaaatgacttgtgtccatggacttcctatggatcagaacaacatacttgtcagtttatccagagaccaattcaagatcagctaacaccaagcacagaatccattaactttactccccataatgaatcttcccataacagtcgttaatctaatctagtggtcactactgatgattttcatcaaatttggcagaactacacattaaaaacaaaaactcgctaagttgcctgaaagcattcttctgcattctatgccaggatcttggcgaagagaagtatcaagaacaacaaaaatggcatcatttgggatctcccttaaaaaaacacttcccttatctaccagcactaatttctgacaatactgaacataagagagcaaaccttaaactaacaaaactcattccccaattctcctattcccaaattcctattcacccctagttatcaaaccggaaatcaatcgcgcagaatcacaaaggggggaatactactcctggatcggaatggaggattcgttcccgggtgacaactgacaagacatgattgatggtgtccaagaaaagtcaagaggagggggtgcagactgcaaagagagacagagacaggggaacgagaaggaggaggagagcacgcaaacaagcgagtacctggagaccccgctggttcaggcacttgacggcgacggcgaggcgatcggcggccttgccgtcggcgggggaggagcggacgaagcccttgtagacgctgccgaagccgccctcgccgagcttctgggcgcggctgaagccgttggtggcggcctggagctcgtcgtagtcgaagtcccggagctggccgtggccgcgctcctcgtacagcgacgagatgctccggtgcgacgacgtcgaccccgtcgacttgctcgccggcctcaccgccccggagtcgtccgacctgctcgtgctcaccgccgacaccgtcgtcgtcgtcgagccccgcctccccgacgattccttgctcttggacgacctccgcttcttgaaccaacccaagcagctcatttcttgcagcaagcaagcacgcacgcacgcacgcgaaccgtgtgcggtccaaaatccttttgtaggcgaagaagaggaggcagaggcagtgtgaactgtgaaccgcggaaggtagcaatagcaaagggagaatcagaaagctcgccaagatttatttcggcaggcgagagagaggagaggggaagagggcgcgtacgtgcgggggtagtactacgtttgatgaagcggccgcgtcggcccggttggctctgccaactcacccctctcgtttctaaaaaagttttatataaaaattgttttaaaagattatattaatttataaataaataacaaatatatatttttttagaattacacaatacaacgcagacattcacaacgcacgcgcactcacccctatgaacacacgcacgcaaaccctacccctatgagcatcttcgaagactgtgccggcaaattctggaagagactgatgaagtcaccacaggcgcctcgctgtcgacgggtacgtcacttaccactgaatacataattaactatatgttaataaatcactacggtttatataaggccagacccagcccaatacattaaatatagtttccataaactccacgttatcaagaaagtaagtattagacactactttttcatacttcaatttaatgaagtactacttatttcatatgatgtcttggatattgtgaaaaaactatgtcttggatatttcttttttcctctctatttccttgtcatattattttttttattttagatgatagtttatttaatgcttcgtaggagtacattattctggttattgcattgaggctggcctaagtgctgccggtggtggccgttgcacgcgcggtgcgtggtagactggtagttgattgatcagctgatcggttgctgctgctggggcgcaccgggcgcacgcggacgcggtgtggtgtgagctcggcgggcgggatggggacggctctgtttggtgttgggtttttgttgtgtggattgcccgcgtcgtcgtacgggtctcaactacgaatctgaacgcctcgtcggcttcgccaaattcgcatgcctgcgcgtctctctctggctctgcaggtggccgtgttcggttgcatcactgtatagcagtcgcagcccccttttctaatcatggaatttaaatttactttgcatgagttgcgtgcgtgatgaaaacaacagctgtgggatggtgatgcgagtgtgtaatcgagaatattttttagggaaacgaatatgttgttctagcctgtgtttagttccacgttaaaattaaaagtttaaagaaattggaacgatgtaacgaaaaaattagaagttcgtgagtataaaaaagtttaatgtgacgaaaagtttgaagtttgaagaaaaaagttagaatctaaacatggccctacttttttatgaaaaaacataggataaacgtagatgtttataacatgcacacgtaaaatctatttgtatgaataccttcagaagactaggatcaacatattttaaaattcaagaagtcaccacatacatctcactagataagtacgtcaactaccactgaaagactaattagccgtaaaggcgtcgtgttacgtttaagatttgaacttgagtgagttgacttcaccaattcaatcagttgagctacgtttattttgcatgtgtttatagtatttgggtgtacactttttctctctaatatcttcacccgcgtggattgaatcttctcgtcagatatatactgatatggaccacaacaaactttattatcactatgttttacagagtttcataatctatttagctccatccttgtatacatcgaagttgtcggccagcccaaataattttgatgatcaatagccacaagcgcgagaataattgtgacgaaagtcaagagggaacatagattatagtgatatatattattcataggctcgtagcttaattcatgttttgttcgacgatttttgatattgtttacttgcatatatgccatgtgtttgttacgttgggcccaaacaatacgacacatatatagacctagtcgcgacagtgtacatgattcttcaattgtttcttgggtaatgggttccatgcatgttccaatagtccaagttgggtgtttaaaacttggaagaaaatgtgaaagaggtgttaggtgaattcacacttcagtgcccaagacaccttcaatgtcaaatactctaatcaatgctggtcaagtgactcataaaaaaaattgttggtcaagtgaaaataataaaatacagacagtcttagaatagtgtgtttgagaggaagaaaacatataatatcccactatatacataggatttcaataaaatatcactcaatggaatgcatcgtataaaataccactcaatacgttgcctaccagatgaaatattactttgaggagttttaaccatttttatactcgaaatgcccttggctgtggctatgaagagagagagagagggagagggtgagtcaggggaggaccgggtgcatggcgccggagacctcgctgagaggcggtggcagcggaaggaggacaagacggcggtggggataaggaggcgacaacaaggatgagacaccactatggaggtggagatagacccgtcgtcccggtcacttctactcgctgcccccctcccaaaaaaaaaagcaaaaatgcaaatggtgtgtttttcataaaaaaaaatacatatgattttttaaaaaaagaatttaaatattgatcacaaaatcattcacctaggccgagtttagttccaaaatttttctttaaacttctaacttttccatcacatcaaaactttcctacacggctacacacataaacttccaactcttccgtcacatcgttccaatttcaaccaaactttcaatttttacgtgaactaaacacacccctattcagctataaaaacaaatagaacaatccatttgtgtactataatagtacaccactggaacaagaaagagggctattattgacccagttgtagagggatcacattgctcagctctaaaccatactattccaaagaacttctgcaagacacccactttgaaaaaaaaaaacacctaaacaaacaaattgccccttggaaggacaggactagttagtgctgtgtgttgacctgtgtaaacaaaatcagattttgtgtaccggctttctagtgaactgcgtacaaacggtgcagatgagaggagacaacagcagcatcatgaagagcactggaggagaagaggacggcgacgcctctgatgaagagaacccgtcgtcgtttctcctccccggtcaaacacacgggctgcaagtctggaatgatggagaaccaaacaacccgctcaatccaacgctcacgtgtgcgtctgttaggctgtgggccccggctgtcaggctgtggggccccggtcaacgtcttgaccgggacgcgactgtcgcgcagtgacgtgctgcttgatgaacaacaacacctggtctcttcacggttagcccaagtgtgaacttaaaagtacagccaatcagccatggttagactttggaacacgcaaaattaacttggtttctgcgaaaattgaattgtcatatggtctctccgtaatttttttatatatagatctttttagatggaggaaatactcacatggtttattccctccgtattagaaagttgtttttttctctagaacggaacgaaatgagtattcgggaatcatgtaaaattttgtgttctgaataatggattaggtcgtgtttagttccaaagtttttttttcaaacttccaactttttcattacatcaaaatttttctacacacacaaactttcaacttttccgtcacatcgttctaattttaaccaaacttctaattttggtgtaaactaaacacagccttaacctcgctgttcagagttgggacatttgaaagacaatactgtataattcatatgtcagggagctaactaaaagttcagaagaaagagcgagtctcaaacattcctctaccagtgtcaaagcgtacggagctatgccagcttgtcagctgcgagctcaccatctcgccatagtcgcgtgccaaaaaaaaaaaaaacaaaagtgattgatcacaagaatcgcattgctgccgggtacaccacgctgagatcataaatttacaatctaattaagaataattaatggtatactacacattgtcaggtcagcccggtgagcttcagaattcgacgatccatcattcatcgcatcgtcatcagggcttaggttgacgacgccccggtcaattcatccactccagccgttgtcatcatcatcatcatctcctcgtcttgctaaccgtcgcgtcctcatcttcttcttcctcctccggattaatcttctgtcgcttctgcaattggtcagcctgtcagcaatgcagatcaagaagttaattagcgaatgtaactattactaagcagtgaactgtgaagcaattcaatccatgagatgcaagtcgtatgaacacatctgaatgcatagaatgtgtccggacagccgtgtcaatcgattgatctagacgaacttggctggaaacagttttgctgttgcagctgacgcgaaggacgttgactccccttactggaatcgcatgctcatctgtgtactactagtactgaggaggattcaggaaaaggtagtagaaagaaagaaaaaagagtcaggactcgagactagttcagttcaatttttccgtaccctttttctgaaacaaatctgccttttgattttgaatgactaataacatgtaggtacgtacttcatatctaacggatttaatatataacagtgatccaggttagaaaacagtactgcagagagaactcatcacctaaaacactgcacggctgcacctaccttcggtcttttcttgtaccaatggttttgaatattttgatcttttcaaccactcaatgtcatgcaggttaattggcgatttaatcgccttttctgcaattcttaaatgcgacaaaagaaaccatcgtcttggccagagaattcagagtttactagttcaaacatggtatttctctttcactgtctagtgcatagtagtatttacaagtagtatccagctagctttttactttcttcatttctttacgtgatcggttaactgtcagctagagaattttggatggtccgaagatttctaccggtatctgtcagtgtccatttttgcagagctgtactactgagccttcattcaggtattgatcgttttcgttgacggatcggatcaacttccaggacaagcacggccattgccattgcatcgatcactatcgaacaaggaccatctatcaaatccggtttccgcgttgcacagatccagagctgttcctctcgtcggtttaagaatcaactccgacgcgcatttactattcctatacttaattaaggttgttgcagtcatgtctcagctacgtgaagaccgggcgtgtcgatcatggcgtcaatggtgaccaactgatgatcaacagtgacagaaaatgcaaatctattttctccattttgaaatataagtatttttatattattcaaaatttatactacaatataagtgtttctggaatactggttctaaggcactgaatacatattatgatagggaatataaacaatttaaaatttaaccaccatagtgagtttttttttacaaaaaaagcctactgtggtgactaaaaaaatctttttactctaacctttagtatttacttaaataactttaaaatacttatgttttgaattaaccaatgtcatatactaatctaactataatatttattaaagtaaaatttactctattttaaactaaccaatgtcatatatcacagatggtaagcatatatggtgtgaagtgaaaatatatgcttatttctagtctattataaaactttggctaataaagatgatcaaagtaaaatttaccctattttaaactaaccaacgtcatatatcaaaggcggaggtagtactattgtactactgcaaggtgttcttttcttctgaagatgaagatgaagattaagttttttacgcaaaacgaggtagtattaacgtatgattgattgagttttaattattataaacttgaaaaatatattaatatggtattttagagcaactttcatatagaaaattttcgcacgaaacgcaccatttagcagtttgaaacgcatcatattgttgttggagaaaagaacgggaccaagtcaagttcagctagcgagcgatgtggaaatcggtagctgcaagcgaacgcgaaagttcagagaatgtgtcgcgcgcggcgtcagtgtcactgtacctggccggcgcggccgccgccgccgctgcttctcgccgcctgcagctgcgacgagacgcggccggcgacttcggcgaagcaggcccgccccaaggacacggcggcctggaggtgcgacgccgtcgcgtccttggcgctggcgcgtagctgcagcaggccgcggtcgatgtcggcctcgtgcctcgccagcaccggctgcaggtagctctcgtagacgtgcttcgcgccctgaaaacgaacagacatggaatgggtctctgaatgttgagaacgatgtctccttgagcgtttctgaatgttcggacttcagcttcagtttgaattcagatttaattttctttttgcagtacttttatggtaggtctctactgttagtattcgatcttggggtgtgtttagttcacgccaaaattagaagtttggttaaaattgaaacgatgtgacggaaaagttggaagtttatatgtgtaggaaagttttaatgtgatagatcgaaaagttggaagtttgaagaaaaattttggaactaaactcggccctactgtgaaaataatctcaaccattaattcctgggttctactattagtagaaaaaagagcactgctacagtgtactgaaaaaaaaccatacaaacataattctcaaccgtttgaatttttttactagatgagcacacgttaattctagagttctatatgatcagatttgtaaaactgtgagtgtttataagaaaaaaaagtgattgtatagcctttttcccagaaaaaattatgcaactacaagtagttgaagtgctagtgaaataccttaatttttgcggttgtcgagtgagtgtactacaagaaactaaatctgataattgattatcggagcagacaattattcacgaatggattagtaacattacaaaacctagaccattgcatcaaagcaaatatagcacatttgagttaatcaggtgagtgcttactcgtgtctttgggtaccagaggtagagcacgagcgcaagctttgcctcgccgtacatgggcagccatgagaccgtgaaataggtgatcgtctccaacgtcgtcagaaacgcgaggagaatcctgaacagcacaagcaattgttcagattcttcagaattcaggcaggatgcagcatgattttgcaggtttgtttgtgtagggtaatgcttcatcaccagtactgacaccagaaacgcaactgatcgatctgcggtttgttcagttccagcgtcttgtagcagtcatacgccgggtaggcgtatcctaaaaccagcctgcgttgcagaaagatgcaaagaggacatgaattgggcttttctgatctcttccacgaactgttcaaacggactgaatattttttcgagattactcacgtcagaagtctagtgataagtaacaccgccatcttcagtcgtcagaacaaaagaagaacacaacaatctgcaaagggacttttcagagatttatcaagcccgtgattaaagaagcaaaattaaacaatgcaatgcaggattcagatttgcaattgcaaaaacaaacgaacttctgaagatactgggaacgtcgtcagaatttaatagggccaaacaatcataaagatcgacgagaaggaaaccaaccaacaatgaagttaatacggatcgcattgcgcaatggaaaattacctccgagaatttttcaccctgcaatcaaatggcttggatagatttgttgcgagggatgaactgaaaccgagaagagcgcgcggttaaaatatgcagggatgcggttaacattggatgggatacggaagatagcccaaccgacgcctcttttcgcgccagaaaaacggttagaggaagcggcaaaatagatgggccaacaattcatggctgaagccacgtttactgaagattgttaactgaccatggttagtggtgatgccctgccatttcacttctggactcctacccaaaataagctgcaaattgtttgtcagatcccaaaataagctgtatattgtttttttaactactcccaaaaatataagacttactttgacggtccaaaaatgagctttgactgtaaatttctgtaacactacttttacttgcagtaacaaaatcatagccataagaaagtagtctcggtctctcggacatgaatccaatattaccattttgtatgccaaaataaatatctttggattattcgcttgtcaaagcttaaaattggacagtcaaaatatatcttatatttctgaatagaggagtagcatttttagtttccagcaaaaacaatttccaggtagtacagagggaaaggcagagtagggcatagtttctggggatccaagaatgtaaatttccaagaggtcctagggtcccaaatgccaattagttatgacatttcgaccaaccatgtggtcactaacgatggccattattataccagcctccctgatccagtgtgtataattgttttgactttattattttctttaaaatttcttggttctttgggacacattcacagaagccaaaggcaaagcatgtcttctcgttacgcttcgttgtgggccatgttgctttatcacctgtaaccctataaaaccacacgccaacaatcatggattaataggccatgatgaaccatactgaaaagatgtccaatttatgtatgaacatactgaacaaactggattaatacttccctctccccatgtgatctcacatgttcagtgcaatgttcatcttgggagggattttacagatcatcaatacaagctaccagagatcattttagaatcaacaaatggaatccgtcctacaaatacaacactcgtagtatcagatagtacaccagcaaaccggatgcaactacgcagcagtatttgtataaacaatagcactatggcacaagaactactactgctaaccacccatcacccaaaagatgaacaacgaagaacaccgtgaaggcgtttcgctgatggcacattgcctttggtcacgccaaaaatctctcattgtacatggctacatgtatatcctcccggttggtcaaagccattgcccaaactctgagagagctctaggtgaacgactgcgccacagaggaagttgtgaccagaccagaaagaagaccaacgagggtgccgctgttgtaagtgcttgactctgtctgaacagcattgtcccgagagtcgacgaaagtgtcattctggaacggcccgcccacgagggctcccatggcgacgtttgggtttgggctcgtagaatgaagatactggaatcctttgcagcctgtctttgcatcagcggggatcgacgcccctctgtggtgtacctgctgtgggtagctgctcccatatccaaccaggtagctaagcttcattgggttgtctcccaagatgtaattagcctgacatgcaacagaatatatgttagaaacttactgcacaacaccttcctggtcagatgctaccaacacagcagagcagaaatagtgtgtaggtcatgagtcatgacaaccaaagttatcatagaatgtagttaagccacaaaggcaagcagtgtgtcacaatgtgccgatggctcgtgacaaaaaaaggtaggcatgtaaatacaaggaatgttttatggtgtttcttgttgaacttcaacatggcaaactggaatttcagtatcttgcaaggttttctgtagttcacctgtgatatagcaaaattgcgtatatctgtaggactgtagtactttccactgcattgcactgctgctgtttgcgatgtgagcatgtagtcactgtaaacaacagcaaggaatgctgcatttgtggcatgctggagagaattccatccacttatccacaccaatccccctgcacaaaaatcaccatcatataattaaatcacaggcaaacaaaatacagtttgcacatattctgtctaaccccagaaaatactatttaatgtaaaaaaaaagtgaacaacaaaagcctatgcataaattctccatgtattgacccataatataagatcaaacagtggaagaatttcaacataccaccagtcctactggcagtagctgatggagaatctggtaggagcccacaaatgacggcttcagcagtgtctctgtacattttgagtcccatgttttcagcattagatgtctgtttggatccaaagaaatttaatcttgacaagagcacctgcacataatagacaaaatgcattgaaagttatattctttggctgaagagtgaactaacgttattaaaggaagataaaaggcgtagcttcattcctagttcccgaataacaaagttgcttcttaaatgttcatgcaaaattgcaaacctgtgtccctgcaagtttgtcatcccaactgaaccatgttggccttccccaatcagcaaaagcttttccattctctacagtcacataactgaggtatgtttggtctcctgtagcatgatagagccaactcgctgcccacaggagttcgtcttgataaccagtagaattatagtagttttggagctttggataggtgtcactggcgaggcctttataagtatcagcaaaagtaaacaacttctgagcatgttgaagaagtgaatcagaatatgtagtgtctctggatttgaaaacaattgatgctgatgccatagctgctgctgcctcagcagcaacatctgatccaggagactttgtgttaatctgtgtgagtggtcttttctcagacatagtctccggcctttcccagcagttgtgatctagatcaggatcaccaacctacaaggtaacagttatacacgttagttgattaatatcaagacgttcaacaaggtgaggttgctgcatctattgtactgatctgttcaaagaaatatataatgtgttctttgttagatggacttaaggcaattaacatgaacaataaactagcttataagttatatctgatttcatcatcttatgtacattgtattctattcatcaggtattgaatgtgctgtacaacctacccaagtaagcatgactaaacatgtcaacgcaagcattgagtgataaaacttccacacatacagaaattcaactcataaaaacatctggcatcccctaatcttcaactttcaaaaacacccatccccctaccatcaagggctaactctacatattaagagatgtgttgaactttactcaattaagtatgggactaccatccaaatttcaaagggaaaaaaaaggactaccttggaacattgtgggtatatcatacggagaagtctatactgatagtgtgaaaagaatgcaactataaagacaaactggaaagggcatggacattgaacttgcaacaaatgtgttgatttaaaccgatttaaacgtatcaagccgaaaacgaagtacctcctaactattaggtgtccagatcacgacatctgacctggcttgcttcttaccaaccaaactttccctctactgaaagtctgaaatgccgccaggccgcaataaaccacaactaaagcaagcatagatcactcaaaatttttacatagtataaagaattatgctacagctctaacctgaatgtagaacacattgtcagatggatgcgcattgacgaggaaatcagtgatccatcggagagcatcaagcgcagggtccagctgcttcgtggcgctcatctgatctccatactcaagtatggaccacgagagcaccgttgccgtgaaggccatcgggaaactaaacttgatatgatcaccagcatcatacattcccttggaaagatccagccccgctggtttcccatcatccagcgccgagtcccccctccacgggatctggttgttctccagcttccccgctgcacaataccaacagaaattaccaacaatttagcaaataagtacttctttagagctactgaagctgaaaagggttagagattgtgctcattcagcctccaaaacactgcatcggtggctggaacaaccaaaactccaatatccatagctaaataagctaaattcacagtttggttaacagatttaagtgaaatctgcgagcacacatttgccaacgacatagtaatcaccacagaaaggaactgctcttgcagaagagcgtaaaattcacactaaaaaaaagtcaaaactataaggtcacggccactgaaatcggtgagaaatctaccgactcgtcaactttcctactgagtaacgattggtgaaattcttcaccacccagaagcagaaaccatcagatcacccgaaacaaccgtatcaacctctccaactaccaccccaaatgcggagatactaaacgaacacacacacacacacacacaagagcttccaagctgggcgccaagaaagaaaagggcattcgccgcgaaatccgccgaattgcggaagaagcattgcggtggcgaggtggtgagcagcagcgaaccagtgcgtgcggcgggggcaagaagaagaagtggagcgagtggtggtggtggtggcggtggcaactcacccttctggacctggaagaactggagcgccaccccgagcgcgtcgccgtacttggagtcgatggccccgggcgggccgggcaccggcagcggcttgagcttgcgcccgctccccccgccgaccttcttcttcatgatggccaccaccgccgccgtcgccaccagcgacgccaccagcgccacgatcagccacccgcagcaccccttcgtcttggaccccatcgcattcgcctcctgcaacccaccggagacgacgacgcctccgcggcgctgctcggctcggcgtctcgctcgctcgccgcctcctcttctactgcaggggatgggctcgcgtgggctttcggctgggttggtggtggtggcgctcgtcgcgtactcgcgtgtggtgcggccgcgggggggttggtgcacggtcggggtaggggtgaggtggaagtctgggagtcgctgtcgggtggggccgaggcgtggtgggccacggatggcagtgagaggggaggactcagcgcgtgggggtgtgtgggtgaggtgaggagtcgagagcaccgacaggacaggagatggacgggccgacgcgcgctggatggatggacggatcgtttgtgagggtgtgtgtccgacctgtatttaggtgtgctgcaccttaacgtacgtacacgagtggttgtgcaccttactgggatagggtatatttccgtatattttgttttgctagtgtctactggcaagagatcatctaaacatttcacgtcaaattggcaattctgtggaaggtgagattatatttttcggtacgacaactagctggcatttcatgacagaatgttcgtgcaattctatggttgtgtttagttcagcgcaaagtttagattttgattgaaattagagatgatgtgactgaaaagttttgtgtgtatgacaggttaatgtgatggaaaagaactgaggtttgaattcaaacttttgatctaaacacagcctatgttcattttgtggcaatggattggcaatgaattatgggcatgatcccgatccctaaactcttaaacggtacaatattataataaaagcttctatatgtgaatttcttatataagtattttatttttttcctattttacaaatacttaattcgtcatttgtatactcgtataattatcatttcatgccctagtcgccaagagtatgaggagtcgaagaatttaactctttatttgacaaattttgtttaatgtaatatctagagtacacacgtctgatagttgtgacgacgttgcttaatggcgtgaccactgagtacgataaattggtacacctggtggtgtaatcatacacgcatgggccgtccaacccaaatattgcatgctaagcaatgaactggcgataatgattgattaaaacgcagctggtgactacccaaaggaatttctggagttagaattatttgcgcaattggtgtggataacgatgtgcatgcgatttttgggtaagaccagagacgatcccaaagaatttggggatctccaggtgtcccgcagtcggaatcttttgatgacggagagctcggcccctttttaaagcgttgatataaagcatcatataacgttttactcaagcggatgccaaagataatactactaatattaagcaaaggctagtggtaactaaagtattaacaatgtcataagcactggagaaagcattattcaccatttggcgttcatgctgcatagagaagaaaaacaaattgctaaaaaacaccaaggcaagaagggcaggaatctcaatccaagcacaccttagcgtaagcatcatattgacggtcatctcgaccagaatactggtgatgagttagttagtgagtagtgacagcagttgagcacagctcacaccaggagctttgcaaaccatgattagtccatggcccatttgcctttgtaacaaatctggggactttgctcattatcttggcacggttctgaaactgataatagataatctggatccatacacaattatagtacatgcaaccaccgtatctgcttcttgttggcactgacgctggcgacaagaccatgagcaccgtcttatgatgcaatattgccgtgcccatttcccctgcacagtgcaaaacaatcattgcaatagcaatacaacttgaacagaaacagactgggatgtagtattcgttgttcttgatgacgcagataaaagggatcaataggacagtgataactgaccttgtggctgttgcacgcagagtgatgctagataaagaagaccaaaccaacaatgttgataaatgcattccgtattaacaagaaggatagcatgtcaagcttggatccagggcattatgattaatccgtacacatttatgcatcagttgctcaaatgctcagccacaatctgcaaccagaaaaccataacccagctaagaactactagtacatgaataacaatgtgagaaaataatccaaatattaacagtcggcattcaattgagaagtaggaaaataggaatattagcatgtgacatcgtatggttgatctgtagtaaaacagttcatccgatggtcaggtcgaaaggaagggtgttttagcatattactatacaaagtgtaattaaactaaaatgcatgatgtaaaatagaagctgaaagggtcagaactgcataagcacccccgataaaagcatcacctagaaatgatatcctattactggaccaattgatctgcaaaaaaataacttttacatatccacagttgtttgatctccaaaatcctgcaataaaaaacatttcagtttagatacagtacaacagagagatagatgagcacaaatatagggatatccaatcgaatggcttattttcattgagtgtgtatattataaccttctggagtcatcaacatcagagtaatagtgtgcaatgcagtaaaataacagctgcaatgtaaataaaagaaaatgttgcgccaacacattttttagggctctgcacaatgcgttaaaatgtctgtaaggtaaacaaaaaacaatgctgcattggtgccacagaaatttattaacggatgcaatgggatccacccccttctttttctcccatcctagagtcaggatatcacaacaaccaggatgtgcagaagtacatcttatctccctcgatacacggatattaagaaagtaggtctttatgtactcttcgttttcaacagaaagaaacatataaggtcttgtgtgaaaatttagtctaaccatacaatgatctcagcatgaatgaatggacacatttgattagttaacagcgtacctgat

SEQ ID NO: 7046 - DNA, 11113 bp, Oryza sativa
attttggttgaaattagagatgatgtgactgaaaagttgtgtgtgtatgataggttgatgtgatggaaaaggaccgaagtttggatccaaactttggatctaaacacagccgtataatcatatagactcacaaagtcaacaaatacagccactggaagttccaccaacagctgcaattacccgtcaacaaacctttaaaaaagattatcaccagtcactccactaccaccacagagcttcaccatgtcaacttcacgagttgatttcaacatcaccaaaagaaaaaaaaacaagtcggaataaaatcagttgtggaaaatcaagggcatgcgggagccaaaaatgataaggaatacctttcgaagaaatagaacatggcaaaagtttcattggcactgctcagagcctcagacatcatgacaagcacagcatcaattcacaccgataaaacaagtgaccatttctaaagcacagccttctcattcacctccatctcatctccattacactgcatggacttcaccaaccttcttatcacggtgctcctcctactcgctcctctgaaatacaaatctgatgttgccacagcaagtgatgatgaagacttcttcaagacttgttcatcacatcggtgcagcaagcatggaccagagatcaggtacccgttccggctttcgacacaacctccatcatgcggcgcacctgggatgcaattatcatgctctggacaagacaccatcctggatcaccctgttcttggttcctgcaaagtgacaatgatatattacaggcatgttatcatgaacgccatcccacttgtagattcctcacctcattgcctacttcacaagtttatatcagtaaatcaatcaactgctgtgtacagacctcacactttaaaagctgcaagtctagtaggttgttcaagagattccatagacacaaaccaatataatagtatagttggcccaacctcttgcctcagcctcgctaacaacgcaagccagttctggtatttggcatatccctatgaatatatgtctattcttccattgggctgcacaattgtttccaaagacatcccaatgccctacagttacgacaaaaatggtccaaactttgacatctcaatcttcaccgaaacagcaaaaagagtcatcagcactggtgagactgtattcacttggtactcaagtaacgttactagtatttgccaacaatgtgaacatgaaggtcggcgttgtggctttagctctcaaagggatcaagcattctgccagcatcatagtatgtctctttctcaagtataaattcagtttcactatgatgacttgttttagtttggaattctcacttctccatctattacatctcttatttctcgagtattcagttttcaaactacccaggatatttttcacaaatagtcaaactatccagcaaactgtgaatcagccaaaggctagcttggacgaacattttggttctaggttcacaactgcaatttttctcaaagaaaatttcatcaagagacgataatgtctgatcattatgaaaatcaatttttttttgtaaaattctcatagaaaaggttataagcaattgcagcacattttagcatatagcaatgatctaaagagcaagctttatttgtattactctagacattggtattaacttagaacattaaattagattcatatggttcaaatttactagtttggaatactgtaatagctaattgaacattaaagttagatgcaaatggcaccaatttactagtttggattactgtgggaggtactacggcgagagtagtatctcaattagaccttttgatgctagagatgcacttgatagtgcagtggcaaggggtgtatggttttaaccccgaggtcccgtgttcaatccctaacacgttcacaatttcttcttaaaaaagtttggagggacgtctctccctccaaatctccttttttttagaccttttggtgctaacaccatagtcctgattgttagaaagttgcacccatcgagtaatcaagaatgtaccagcataatttacagcattaacaagttcccacagttttaacagggtagaaaccagaacatatccatcttacacaacgttgatacgaaagttgtgcacatgcatatttccagcgatgctctgtaagattattgaattaggtagtttcttcctcctaggcactatagataaaaatgttttacttctatggttaagacaagaagcctccttatcctatttctatatgacaatgccaaataaacaagccatctaacaatcaggaattaattgtttctaggaaaaattataggtgtttctctcgatttatttcatccataaatcatgtcataactaataacctttcttcctatgtccaggtccgcgtgtcacaatcattgcaggtaagcaactaattttttttcttcattcttcctgaactgctcattctgtagaatcattgccttttctccaagtgcaactagctgaatttctctctttttttactcagtaacatcatctgtaggcacatttatagttctttcattaattgtggccactgcactctacatctccttgaagtcaaggtacaatgaagagatacatttgaaagtcgaaatgtttctgaagacatatggcacatcaaaacccacaaggtacacattctccgaagttaagaagatagcaaggcggttcaaggacaaattgggccatggtgcatttggaactgtatataaaggtgagctactgaatggagttcctgtggctgttaagatgctagaaaactctgtaggagagggacaagagttcatcaatgaagtcgcaaccattgggcgaattcaccatgcaaacattgtccgcctcctaggcttttgctctgaaggaacacggcaggctttaatatatgaattcatgcccaatgaatcattggagaaatatatattcccacatggttctaatatttcaagagaacttctagtaccagacaaaatgctagatattgcattaggcatcgcccgaggaatggagtacctgcaccaagggtgcaatcagcgcattctccattttgacatcaagcctcacaacatactgttggactacagcttcaatccaaagatttcagactttgggcttgccaagctatgtgcaagagatcaaagcattgtcacattgactgcagcaagaggcacaatgggctatattgcaccagaactatattctcggaattttggagcaatttcatataagtcggatgtctacagctttggcatgctggtgttagaaatggtgagtgggaggaggaacacagaaccaaccgttgagaaccaaaatgagttctactttcctgagtggatatatgagagagttatgaatgggcaggacctggtgcttaccatggagacaacacaaggcgagaaagaaatggtgagacagctagctattgtagcgttatggtgcattcagtggaacccaaaaaaccggccctcaatgacaaaggtggtaaacatgttgacggggaggttgcagaatctgcaggtgccccctaagccctttacatcgtctcaaaatcaacttgtgatttagatcatgagaccgcatcgccatggtttggactttggagaccagcaaagcaatggagcttggccagcatttcctataaaaaggcatcaccatggtttggtgcctgagtgagagatatgcttaatccacatatcagaaaatagttcttagtgagctgaagcatgcacatatagtgtttgattattaaactaaactgggcaaccagatatatgatatatcaccatgtactcttgtaatttgcaacatatctcaatggatttaatttgcaatataataatagttggaagatgacaactaaattaccttattccatcgttgatgctagtccactaatcatccttgctgaacaccaacaataaggtcatatttactcccagtgctgcattttcttttcaagataaaaaaagaagtgctgcatcatccagaagaggaaaaaaaataaaaataacaaaggaaggaagctaagcaaagggattattaccaaggcagcgaggctctggatggacatggactaataatgtgggagacggaggtggtgtgagcgacttgagaagacgaaacatgtggcatcaggcttggtggattcgaccggatctttgccggccgtcagcgccaccattgaagacacggtagcaacaacagatggcgccatggcggtacgggcgacggcgaggcttggtcacgcactctcgcatatgccgggaggaaacggcagcttacccatctgtctacggaggcgagaagcggcggcggaggcggctcgcggaacggcataccgccgcattaaccggagctctcgccgggaatagtggtgagggacggaggaagaagaaggggatttttttttttttgttggagagagggagaaggggatgattgctcggccacaggccggttaggatggcccacctaatcccccgcggcccatgaacggtggattgatctgacggttcacatgtagcccaattcacgagcaaatataatgcggaataagttcaccagaggtccctcaacttaacagcgtgatttttttgaggtcccttaaccacaaaaccagaaatgtctacccctaaacttactcaaaccgttcaccagaggtccctcggcggtatttttgcccggttttgctgacgtggcatcctagtcagcaaaaaaatttaaaaaaagtacgtagagcccacatgtcagctgcacatctttttttcttctcttttcttctccttctcttctcttttcttctctcccctctcttctccttcaggctggcggcggacgcagctgcgatggccgtgctcggccgccaccaccgccgtacccccgcgggtggccgacgatgctaggagaggcaccaccggcgggagaaggggaagaggcagaggaagagattgtttcttggtcgccggccgcctccccctccctcccaaactcgctggccgccgcgctcgctcgccgctgctctgccgcgcgctcgcgctccgctactctgtccgcggcctgctcgcgctccactgctcgacccgccgctgcgctcgcaccttccgctgctccgttgccacgctcgccctcgttgcgccgcccgcatccgtgctcgccgctccgccgccgcgctccgctgcctccgctcagccgccggacgaccgcaccgcgtagcctcgcccatggcgacgacgacggtagagagccgatgacgacggcggccacggcgcgcggctcctccgtccgcagcctgaaggagaagagaagagagagaaaagaaaagaaaagagaagaggagagaagaagaaaaaaagatgtgcagctgacatgtgggccccacgtgttttttaaaattttttttgctgactaagatgccacgtcagcaaaaccgggcaaaaatattgccaagggacctccggtgaacggtttgagtgagtttaggggtacacatttctggttttgtggttaagggacctcaaaaaatctcgctgttaagttgagggaactccggtgaacttattccaatataatgctccaacttatattcactggagccagcagccagtactccctccgtttcatattagagatttgcttcagtccagcaaaaaaaaccttgagataccggtgtctcgcagtactaaatcgtttttatcttagatatagttggcaggatgggcattgttacctcctttcacttttttccgaattttttttgaaaataatattattttaatggaaaatcgcaaaattataggtcggctagacgaaatcgcaagtttagcgccctgtcgaactggggcagttcgataggtacccctgtcgaactggggcagttcgacagggtactgtcgaactggggcagttcgacagggtactgtcgaactggggcagttcgacagggtactgtcgaactggggcatgctagttgtccaagaaaaaaaataaaaaagtacttgctacagtgcccgatagggacgtatcgaacagggggagttcgatagggcgcgtggcatggacgtatcgaacagcggaagttcgataggcagtgtcgctacagtgccgctacagtgtgcgctacagtgtgctacagtgtttttccttttttttaagttattttattacctgtcgaactggggcagttcgacaggtaccctttcgaactggggcagttcgacaggtaccctttcgaactggggcagttcgacaggtaccctttcgaactgcctccgttcgacagggtgctaaacttgcgatttcgtctaactgacctataattttgcgattttccattaaaataatattatttccaaaaaaaactccttttttcctagtcaagtttgactaagattataaaaacaattaggaacatctaaaataccaaactagtttcataaaatttaacattgaatatattttgataatatgtttgttttgtgttgaaaatagtactccctccgtcccaaaatataagcatttttagcatagtgtcaagtcaaacatttttaactttaactattaataggaaaaaataaaaaaaaagatctatcaagtaaaattgatgttactagatttattattaaacaaactatcgtaatatgcaactctttttatttaaaacattttacttttatagatattgttggtcaaaatagtatctcgaagaccgtgtcgaaatccaaaaatgcttatattttgggacggagggagtaatatatttttctataaacttggtcaaacttgattaagaaaaaaaaatcaaacgacttataatataaaacgaagggagtacaaaacacttgcttatttatagtagtatttcatacaaaaaaaataaatttatgcattagtatctatcaattgttggatccatgaatatggaataataacaaccattatttatgaacgctaattgctagctagatacatcattttcatcacagcctaactactggctaattcagctattccatcgtcctcttctgaaattgcagaaagatcggaggagtgaaagtaagaatccatgacttgtggaggtggcatgccatccccatcgcagaaaaatggtctcagaggcacttgcagcgcatccacacccccttcgagcatctctattgcctcactcatcgtcggccgatcgtgtgatttcatctgaatgcaccacagcccaacaaggcacaacttcctctctagctcatgcatgttggcaaagttggatatctcatcaacttgttgatctgctattagcttatcataaacccatgatgggtagtatgccttacttgcactggaatctgcatttggatctgcattccttcgtcctccgaccatctcaagcagcaacattccaaaactgtaaacatcagacttgccagatatgatgccaaagctccgggaaaccatctcaggagccatataacccactgttcctcgtaaagccctatctgacacaaagctcttgtcccttgggtacagtttagcgaggccgaaatcagcaacttttggaacaaagttatcatcaagaaggatgttgtgtggcttgatgtcaaagtgtagaatctgcatatcacacccttggtgcaggtagttgatccccctagcaatgcctagagcaatctcattgagcttgtcccatgagaatcttctctcagatgagaagatgtgtttgtctagagatcccctaggcatgtactcgtaaaccaaggcccttctcatttcctcggagcagaaccccaccaaacgcacaacattaacatggtgaatcctaccaatggtggcaacttcactgatgaattcttcgccgttgcaattagagtagccattcagtatcttgatagccacatggagatcacccgggagcagcacacccttgtatacagaaccgtagcctccttggcccaacttttctctgaaatgccctgtgattgcgataatgtcggtgtaggcataccttgtcggaccgagcatttgttgcattcggagaaatttctcgactgcatcaattgttatcattcttttcaagtacttttgtgcaaggaaaatcaatacaaccaagggtgccaacagatacctgcatggtgctgcgtacacaagttcgatcggttggaatcaagaaattgtaacatgcgtatataactagatgaaacactagaaacaattgagatgatgtgggtttataagaaaagatagaaataacattaactattaatgggataaattatatagggtagggacgtagggtcctggtcgatgacttacgtacgtgcaagcatcgtccagaacatcaaggcatacaatattatgcccaagagtatattgtatggcgatggaattttagcagttgcgcaatccatgaaattttcagtcaccgaaagactaaaccaatctgaaagtttgcctataccagtcgatttgctgcatgcaagaacaaagacggatagattcaggcatatataaatggaggggaggtcggaggaatgtgcaatcagatattatgtcaagatcaggaactcacggaatcgactccattaggcaatccttgaagcttcgatttctatggtgtctgaaaggaaattggacgcggaatcctttcctcatgaattttactacgtcttcataacttaagctatcaactgctggtgctacacgacccataccatccaaaggagtcatggctaggtaaccacaggaaggctcgaggttttcaatgtaacaggacaatctgccagtcaagacataaacgaaggagctgctggtgcccatgcaagcaacaggactgtacataacattgttgtttatttccttggaacagttgacaaagaaagaccaccaacgtgaagcagggtccaattcgacttggatgttgtatggcgatgattcttcgtcgtcactactaacatcatcatagtaataaggaatgcgtttccagcgaggaagagggcaattgttacgtgaatccgagatgttggcgtcgacaacccagaaggtggaatcactgtagtcgatgcctgtcacaaagtatgttccgttgtcgatctgaattgtagccttgtcatcggtgcaagtcagctcatacgatgcaacaccgcactcgtagcctcgccggtggaaaggagacgcgactttgctaagatggccgcaggtgaacggagggcatgcaggtattccatgaattaaaggccattctatatccggatctgggacgacaaatcgaagcacacacaggacagagaaaacttgcagggcagtcgagcgacggaagaacggaccaggaatcaccatggtgtggtgtagcagctagcttagctagttcgcccaagcagagcatgcaggagctaggtagtgacacggatgatattacaagtgtctatctccgcgcggtgcgtgcactgtatgtaagcagtgtaactagagttttccaagcaaataaatttagctaaaaagcaacacttcatgtccttgactgtgatgctgttgacttggaagtctttgatgacacgaagcagattagtctaaggcgtagcattcagttccacaagagtctaccgtgctgcatcggtcaccgtttattgatgttgccgaaaaagattggtcaaagtgcacacattaccagtcgcccgctatcacgagccttatcattaggggaacagtgcttcacgggttaatttcaaaagcccccaaagctaacatagtgtattcttctaaaactatcttaacaggacgcgactacaccgagagtgctagctatatggtgctaaagagagacacctttctttccaaaaaaaaaaagctacttatacactcaatatctatgtatttttttccttcttagagaagtttctcttaaattacttatctgatttataatccgattacgccgttgtgtttattgcaattaaatctttacaacaagatctcacatgattatattttgatgaaaaatcacaaattacttttatgatatgtctaaattacgtttacatttcactaagttacttcttaaactataaaagtaaattcagtaagtctaaaagtaatttatatatattatagaagtaacttagaacaaacgaagataactttggcatgttatttgaagtaaatccgttgtatagataaaaacatgactctatctaaaaattaaattaatcagcacaaattatggaatttactaaaaagtcatattttatccctacaacgaatttacttctaatgtcgtgacaaagttacttacgttttgttttaagttacttttagaatatatgtaaattacttttagactttattgaatttacttttatgtctaagaagtaatttagtccaatcttgtcacgtcctgataaattcatcccgaaataaaaatcatcttctaaaaggaataatagaattaattaaaattcgaaaagaaattggcaaaccttaaaatacgtacaagaaaaattcaaatgtgacccggagaatttttgttaaattctccttggtctaaaaggagccctcaaattttagtggaattttcagagcacaaataataattgagaagaaataaacaaagttgaaaaggtttataaaaagaaaaaccctaaaagaagtcttctttccccccctttcccttcttgggccggctcggcccacttctctccctccctctttctcctctcccccgcggcccatcggcctcccccgcgcgagcgccgctgacaggcgggcccgcccgccaccctcgctgacgggtgggacccacctgtcatcgcctacctcccgccgcgccgccgccgcgcccgtgccctagcgccgccgccgccgcggattccgccgcatcccgccttccccgcgcgccttaatgaggggggaatcattccccgcgattccctctcccgtttcccccgcttttccctctctctctccctcggattcgttcgaatcgcgcccgcaatcctcgccgacgtcatcaatggagcccgagaactccgcggccgggttcctttctctccggccgccttctctcccttccgacgctataaaatcgtccct

SEQ ID NO: 7047 - DNA, 1425 bp, Oryza sativa
accctcacgaacctgctttacccaaggcctacgatagtttggaccgaactgccaacccgacctgggttcaagctcgtcccaagccaacccaggccaaccattccatattttagttgttgagcaaattttaagaattaaaacactgacttgggtgcattgctaggcttgcccatatccgagggctgggctattcgaatagatttactctgatcagaggtgtacatctttacccacaagacacatctttactccgcattccatggccttggaacccgtcgtaaagatgtgacataacccttcacccatcctagccgtgaacaaaagtaccgacccaaccctgcctacggccggtatcccgggacaggcaggccagggttgagcccctagcaacaagatctagaccgggtgcgccacacacataggggtgagaccacccgcgtactagtccagtgccatggcatctcgactaacgggcaccgacccgtgtagtcttcatttgcctagacatctcgattaccgagccgcagctcgcgtagccttcatttgcctcagagatatccatcgtcgcaacgacttcatccatctctatccgtgtccttttgttcaggactagactgagcaccgagttaagccttacccattagacatgtggttagtacggtagtgctttgcaacagaggcccgagcttaatccttatagtggccggggtgctacttcccacaactggcatgcacccaaaccccaccgaaaacaggttttaggggttttgaaagaggaagagaggtgtatgtccaattccaccataatccaacaattccatagtgtccaaatgatatgagaattcccaaagtctaaagttataaaaccacctaatgttgcctaattattcagcgaagcatctacctaaatttatactagtggaaccatgaatagagtacccactagttggggtttttattttcctagggtgaacaaggtaataataacaatagcaataataatgtcataacaaaggtaaataggcatggctaaataaaacagtggtaacgcgggaatttaaacaaagcgataatacaataatttaaatcaaaataattttataaactgggattcaatatgctcaagggtgatgtgacttgccttgctcgctttcccaaacgtcggcttcaacttccacgaagagcggatcttccgaagctgcagcgtctacacgaccaacggaaaagaaaaggcttttactctaataaactccatacaacaagcaggaacaaagcacaaaaatgggttcttgacttcttaaggaaaaattagagacttgaacggtccaattccgagttcaaatggccaagttatggccatttgaagtttatatgctctttaaatggatatttgcgaatttcttcatttaaattttaattaaaaat

SEQ ID NO: 7048 - DNA, 16950 bp, Oryza sativa
  unsure (1)..(16950): unsure at all n locations
acagtagcccatcatcgcggatgaaggcttgacgttccggggcctgccggcgcactttctgccggaccggccttgcgcccggccgcacggcgagacggtgctcaatcacctccctggggaccccgggcatgtccgctgctattggatctatgggagattgactaacagtggtataggctttatcttttaatgtgtaatcatccataagagaacctagcctattccttaaaaacccatcaaccttttccttaaacattacatctaatctatctttaaaattaaccatagatgaatctattgtagatgcaatttgttggttgatagattgcgatacctcgtcattacttaccatgtcgggagcgagtttgggacgtggcccgggcttgatgatcacgccttgacgagtcctagtagttgctctcatcaacgcctcccgtgtgagctcgttgatgtgctcttccatggctttacgatcctctccttcaaagtcatccaatgtgaccggtatcacatgagatggctccacctccgtcttagatgatggcttcgtcatggcgaagtcgaagtcgagttgacgatgaacggatcttgtccccagcggagtcaccaaaaatcgtgttggcaacttttttgacaagttgacaagcacgatcgcagcaccttaagccttgcggtgatcctagagtcgccaaccacctcgatttagcaaagagctaagcctagatgggttttgataactaaaccggctagtggagccgatttctaaataactacccgtctcgtgggcaaaacggaaggttttcaggacaaacctacaaagagatgtcgcactctcgcagcggcagcggacggtttacggcgcaaaccgacaaagatggacaaactaagagaaaactaaaagcaatatgaaaagaacgattcgattgattgatagtagattattttttacaatgaaccggccttgtcccttatataggggttggtcttgccctctacaggcccttcttcacgtccaactcggggtagaaaccaaaggaaacccgaaacatgccttcccgagcaaggaaacctcgaaacccgacgcaacagaatcggattcgggcctgccggtcagaccggncacataccgncggtctgaccggccttcaaccggcggtctgaccgtccaacacacggcggtcagaccggcctacctcgaaggaaaccagtagacttccaaattttggcaatatttcctattttaagcctaggtgctaaatttgggtgtaaacaggaacctcgggggtcggtcgttgtgatgttgcccgtcagtgccgccacccgggccagacgaggaagaggacttttccttgtccttcttcaacgtcgcgacgtcggtctgcagggcggcgatcgtgccggtgaggctctcgatcagcttggcgaggtcggcgttggagggttccaccattggtgcggtgacggaggtggctgatggtggagatggtggagggctgagtggtggcgcggcggctgggaatggagcggcggcgttgggtgggtcggcggagcaggaggatgaggatcggcgtgaccgtgataccaggttgtcaagggcgtcaaggcccctggtagctggaccgcggctacgtaattcgtagccggaatccgtcttctccggcgaggttttacccctcagccgtaggttcaggtttgggagagagaagaggagattaggtgagtgattcttgattttttttctccacagtgccgaatacaagactcaaaaatagtccacagactgaatcgaacatgcctacaattaaggaagaaacaaggaaactaatcccttctttctaatcttagccattcccggtggcttcctcagctgtgcgctgggcgcgctctgtagcgcggcgcacgtcacgcgcgcgacggcgtctcgcgtacgtgcggccccacatgacaagtagatcctgctgaaagatgacctgctttagtgcattactgcgaaggtcatttttgttttggatcatagcaaaaatcaccgagttggataataccatagcatatgccattaacatggcccccgcatgtcattctcacatgtaatggtatttctaaccggtgcatctttatactactaatttttctgttaatatagtgatctcataaaaaagaagaattggaagcagaaatgaacacaagcatgatacactggcatggctgcacctgcaaaaaattactgaagaaacaaaacttacctgctatcacagatgcaatattccaattgtctgtagcagcagttcaaggttcgtacacagatactccctccatggctccatccataaatgtttgaggcgctttgacttttttaaacatatttgaccgttcgtcttattcaaaaatttaagtaattattaattcttttcctatcatttgattcattgttaaatatacttttatgtatacatatagttttacatatttcacaaaagtttttaaataagacgaacggtcaaacatgtttaaaatagtcaacagcgtcaaacatttagggaagaagggagtagtttagatagaagtaggtaatttggttgcttgtatggtacaattagagttgcaacgagatgctgcttgattgtttacttattttgatgggtgacaaggttaaatagatctgaggtgtgatagacagatgctttgcaacccctcatctgccttatcccaccctaataactcagtacttagcagttagcaccagcaagatgcttattgtatttgctgaacatgacgtagggagcatttctcatttacagatatattcatatagttaatacacataactggtcctcagaatctaaaacttaataagagcaaggtcaatagtatagctaactactggctccaaaacatctatagccaatctaatagcccattcatacaatagttaactataaaaatatactgtaccattaatacacggtcccacctctcatacacacataacatcttggagtccgtgttgcagccggctacaaatctgtagcccgctttcttctctctcttctcttttcttctcgatatatggttacagccggcttatagcctgctattgtacctgctcttaagcgcatcccgcctgggggtctggttccactaattgcactatagcaatcacttgtaaataaccataaatgttggggtttaccttttctttctaaaaaaaactacttttcctgcggtgtgcacacggaaagcttgtgtgcacaggatacgttcacttaatcaaaatatcaatcaaatctaaattctcttgtttggtatttgcaggttcacatgtcaaagtaattgcaggtactgctcaatccaaatcttcctttgttcaaatcaaagtaaaaagaaagaagaaaatctatctgttacatacagagtcttatttttatctactactgtcatacattctcttttacacattacaatcaccaagtctggtgtctttatattttctatcctaatcaacgtgtcgatagtatgctcctccttcgatttatgtggtagcatggttttcccagcatgttcctctattccattttcctgagttataagaccttagtatcaataaaagttaggctatgagactttgggcagaaagaatgcaatgcactaatttctctctgcataatcagctacatcatcggttaccgcatttgttgttcttttatcaatggtagccattgcactttatctttcactgaagacaagatataacgaagagatacacatgaaggtagaaatgtttctcaaaacgtatggcacatcaaaacccacaaggtacactttctccgaagtgaagaagatagcaagacggttcaaggttaaagtaggacaaggaggatttggaagtgtgtacagaggcgagctaccaaatggagtccctgtggcggtcaagatgctagaaaatccaaaaggagaaggagacgaattcatcaatgaggtcgcgactatcgggagaatccatcatgcaaacattgtccgcctccttggcttttgctcagaaggaacaaggcgggctctcatttacgaatacatacccaatgattcgctggagaaatatatattttcacatgattctaatacttctcaagaactcctagtaccaagcaagatgctagatattgctttaggcattgcccgaggaatggagtacctgcatcaaggatgtaaccagcgtatcctccactttgatatcaaacctaacaacatcttgctggactataacttcagcccgaagatttcagactttggccttgcaaagctgtgtgcaagggaccaaagcatcgttaccttgactgcagcaagaggcacgatgggctatattgcaccagagctatattctcggaactttggggagatatcttacaagtcagatgtttacagtttcggcatgctggtactagaaatggtcagtggaaggaggaattcagacccaagtgttgaaagccaaaatgaggtttacttcccagagtgtatctatgaacaggttaccactgggcgggatttggaacttggtagggaaatgactcaagaagagaaagaaacaatgagacagctggccattgtggcactatggtgcattcaatggaacccaaagaaccggccatcaatgacaaaggtggtgaacatgctaacagggaggttgcagaatctacatgtgccacctaaaccatttttctcagctgatagccatcctataatgtaagacttgcagaacatgctgccataatttagtaaaagaatatgtgatagataaactaaatgcaatgtaataaatgcatagcgacagcatgcaatgtattctcttattgttccattctattagccacctgaaatacattcaacgatgaaattggaaaattgtagttcaattgccacggatacctcattctgttgatgtgcttttgcatgcccgtgcatttgttgtgctctgtgagtcgtcaatatgaccaattcatgagccagacgaatctggtggaaaactggaagtgaataattaactccataatttatatagaaaagaagagctgaaatcaaatcaaaggtgttacctctgtcaattcgaagtgtaggagtctgatctcaactcccgagagctgcaaacctgagcaggaagccctcacatagctagcttgaggagagggaggtggaagctccggtctgggaggcggaaacctcggcatggttaggagagagaggtgtcgcgagcggcacagaagagaagggcggaggtggctccggcgatcggccagcgccatggtagtgtggcactgcagcctggggggcggacgtttgagcagctcaggtggcacgtcttcctcgggaaccccacgcgcctccggcgagccgaagaggcggcggggtgcgccggcgaccgagaaggtgaacgacaagtgaaccaggaggaatttccctagccccaacatcccttccagcccaaacaaatgggccgcacgtaattccccaaccctttgttgggccgcacctggtcctaagtcagaatctgtttcggtcgaattactgtgggccgttccattccagcccacacaatcgacacgaaaggtggcagtggcaccctcctgggctgtcctggcattggtctgactagagtttatacaaaaagagagaaaaaacgcaaagcaaatgaattttaccatcatcgatgcctgacattctgacaaggagatctctctcgccgtgtgtttcggtcttacaacaacagcgacgagatttacgaaaagcagcaaaacactaagtcttgtgtaaactctttcaaagtcttaatctttttcagatactcggtaaatagtacgagctcactttatttgcttattatatgtgctacaaacttacaatatacataaaaactattgaagttacaatatatcgatctcagcatattgaagtttcgacagcaaaatgggcatacaaattaagtaaatacagtcatcataaatgtacttgctactaagttactggtagctttcgaacagacatatgctttcgtcgtcgtcgtcctcatgctcctcggagattgcagttagatcagatggcatattgtaagactccactccagggaattgctcatcatcacagaagaatggccttggaggaacctgcagttcatcactaccaccttcaagcatctctatcacctcgctcatcgtcggtcgatcacacgacctcatctgaatgcaccataatccaacaatgcaaagcttcttctctagttcatgcatgtcagcaatatcagagatctcgcttgtttctcgccgagtcagctccctgtacacccgtgatggataatatgcttgacttttttttttcgccgggtcggcaaagaacgccgaccatagtatattaagaatttggagaatgtacagagatggcgaggcttcacagccaccgcctatttacaagatgccacaccactatccggagaacccggaggaaaccacagaggggcctctcacagcgcccgtaacaagctgggcggcttcccaagactcccattcatcttcaatggctgcgcagagcaaagaagacgatgtcccacgccctcgaagacccgagcatttcgttccttccaaatcagccacgtaattaggatgatgcccgcgtcaaacgtttttctatcaatcttggcaatcttcttgcgcgcttcgcaccaccacccctgaaagtccgaggcaggcttcgggcagcggagaccaagtcgatcccggacggactcccacactgcctgagtgaaggaacagtgagtttgctgcatttggatctgcattccttcttcctccagccatctccaaaagtagcattccgaagctataaacatcggatttgcttgatatgacaccaaaactccgagagatcatctcaggagctatgtagcccacggttcctcgtgcggcactcactgggacaaagctcttatctcttgggtacagcttggcaaggccaaaatctgcaacttttgggacaaagttatcatcaagaaggatgttatgcggcttgatgtcaaagtgtagaatctgcatctcacatccctgatgcaggtagttgatccctcttgcaatacccaaggcgatctcattcagcttgtcccaggagaaactcttctctggcgagaagatgtacttgtcaagagagcctcgaggcatgtactcgtatataagtgccctcctcatttcttcagtgcaaaacccgaccagacgcaccacattgacatggtggatccttccaatggttgatacttcactgatgaactcatctccgttgcagctggagctaccagtcagcatcttgacggcaatatggagattacccgggagcaatacacctttatatacagagccatagcctccttggcctagcttgtctcgaaaatgtgatgtgattgcaataatgtctgtgtaggcaaacctcatcggaccaatcatctgctgcattcggaggaacttctctaccgcgtcgatcgtgatccttgttttccagtacttatgggcaaggaagatgaatatcaccagtgaccccaacagtaacctgaataaaacttctcaaacaaaccaacatacatgtatataagttagtatatatatgttcatacatgatatcaccggtgtgatgattaaaagcaagtaattcgtacgtaccgaaatgaaacttggtgatatcaatagccgataccatgattcccaaaaaaatcatgtctttcttggaggcacctagattactgcaatctacttcggagtatgtttcattccagaaaagagcacgggttaaatcttgaatgcttgcacgagatgtatgctgcttgaagtacctgcaaatcacaccattgtacaagacggggttataagtgaaggaaccacatctgttttataaaaacagaatcatgagaaaaacaaaactaattaacttgcgtttgagcgcagactcacctctttgaacccttcaggcattccgtgacgctgatatcattactctggtaaggaccaattggaaacgaaacactaactcctttccttatgaatcctatgatatctgtgtaacttgcattctgtagctgtgagtccgatatatgccaaccatcaaagggaatcatggccaaatatcgacatgaaggttgaaactctccaacggcacagtcatcaaacgagacaaaaacaaatgaattgttgggaagcagacatgtaacgggcctgtaccttggcataatatctgttattgctcggaaacaattcacaaagcatgcccaattgcgtgaaacagtgtacaaatcgatagcgccataagaatcagttgaagttttccccgaatacagacgccagtaattcttcgtgtaaggaaggtgatcagagcgaggaagaggacaactgctgccgtttgtatcatcatcttgcaaggtggcatccacaacccagaattcctccccggtatagttgatgctagtcacgtagtacgtccctttgttgatctgaatggcagccctgccattgttacatgagaggttgtaccatggacgaggagtagcaacgcactgacgtgaatcgccttcaagacggaaagggtaggatatgttgccaagatggccacaggaggaaggaggacagtactgggggtttagccctgttccaacaacttctgctgcaacaaccgcaagcaaagaggagagaagtagagatttcgccatggctgcagcttccattcccagtccgtccctagagaaatgaccactataattggcagggattagccttgctgagtattaatttggtggggtcggggtgggtgctttaactggggagatactgactactagtactatctttttctttttcaatgtatgattctgttgacttttcagataatatttaattgttcttcttattcaaaaattcagtgcaaacatatatatataaataaagtaaggttagggtctctttgatgacaaaataaatcacaacaaaaaaacattcttataaattttttgagcaagacggatagtcaaacgttatgacaaaagttaacgacgtcatacattaaaaaacagaacagagtaactatctctctttcataatatataaaagaaatagacttagaccaggtattagaaaaagtatgtaaaattaaacgagagaatgttgtgattgtttaagagaaaaaagtagacaaaaaaaatttaaatattgaaagattgtgattggttgagaaggaaatgtaggtaaagaagttgttatattttagaacaaattttaaatactaatagtagaatttgttttattttaagacaggaacgagtattaatttttgggacttttatggaagcactcaatttccacacctgtcaatttcctccgtgtaatacacggtacagtacctataggtaacggtcaatcgcgatccaataaagtaggagagccaagctcccccatttccattaagagaaatgagcatttgccagatgtttgagggtttctacaaataaaccctttcccagacagataacaggtccagctaagctaaccaagcaaaccctcaaaagatctacctataggtctttttccacacggcaggatggatgctgctgcgattcactagactgcaggcagcttccggccgggtactacactgtggtatagtggtgtccatcttttaactcgacgcaacgcaacattgccctgccttgcttacttgttggatcgtctccatctcgcctgcctgtcacagtgcatacagaaaataggatgagaggatttcttgcagcaaccctcctggtgttgagccttcttctcaacctgcacacagcagcgtcagtgtcagcgtgggaagacaaggatttcttcagctactgcccgccgtcgaggtgcggcgagcatggccccgagatcaggttccctttcaaacttgaatccaaaaatacaccatcgtcatgtggcgtgccatgcatgaagctatcatgctctggccaatataccatcctacataacaaataccttggaaggccatacaagttgaccgccatagattacaagcatgctctcctgaccgccgtcccgctcgcagacgaagacaactactcctcaccgtctccctgcccacttctaaaatccatatctatcaggccaaacttaataacagggccaggctatggttattacaacacagggtaccagaacccttgccaaacatacgatacctactatgcagcactagtaagctgttcaacagaatttgccctagctagtgtccctggcactgccaccgataacgattatattgctggccccatctcttgccttagcaaccaaacccacttctcctatttggtggcttatcgtgtaactatgtctcttcttccgttggactgcgaggtcatctcagatggccccattccgataccagctttttattactccggttatatcccatccatgttcacaacaagtgcagacagaatcctcgactatccttccggttatgtcttatccacgttcagagaaagtgcagaaagaatcctcaattcttctgagaccatgatctggtggtatttctacaagtacgatggcagacattgtgaacaacaaggccgacgctgcgcattcagctcacaaaggaatcaaacattctgcatgggtagaggtattatttcttactggccaaacaactactcctatacaactcgcagtaccattcttgtttatcatctgtaagttttacaatttccaatttacagccccacacatatccatgctagtgctatttgatcgtcaaaatccagcaaaacactggcaattatgcccgatggataagaaaacaatatttatcagcacatgagcatcacttatattatctttatttaagacccacttatattatctgatcatcttaaaaactgaaagcaggaaatgaccataaccttgatatgccagcacattcatgcatggttgcacttgaataaagttaccaaagaagcagaacttatttggtcacaactgtagcattccgattgcctgtagcagaagttcaagggatacaggtagctcagatgggatgagacttgagggtatacaagtaatacctccgttttcaatatatgacatggatgactcttgaacatacttttaatatacttaaaaatggagggagtaggtattttggtctattgtgtgatacaacgagagctgcagtaagatgatgcttggttgctttgatggctgttgaggttaacatagatctgagatgtggtgtgtagataattttgtaaccctttttccacgttatcccaccctaaccattcttaatctgccattccgtcttgcttagccaccatcattagcacatggcaacttgcttattagtatgagttatgatatctgctgaacaaaacgtagggatcatttctcacttacaaatatattcatatataggccttgtttagttctaaatttttttcttcaaacttccaacttttccatcacatcaaaactttcctacacacataaacttccaacttttttcttcaaacttccaattttagtcaaatttccaattttggtgtggaactaaacacagccataattgaataattcaaacacatctgattccacagaatctaaaacttacacgcactccactgggtgtctggtcttccatactgcactatagcagtcagctgtatacccatgtcagattttaccttttctttctcaagtcaatttctcctctctttttttcctaacgaaactatcgatcaagtctgaattctcttgtttggtttttgcaggttcacatgtcaaagtaatagcaggtattggttcaataatccaaaccttcttttgttcaatgaaagtaaaataaaaggaacaaattaaagttatctatcacatactaagtcttattattagctcctctggtcttataatctcttatcattattacaatcctaatggtggctctctaatttatattcgtaatcaatgtgttgatagtctatttgctcttctgtttgtacggaaagatggttttgccagcatattcctctacattgcttttctgagctaagtcttataaatataagttgggctgtgagccttctgtctagaaacaacacaatgcactaacttttattatctgcatcatcagctacatcttcggttgctgcatttgttattcttctgttgatggtggccactgcactatatctttcactgaggacaagatataatgaagagatacatctgaaggtagaaatgtttctcaaaacatatggcacatcgaaacccacgaggtacactttctccgaagtaaagaagatagcaagccggttcaaggttaaagtaggacaaggtggatttggaagtgtgtacagaggtgagctaccaaacggagtccctgtggtggttaagatgctagaaaactccaaaggggagggagatgaattcatcaatgaggttgcaactatcgggagaatccaccatgcaaacattgtccgcctccttggcttttgcttagaaggaacaaggcgggctctcatttacgaatacatgcctaacgattcgctggagaaatatatattttcacatgattctgatacttctcaagaagtcctagtgccaaacaagatgctagatattgctttaggcattgcccgaggaatggagtacttgcatcaaggatgcaaccagcgtatcctccactttgatatcaagcctcataacatcttgctggactataacttcagtccgaagatttcagactttggccttgcaaagctgtgtgcaagggaccaaagcatcgttaccttgactgcagcaagaggcacgatgggctatattgcaccagagctatattctcggaactttggagagatatcttacaagtcagatgtttatagtttcggcatgctggtgttagaaatggttagcggaaggaggaactcagacccaagtgttgaaagccaaaacatggtctacttcccagaatggatctatgaacaggttaccgctgggcaggatttggcacttggtagggaaatgactgaagaagagaaagcaacaacgagacagctggccattgtggcactatggtgcattcagtggaacccaaataaccggccatcaatgacaaaggtggtgaacatgctaacagggaggttgcagaatctacaggtgccgcctaagcagtttttctcagctgacagccatcctactctgtaagacttgcacaacatggtaccataattcagtagaggaatatgtgatacatataaacttagtacacattttgcaataaatgcctagcattagcatgcaatatattcttattatgccaagccacatgaagtgccactcttcactgtataaaaattcaatgagggaattggatatttgtggttcagttgtcgtgggttaccttattgtgtcgttgctgtgatttatcctcaccatgatttattctgtggtgctccccctgtgaagttgtctgaagtccttgtccaatttatgaaccagaatctggtggaaatttcacaggaggattgtattaactgtgtgagtaagactcatatctgtcccatcatggaattgagcgcagtagttccaaaatttagatagaacagaagaaatcaaatcagaaagtgttaccttagtctatggctatcgaaaagcagcagcgatcatcgcgggaagaccgaagacctaagacctcgactcgcttgcgggggtcgtctttcccagcactattaccctccctcctcatcccatccaagcccccagatcccgcgagatgggtggtggtggtggaaggtgacgacgtggaccacatggggacgggatggagaccggggaggagnnangagnnagnaggatanagnaagatgcaggtcggctccggtgtggggnacacggtgagcgcgcgncgncggagaagagtggtagncggctccggcgaccggccagcgcgccggcggatgaggaatgctggatgccaaggcaaaggggatgctcggctcgcgaaatcgccgccgccgctttagccggagctcgccgggaagtgtggtggggcgaaggcggagcaatcacaatctaattaaggcctagtttcgatggcccatctaggcctggcccatcaagtcaatcacaatccctttccggcccagatatatatgtttgtgggctttgcaaaaggaaacttaattaacaagaccactaaaatcctgccattagcaatggtcatcttgataacttggtcattagcaggcagcaggttagcagctagcacaaaaatactactccctccatcctaaaatattttgacgccgttgatttttttaaacatgtttaaccgtttgtcttattcaaaaaatttaagtaattattaattattttcctatcatctatctattatattattaaaacagctctgaaagggagcaccacgttcggtgcgggagatagaaattcccacattaatcgaagaaaaacaaaaaaaaagaaaaagagagtccaagtagaagtacaatttaaaaatagctgaaattcggaattaaaaataagcaatagtgaaagaagtttccatataagaacccaatacgagattaatcaaaattcaaaataaaaataaaataaaatccaaaattagaaaagaaaaggagagcccgagtagaaatacaatttaaaaatagttgaaattcagaattaaatataaacaatattgattgaagtttccatataagaacccaatacgagattaatcaaaattcgaaataaaaataaaataaaatccaaaataagaaaaggtgatgagagtccaagtaggaatacaatttaaaaatagctaaaattcggaattaaaaagaaggaatattaaaagaagagtccatataaaaacccaatacgagattaattaaaattcagaataaaaataaataaatccgaaattagcaaaagaaaataaaagaagagttcaagtaggaatacaatttaaaattagctaaaattcggaattaaaaataagcaatattgaaagaagaatccatataagaacccaatacgagattaattaaaatttagaatagaaaataaaataatatccaaaaatagaaaggggcaattgcaaatttatcactactttgaaccgttattacaaaactgccactagaaaattgcaaaaatatcactagaactgtcattcgagtggcatccttgcaatattgaaaaaaccagtggtaaatttgcaaacgccccaaatagaaaaattaaaagagagttcaagtaggaatacaattttgaaacaactgaaattgaaaatataaaataaaaacattaaaagaacacagtacggtattaactaaaatttaaaaaaaatctgaaattagaaaaagaaaattaagatttcaattaggaatacaatttataaataactaaaatttgtgataaaaattaagattattgaaagaaaagaccatctaaaacacatgacgagataaattaagtaacatgcctataaaggagtagagtggtggcggttgatatgacatataaaaattgttaataaaacacctaatagaatcctaatgacgattaaaaggagggacgtcagacaggccgtgaagtaaacgagtaaggcggttgtcgggacttctagaaagtaaaaaaacaaaccccattgataatcatattcgatttttaaaatctcaatgataataaaaaggagaagcagcgggcggggtgtataagagtatagttgcagagccgccgacggttgacaggacttatagaaaataaaaaatgaattccaacgatagttatgttcgatttttagaatcacaatgataataaagagtaggcggcggacgggctgtagagggtgatgaggacatcctccactattatttgttcagcctcggccaacctcacctgggggcatagtggcatcgtttgatgtgacttttaaaacttaataaaaaattaaactacaagtccaattttaaaggttcggaacttttaaaaagttaaaaaaaaaagaaacccaatgataatcatgttggattttaaatcttaaatgataataaagaaggaagccagcgggcgacccgtagaggagtacaatggcaaagccgctgacggtttggcgggacttctaaaaagtaaaaataaacccaaacgataattatgttcgatttttaaattctcaatccaataaagagaagagcagtggcaacgtttgacgggacatctagaaattataaaaatgaaacccaacatgacaataaactccaaaaactataaaatccaatttttaaaggttccaagaagaatgaatataaatagtggtagatcgagcaagtaaataaaaaagaagatgacataaggggtagcaactggtgtgacttttaaaaactatataattagaaacacgaggatggtaaggtttggtctttcaaagtcttaagacaatgagatagctatttaacaaattttaagtaaaatcatacttaaaaaaaatatgattttgtttgggtgctagccgcgtaattgcgtgggccacccagctagttatattattaaagaaatagaaaaagaagcctccacgtttgctcccatggcctagaaattctgacattaatcggagaaaaataaaaaacagagtccatataggaatacatttaataatagctgaaattcggaattaaaaataaggaatataggaaggtaggtctaaagtccatatcgatatacaataaaactaatagaaattcagaattaaaaaataagaaaaaaaataaatgtagaggttagaatccatctagaaatacaatttagaaataaagaaattcaaaattaaaaaatatattggatgaagaatatagagtccataaagaaatagaatttaaaaataattaaaattccgaat

SEQ ID NO: 7049 - DNA, 17833 bp, Oryza sativa
gtttgaggcaaattcgagatctggaagctgggtttctctttacaaataacactaaccctaccatcaaatcaagaaaggaggctttgaacaaatagcttgattgaagtatgaagtggctcggtgggcgacgatgacgggcgagctccggcgagggcctgggggcctgagcgacgatgacgggcgagctccggcagcggcgagctctggtggtcgcgcgctggggcctgggggacgccgacgggccggcgctggtgggaggcggcgacggaggctggcggaggagggacggcggacggcaggcggcgctggcggtcgcgcggcgagggacggcaggccgcgcgcccgccggaggaggagggacggagggacggcaggcggcgctggcggtagcgcggcgagggcggtggcggcttaggtcgctggggggaggaggactggagccgactagtatacctggccaaatgggccgggccaaggcgtgccggcccgagcacggcagcactgtagccggcccaggaacggcacggcacgcccgctcgtgggccgtgccggcacgacccgttcagccgtgccgtgcttggcccgacgtctgagcccatgggccggtacggcaccgcacggttgccatcgggtcggcacgtcaacgccacatcagcaaaaccgccatccaaaaccgctgagggagtcaaattgcactagtttgaatagttcggggagtcatcctatccggttttacggttgagggtcacggattagattcgggtgacttttaagggagtcaaagtggacttttttccttttattaaatttaacattgaacatattttgataatatgtttattttatgttgaaaatgctagtatatttttttataaagttggtcaaacttggataaaaataaaagcaacttataaggacaagttcactgtacttctttgcttgataatactaagttcataaaactacatatacatgggcctccgcgtaatgacgctagcgtacacagaaaaatacaatcatcacatatataagcagcttcagcagtcagcatttcgcaacgtgcatactactagtactaagttactggtagctaaagctctgaaacaggctaatgctttcgtcgtcatcgtcctcttcagcttcagagattgcagtcagatcagatgacagatggtaaggctctactccaaggggttgctcatcatcacagaagaatggcttgggaggaacttggagatcatcgctgccaccttcaagcatctctatcacctcgctcatcgtcggtcgatcagatgacctcatctgaatgcaccgtaatccaacaacgcaaagctccttctccagctcatgcatgtcgacaatgtcagagatctcacatgtttctcgtcgagtcaactgcttgtacacccgggatggatagtatgcctgacttgagtttgctgcattcggatctgcatttcttcttcctccggccatttctagtagcagcatcccaaagctatacacatcagatttgcttgatatggtaccaaagctccgagagatcatctcaggagctatgtaacccactgttcctcgtgcagcgctcactgggacaaagctcttatctcttgggtacagcttggcaaggccaaaatcggcaacttttgggacaaagttatcatcaagaaggatgttgtgaggcttgatgtcaaagtgcagaatctgcatctcgcacccctgatgcaggtagttgatccctcttgcaatgcccaaagcgatctcattcagcttgtcccaggagaaacacttctctaatgagaagatgtatttatcaagagagccccgaggcatgtactcatagacgagcgctcttctcatttcttccgagcagaatccgaccagacgcactacattgatatggtggatccgaccgatggtggagacctcactaatgaattcatctccgttgcagttggagttaccggacaacatcttgatggcaacatgtacattgccggggagcagtacgcctttatatacagagccatagcctccttgtcctagcttgtctcgaaaatgggatgtgattgcaatgatgtcagtgtaggcgtacctcattggaccaatcatctgttgcatctggagaaacttctctaccgcatcgattgtgatccttgttttccagtacttgtgggcaaggaagatgaataccaccagcggcgccaacattaacctgaataaaactttgcagaaatgccaagagcccgagaagcagttttttttagatagtggaagggtacggaacaatataggctatagcattataggtgtgtatcactcaaaaagaatattagagctatgatgattaaatgaaggtaattcaagcgtaccaaaatagagcttgatgataacgatggcagatactatgataaccataagtgtcataaactttgtagagcttgatgataacgatggcagatactatgataaccataagtgtcataaactttgttgtgtaggcgtgaccagcaactctgcagcgtgtgaaatacagttcgctccagaaaatagcacgggctatattcggaatgcttgcgccggttatatgctcgttgaagtacctgcagatcacaccattttacaggatgggttaagcgaaggaaacgcgtctttctccatagacactacagaatttatgagggaaacaaaaaaaacagctcacacgagggtcgagagtattcatgccatacgtatttgagagcagactgaccttactgaattgttgaggcattccttggtgctgatatgatgattgaggtggtgtttggatccagggacttaactttagtccctgtttttagacactaatttagagtattaaatatagactacttacaaaactaattatataaatgaaagctaattcacgagacaaattttttaagcctaattaatccacaattagagaatgtttactgtagcatcacataggctaatcatggattagttaggctcaatagattcgtctcgcgaattagtccaagattatggatgagttttattaatagtctacgtttaatatttataattaatattcaaacatccgatgtgatagagacttaaaagttttagtcccatctaaacagggcctgagggaactatgatccattgggaatcgaacacgaaaccccttccctatgaatccaatgatatcagtataacttgcattttgtagctgtgagactgatatatgttgagtatcaaagggaatcatggacaagtatcgacaagaaggttgaagctctccaattgtacagccataaaactcgttgagataaacaaaagaattgttggtaggcaggcaagagacgggcctgtaccatggactagtagtatcttgtattggtctggaacaattcacaaagcatgcccaagcactgtctgaagaagtagccaaatcgagaaagccataagaatcagttgtagtacggtccaacagatcgtcagtactgtaaggagggtgatcggatggaggaagagggcagctgctatcatcatcctgcatggtggcgtcggtgaccaagaaggacagatcggtgtagttgatgctactcacgtagtatgttcttgtgttgatctgaatggtggccttgccagtgttgctgcaggacaggtcataccatggacggggagcagcaacgcaatcgcgcgaatcgccttgaagacggaaagggtaggatatgttgtgaagatcaccacaggaggaaggaggacagtagtggttgttgctttgccctcctccaacatctgctgcaacaagcaaagaagaagagatcactagagctgtctgcaaggtgtaggtaatactactgctactaatggagctcgccatggctgcaggggcctgcaggctgcagcttcaagacctggatgaatgacttatgacttatgaccgcgagtggacgaactgcagcagtagtactagtcaaagttggacggccacaccagtcgtccaggcacagatgagacacgctcctacacgaattattgggatattatatttgcgttaatggctcttcttcgcctccatgggtcagacagacagaaacgaatagtccagtcaagatgagctctgagcttgctcttgttgcaggaccctgcttgctgctgctgtcgtctctgcttctgcagctgcaggccacggcatgggaagacaaggatttctcagctactgcccgccgtcgcggtgcagcgagcatggccccgagatcaggttccctttccaacttgaatccaacaatactacaccatcctcatgtagcgtaccatgcatgaagctagcatgctccggccaagacaccatcttagatagcagatactcgtaccttggaagcccatacaaggtgaccgccatagattacaagcatactaccctcaccatcatccctatcggagacttggattcatgtccgcttctaaattctgtaccacttccttctcagccactccattatcattatcacggtgcaaactggagctcttgcgacatatacaattggggttctgcagccctagtaagctgttctcaagagttgacacaaactgatatcccttccactcatattgctggcccaatctcttgcctgtccaccaactcaactcacttctcctatttggtggcttatgatgtgcctacgtgtcttattccaatccagtgcgaggtcatctcagatggccccattccgataccatatttttactctggccatgcctcgctcaccttcaggcaaagtgcagaaagaatcctcaattttgctgacacgacggtctattggagatccttcgcaaacccagccgcttacaattgctcacagtgtgaacaacaaggccgacgctgcgcatacagctcacaaagaaatcaaacattctgcatgcgtcgaggtatttttttcaaacccggtaaatccctttacagcaggcaccgtctttttcctgcaagttttacaattttcagtttacaatccactcatatgaatgctaactagtagtatctgattgtcaatagccagcaaaacacacatgagcgtcacatacacttcatcttaattccaaacgtggttgctcaaaatgtagaggctaaataaaaagctttaccaacctcatcgtaagatcactggcatggcggcattcacttctgggagcccatcatcgagttacaacttacaacaagatttatggctgccatccttcttgtactggaggtgcaatatatagtagtgtcaagggcgtcaaggcccctggtagctggaccgcggctacgtaattcgtagccggaatccgtcttctccggcgaggttttacccctcagccgtaggttcaggtttgggagagagaagaggagattaggtgagtgattcttgattttttctccacagtgccgaatacaagactcaaaaatagtccacagactgaatcgaacatgcctacaattaaggaagaaacaaggaaactaatcccttctttctaatcttagccactcccggtggcttcctcagctgtgcgctgggcgcgctctgtagcgcggcgcacgtcacgcgcgcgacggcgtctcgcgtacgtgcggccccacatgacatctcccccctcatcgagagccagctcgtccccgagctggaagtcggggtacttggcgatgaaagcgtcggcgtcttcccacgtcgccgaagctggggactctcccttccattggatcagcagctggcgcacaccacgtgcgaggcgcgtcttgacggctcgttccggctccgggaccacggcaccatggtgaacagcaggcaggggcggtggagcatccggcggggagccatggaacttcttgaggaggccgatgtggaaaacgtcgtgcagacgagctcggggtggcagagcgaggcgaaccgcgacgtcgttgatgagctcggtgatgcggtagggcccgtagaagcggggcctcagcttgccggcgacggtctgtggcagtgaagatgccgcgcgctgcctgaggcgtagtagggcccagtcacccacctggtacgtgacatggcgatgtgccttgtcatagtggcgcttctgggtcgcctgtgcttgttcaaggcggctgcgaatgtcagcgaggaacttatcccgctcttccatggtcttggcgacggcggccaccctggtgtctccgggctcatatgaccggatggatgggggatcgcggccgtagacgacgcggaacggtgtgtcccgcagtgacgtttggtaggcggtgttgaagacgtactccgcccacggaagccactggagccactgccgcggtcgatcaccagtgaggcaccgcaggtacatgacaatgacgcggttggcggactctgactgcccatctgactgtgggtgaaaggccgtcgtcatgtgcaacttggtacccaccaaccacatcagctcgcgccagaagtgggaggtgaaaaccgtgtcccggtccgacacgatggactgtggcatgccatggaggcgaacgatgtcggcgaagaaggcctgggcgacggtctccgcggagtacgggtgagacagggggatgaagtggcagtacttgctgaacctgtccaccaccgtcagaatgactgacttgccccggacgcgtggtagcgcctcgacgaagtctagggcgatgtccgtccagactccttgtggcacgggcagcggtagaagaaggccagccggatgtagatgctccgacttgtagcgctggcacgtagggcatgcccgcaccaaatcctgcacgagctgtttcatgttaggaaaatgaaaatcacgccgcagccggtgcagcgtgcgctggacgccttcgtgtccttcctcgtggacagccgccatgagctccggcagcagaggcgaggccgggggaatgtacagccgcccgctgtactggatcatcccgtccacggccgcccacggcagagcttgggagcccgaggtgagctcttcatgcatggcgacgagggccgggtcagtggtttgcgcgtggcggagcctgtcgacgaagtcaaagcgtggggccgagagcgccaagatggtgccatcctccggtgtgtcccggcgcgacagcgcgtccgctacggcattggcatgtcccggcttgtactcgacggtgaagtcgaacccgagaagcttccccacccagtgatgctgaggaatcgtcgcgagcctctgatcgagcaggtacttgaggctgtagtggtcggtcttgacgacgaagcggcgcccccacaagtacggccgccagtgacgtacagcgtgcacgaagccgatcagctcacgctcgtatgctgcgagcgcgcgatggcggggtgccaccggcctactgaagaaggcaacagggtggctgtcctggacgagcaccgctccgaagccatgagacgaagcgtcgcattcgacgatgaagggcttggagaagtccggcatggcgagcaccggggcggtggtgactgctgccttgagcgcgtcgaacgccgttgcggcctcccctgaccaggagaaactatctttcttgaggagggcggtgaggggcgcggcgatggcgccgtagttgtgcacaaacttgcggtagtagcccgccaagccgaggaagctgcggactgcgcgcgccgagcgtggcgccggccaatcccgcacagcctgcaccttggccgggtccatggcgacgcccgcctcagagatgacgtggccgaggtacgcgacggacgcgctggcgaaggcgcacttggcgcgcttgaggaagagctggtgccgctgaagctcgctgaggacggcgcggatgtggcgcagatgatccgcccaggtcttgctgtaaattagtatatcatcaaaaaacacaagaacgaaacggcgaaggaacggccgaagtacgtcgttcatcagagcctggaacgtcaccggggcattgcacagcccgaacggcatgacgaggaactcgtagaggccgtcgtgggtatggaacgcggtcttgtgaacgtcggccggccgcatccgcacctggtggtacccggagcggagatctagcttggtgaagaagcgcgccccgtggagctcatcgagcagctcgtcgatgacggggatcggaaacgcatccttgaccgtgagcgcgttgagggcgcggtagtcgacgcaaaagcgccacgatccgtccggcttcttgacgaggaggaccggggacgagaacgcggagtcgctgcggcggacaatgccttgctcgattatggcggcacattgcagctccaattcatccttgtgagccgccaggtaacgataggggcggacggccactggcagcgcacccggctttaagacgatgctgtggtcccgagcgcgctgtggtggcagaccggatggctcgcgaagaccccttcgaaagaggccagcagcccatcgagaaggacctccgaggctgctatgacggcgacagtcggctccgggcgcgccgccacgtcggaccagcgaacctccatgccgtggcgcgagaacgacatggtgcgcgccgtgaagtcccatgttatcggccccagggtaaccatccattgggttcccagaacgagatcgtatcccgccaacggcatgacgaagaggtccacgtggaactcctctccatcgatggtgatcggcgcctgtcggagcacgcccgggcactggatcttctcgccattggccactgtggccgtgaggcgcggcttgggctggatggccaggttggtgcggcgcgccgcctcctcggcgatgaaattgtgggtggagctggtgtcgaggagggcggtgagggtgaccgcgcccagcatcacccggacttgcatcgtgtcgcagatcgggactcctgcgaccgcctgcaaagagaagacaggggcctccccatcttggtccgcgtccaacgcggcgtcctcggcgtcggtgagcgtcacgccgtcgatgtagaagatgcggcggcagacccggttatggccacgggagtacttttcgtcgcaattgtagcacagcccgaggcggcgacgttccgcctgctcctcctgggagaggcgtttcaccggtttggcctccatcttggccacgggtgcgctcgccggcggtgcagggagcgcgaggcgctggggcagtgccggcagcaggccgcggggcgctggccgggcgggaactggagccggcttgtcgagctccatcaactcaacttgacgggccaggctcatggcggccgcgagcgactgcgggttgtgaatccgcacagcgtgactcagcggcggaaggagtccccccgtgaatagctggaccagctgggcttcctgcagtggaccggcgcgtggtaggagcgcctggaagctgttctggtactccttgacggtacccgtgcgccggcactcggcgagctcgaacagcggcgctgagcgcaggggcggtccaaagcgcaggtggaggaggtccttgaagcgattccatctgggagtaccctcgtcctcctggagttggatataccacaattgggccacgtcctccaggttgtatgaagccatccatactttctcctcctccatgatgcgttgttgatggaaataagattcacatctgttgacgaagatcaggggatcggtcgtgccatcatagcggggaaagtccatcttctggaactgttggcaacttttttgacaagttgacaagcacgatcgcagcaccttaagctttgcggtgatcctagagtcgccaaccacctcgatctagcaaagagctaaacctagatgggttttgataactaaaccggctaatggagccgatttctagataactacccgtctcgtgggcaagacggaaggttttcaggacaaacctacaaagagatgttgcactctcgcagcggcggcggacggtttacggcgcaaaccgacaaagatggacaaactaagagaaaactaaaagcaatatgaaaagaacgattcgattgattgatagtagattgttttttacaatgaaccggccttgtcccttatataggggttggtcttgccctctacaggcccttctccacgtccaactcggggtagaaaccaaaggaaacccgaaacatgccttcccgagcaaggaaacctcgaaacccgacgcaacagaatcggacttgggcctgccggtcaaaccggccacataccgccggtctgaccggccttcaaccggcggtctgaccgcccaacacacggcagtcagactggcctacctcgaaggaaaccggtagacttccaaattttggcaatatttcctattttaagcctaggtgccaaatttgggtgtaaacacatgcccccctgcctttttgatgaacgacgtgaatctaaaagcatagaacatgtttttggtcttaggacgataatccaattaccggccatagtacctcctaagcgtcttgccaaacactcgggaagtatttctttaagtatttcccattgattgctcgctgaaaacgctccccttgtagtgtctccaaaaagtatgcgttccctcgaacaacgccgcaaactcgataaggaccctcccaactaggagaccacttaccgaactccttagatcgagtacctaaaggcaaaattgtcttccaaaccaagtctccaacttgaaacaattttgctttcactctcttgttgtacgctttggccaccctcttcttctctttctctatctcttccaatgccttcaagcgcttgtcggtgacttcatcaaggttgtctcccataaacgtctcgtaatcttcacttgacaaatcatcttgcttgatataacgaagagaaccaagatttacctccaccggtaaaacggcttcttgaccataaaccaactcaaaaggagtgactttagtggcaccatgtttatatatcctatgtgcccacaatgcttcagaaagcacctcatgccacctcttcgggtgttcctcaatcttcttttttactagctttaacaatgtcttattactcgactcggcttgtccattagcctgagcgtagtaaggagaagaactcaacaatttaatgccataagattcggtaaaactcttcacttccttagacataaaagaagcgccttggtccgtagttaatgtttgcggaataccgaatctatgaataatatgcttcaaaataaagtcaattacctccgtatgagtcatattcttcaaaggtacggcttcggcccacttggtgaagtaatccgtagcgactagcacgaacctatgcccctttgatgacgaaggataaatttgaccaatgaaatctaaagcccatcctcggaacggctatggtttgattataggattcaacacggcggcgggcaccaattgaacattgccgaaccgttgacaagcctcgcatcctctataatatttgaagcaatcatcaatcatcctcggccaataaaaccccgctcttctaagcaaccaattcatcttgtgggccgatttatgagttccacaaattccttcatgtacttctcccatagccactttagattgatctttatctaagcacttcaacaagacaccatctatgtttcggcgatacaaatctccttccacaaattccttcatgtatttctcccatagccactttagattgatctttatctaagtacttcaacaagacaccatctatgtttcgacgatacaaatctccatcaagcaatgtatatttgaatgcttgccgccgaatttttcgatcaaccttaaatgtgggatctttcaaatattgaatcaaaggaattctcgaatcctcttctgtatcctggacacaaacgtccgaattcacaattaattcggcttcaaaattacttgaaacgtgccccccagcattctgcctagaaccggtcagaccggccacacagggccggtcagaccgctcagggatgccggtcagaccggcggcatgtggccggtcagaccgcccctggtcacggtcagaccggccgtgcaacgtcggtcagaccgcctctggtccccaactttgccaattttgcgcaaaaatttaaaatcaagcaccggctcttctaatatcagaaataaccccctttttacattataaccagatgtttgttgtgccaagtcatttgctctagaattatcacacctagcaatatgtctaatagcaaaattatcaaaattggcaataatatctaaacatgaatcgaggtacctatttagtgatccatccaagcacttgtagatcccggcgacttgttgcaccaccaattccgaatcaccaaaggcctccacatatttagctccaaccatctccatcacttgtaagccgaacaataaagcattgtattcggcttgattatttgtgcaataatattccaaacgaaccgatgcctcataacacatgccattaggtgaaatcaaaactacccctttgccttgaccttctttgcaagaagaaccatcaaaataaatcttccaaggtataacttcaactaagcaaacctctccctcataagcaacatctatatgatggtccactataaaatcacatacaatttggccttttatagttttcaatggttcataagccaaatcatattctatcaaagcatatgcccacttaccaattctcccacttagaattggcctttgcaacatgtgtttaataacatcggcttgacaagtaactatgcatgtactagataacaaataatgcctcaatttggtacaagcatagtataagcatagacaaagtatctctataaaaacatacctcgtttcagcatccaaaagacggcggctcaaatatgtaatgatatattccttgccatcttcctcttgcgtcaaaacggcaccaatgactttgtcctcggaggcaacatataaccgaaaaggctttccggctttaggcgctcgcacaacgggtggagtagataaatacctcttcaactcttcaaacgtctctttttgttttgccccccaagtaaaatcggcttcttttttcaagcgaagtataggaacaaaagcatcgattttacccgctaggttagaaataaacctcctcaaataattcaccttacctagcaacttttggacctctttcttgcatgtcggcgctttgaaatcatgaattttttctatcttcttaggatcaatctcaactcctctctcatgcaccatgaatcctaagaacttccccgccgacacaccaaaagcacatttaagtgggttcatcttcaaaccataccggcgcatcctctcaaaagctaatctcaaatcggctatatggccttccataccatccgatttgacaacaatatcatcaatatagatctctaagataatacctagcaaatcatgaaagatcaaattcattgccctttgatacgttgcaccggcattcttcaacccaaaggtcatgacaacccactcaaataaaccaacaaaccccgggcacctaaaagccgtcttgtacatatcctcttccgccataaagatttgattgtagccgacattaccatctaaaaagctaatcaccttatgacccaaggcatcattaatcatcaggtcagctataggcataggatactcatctttaggagtggctttatttaaatatctaaaatctatgcaaactctaattttaccactccccttcttctccactgggactatgctagaaacccactccgcataacgacatggcctaataaaccccgcctttaataaccgatcaatctcctctttgactcggtcatataataaaggattaaaacgacgaagtggttgcttataaggcctaaaacccggtttaactggaagccgatgctcaacaagctcacggctaagacccggcatctcatggtactcccatgcaaagcaatcaacatactctttaagtagctcgattaccttaaccttataatcggctttcatgtttttctgtacaaaagtcggccttggtttagttccatcacctatatctacttcttccaatggatcggccgatgtaaacccttgtccaagcttctcaacttcatcaaaatcttcaacagtttcaccaatatcgttctttgtagaccgatattcttgcaccctcttttgtaaccactctaaactagcctctttactcattatacaaatttatatggcttagccgtgctacactagccggctttacagagataggtacaaatttgccatcggagatactaataaaatcataactagaaagatccctccccgataagcattggatattcccatgacgccactcaaacgtagcatcggccattgcaacttcggccgatgtatccgcttgaacaatttcaacatcatcgccgtcccattgaattaaacattgatgcaaggtagaaggcacacaacaatttgcatgaatccaacaacgacccaaaataacattgtagttaccttgcacatcgacgatgaagaaagcggttggtagcgtcttatttcccacggtgagctccgccgaaaaaatacccctcgcctccgttggttcaccattgaatccattgagaatcatgttggtcttcttcaactcatcaccctcacgccccaacttcttgaatagcgaatacggcatcaagttcacggcggcacctccatccactagcatcctagagaccggcttcccatcaacatggcctttgagatagagaggcttcatgtgacggtttgattcatcgggtttctcaaaaaccgcgtctttaggacctaataagaattgggcaacctcggcttcatccatagcacaaaactccatagacaacatacacaccatgttgatatccatgtcctcctttggagacgatttaccttcatcaacctattgtccttccttctcctcttcatcaatcggttttgccttctctatggatttaggcctccatactggtggtggtcgcaactcattgaaccttttatcccttttctcttcggcctttttctcccttaattcttgggcccgaagacgttgcaaccttctcttttgtgtagccgtcaaatccttaggcatccacctaggattcggctctgttccaggaggtaaataatgtcctttattaaccttgtttgaagacgatgaagcccttacatcggcttttgcaactctcccgtcaaaccggcgctggaaaccggtcagaccggcagcagaccgccggtcagaccggccatatgcgccggttagatcgacgttagacacacggtcagaccggcctgaggcgtcggtcagaccgtcgtcagatcggcggtcagaccggccagatggcccggtcggaccggcaacatggccgcggtcagaccggccagaaggcctggtcagaccggccgactgcgaggagctagaaccggcttcggactttttacttggggactttccaactccatcttcggaaggtataggcacatcatgggatcctatcttgatggtaatcacctccgaagtcctctcttctatcttgacgcgctttccttccctcttctcttcattaacccgatttttaccataaaatcggcttttgtttggtgaagataaacgctcatgaattggcctccgtggtcctccccatccttggttgaatctcattggcggcatatgattgtacattggcggcgttgccccccctggcataaagtaaggataaggataacccggcggcggcattggataaggaccccatgacatgtcttgtggatgaaaatatggaggtgaacatgaccgtcttggcgaatgaccaaatcgctccctaggaggtgatcttggtcttttccctttgttgtgatccctctcaccaccttgcctctcatacttttccaaaagcatatcaaaagtcactttggtctttctaggggccttagaagtcgaagcttcacccttattctccttccaaacgccaatctcctgcttctttggcaccatcatcttaggccttggctcaccaatgaccactttctttcccttggtagattcggcttgctccggccgaatcaacaccttcttattattgaaattaattgtattcaccggaaaaggatcatgatcaaacttcatcttggagccatcggtgaatttcaatcgtccctcatctatggccgattgaacctgtcgtcgaaacacattgcaatcattagtagagtgagaatgagaattatgccatttacaatatgctcgacgcttcttgagaaggtatgacatggcctttaggtaatctaatttgcttctcttgcaaaagataatcaaaatcttatcacacttagccacatcaaaactatatttaacctcactttgccgatctttacgaagagtcggcattaagttagaacaaacaaaaggtttatttttgttagtccatgaccattcggcaacataaatatcatgatcaccctcctcctcactatcactagcatcagagtaatcaactgcattaacattaggatttttgtctaatggtctagcaaattttttattatctttaacctggctttcttgagccagagccctttacataagttgactaacatcaagaaattgttggccatctagtttttctctaagaggagcaactaaaccattaaaagcaagaccggccaaatctctatcagttatattcaaagtataacatcggtttctaacatctctaaatctcttaatatagtcaacaacagattcattatacttttgcttaaccgatgttaaatcacataacctaagctcagtttctccagtatagaaataatcatgaaattgttcctctaattgagaccaagtatgaatagaatttgccggtaaagaagtaaaccatgtaaaagcattaccggataaagataaagaaaacaagcgcaatttaaaagtatcactattagcctcaccacattgcgctaaaaattgacctacatgttcccatgtggtcttaccatcttcaccactaaatttggaaaattcgggaactctataatttctaggaaacgacacattatcataataatcgggatatggctttttgtaagctctagcacgattcctagtttcgatcccgaatctattcctcataatatcactaatcatatcctccatgttattaggcccttgtggatttggtggtgggtttggtggcctaataggttgagtttgtgacgcaatatgattatattggccttgcctagtatcgggaggatatcccctagaaacatcattataaacgttagaaatatgtgggggaatttgaggattagtggtagcagtagatacaggaggatcaaatgttctaaagtgatacaaataactagcattagtcattggatcaattccctgtatcgggacgattgcgccggtctgaccggctcagggcccggtctgaccggcgtcatgttgcgcggtcggaccggcctgagggccggtctgaccggtgggataatacccggtctgaccggccatctggccggtcggaccaacggctgtgtcgctgtctgaccggccatcaggcccggtcggaccggccgtgaacgccgctccgtcggttttagaccctattggatctatgggagattgactaacagtggtataggctttatcttttaatgtgtaatcatccataagagaacctagcctattccttaaaaacccatcaaccttttccttaaacattacatctaatctatctttaaaattaaccatagatgaatctattgtagatgcaatttgttggttgatagattgcgatacctcgtcattacttaccatgtcgggagcgagtttgggacgtggcccgggcttgatgatcacgccttgacgagtcctagtagttgctctcatcaacg

SEQ ID NO: 7050 - DNA, 50626 bp, Oryza sativa
ccggcccaagagaggaaggggggggagaagacttttagggtttttcttttttataaaccttttcaactttgtttatttcttctcaattattatttgtgctctgaaaattccactaaaatttgagggctccttttagaccaaggagaatttaacaaaaattctccgggtcacatttgaatttttcttgtacgtattttaatgtttgccaatttcttttcgaattttaattaattctattattccttttagaagatgatttttattttgggatgaatttatcaggacgtgacaaatccaccccccttacaagaatctcgtccccgagattcgaggaggctagcaagaagataggttgggcggtcttctcttcttgtctgacttcttccgttgcgtcttgacgaacttccagcaaaactttaccactcggaactgcttggcttgacctcctgttgcggatggaatcttctcttcacctgacttggaccagggtgcaccttttggctgactcagactaggttgcggtagtgcagtgatgcttccgttccagaacttctcatgattcatatcttcggagtcaacctcggacaagttatcaacttcgtgtcatgcgtcgtaacctgcttgtcattactaggatactatgtttgtcatcataagaatatcatgcttgtcattcacttctaacttgccatcaactgtctcatattagctttcctggtctccgggtgatagctacttctgctatttgatgcaagggtcaaccactctaactataagttatgcttcccaagagaaccaatttatcccacttgacatactttgacgtcttcccaaatagctttactgctggatttgttattgtctaatcattatcccgccaaatctgaggcttcactgttacatgtgattttaaactgacctctgcagactatcttcgaacatatcacttggttcataactgggaatagctcccacgaacaagcaactcagattcactttctttatgttcagtttactttccgctattctcttcatgttgtcatcagttagcactcaacgtattcctttacacctttaaccttgatgagttctttcccgttggatcatctcccaggacgtggcgttgcctggtaaccggtgcttgcatttttcactccgtgtagcatctgataccgagtggaagatttcactctttgccttcatagaaacacttttacctaggtcatcttgcttactcaatgacaaggtgactgttgtgggggggggggggcaattactatcaggggtcttccgtgagcgatgcagagcatgtttctgtttatcaatcacctttcggcccacttctttcatgctagagaacatctttgccaatctctttttatcaatcttctttcggcttatgtctaacaggtggtattctttaatgtggattgcggacgcttctggggacgatgaggtcctttggcttgctgcctttcggtgaaaccttgatgtggttcgtcaaaaagctgtactgactaccttcagggaaatacattgcctgctatttgtatctataccactagggtttaattggcgatgatcatccttagtgcttcctcgagatggggagcatccaaattgttcttctgccacatcacctttgacccttttctgatacctgatcgactaattaccaaccatcgactactatgttctcaaacattgatgtctcctggatctttgtaactgtttgcaggtatatccgaacttatcaatgtagaggcatggcaggtacccttatgggtttcatccaacaatccttatcttgatctgtaaaaggcgtatcccaactcctatcctcaactactgtctcgttggctttttgacccaacacagtttaattggttttcttttccatcaacaggttggttattaactcgaggttggaacatagttcctctgaaatgagaccctaggtctcctatgtcagtaaacaattatacacatgatcacatatccgcatctttcaaacgaatcctcatggaacttgtctgtattacacatttctccctcattacatgaatacgaggcactaccttaaacaaaaagggacggtgcttaacatcggtacattgtattctcaatatgaatcatccataagcatagcaagctcactgtttatagacatgaatatatttatgtattacatggttgctgcaaactttcgattacaccatgataagtagcggactgaaaaccacaaacatggctgctcattttgattctggagagatatagctggcattgttccagtgactgcatccttgattggttctgtgatgatgtgataggactgcataatgctatcattcacaggagaaagcggatgacggtcttctgcttggtatcgccctccggaggttgattgctcttggctcggcctggagtaggtcggggagagacacaacttcttccatctacgacaattcttcgctgaggctgtcgatgcagagagtggttgctatggtttattgccgagtcaggtgcagcaggaggagcattggtgcattgtttctgctatgggttctgattaacacgaggccttacgggtacggcgtttgctccagtgaccacaatacgattggaatgtctgcttcgtgtaaattggcggtaatgtggaggtcgattttgccttggttggggacagtttttggaataatgcccttcttcactgcagttgtaacaaacaataactttcttacactcgggttcttcatcttgtacttgatttctcagctgctgtattggaacttccaaaggtacaacgcagatactggcccctgtcttgtcagctggtggctggggctgaaattgagcattgacaccttgtggtagtgcattcattggaattggagctgttgcaacgcgggctataggactgcttcgggatgcatggatgacaattcgttgaggagcaagcttctgattgcagggagttgcgtggactgacgtgccggcagctatgtttctcggttttgggcacttgtcggcgaaatgacccattccttgacaattgaagcaacagatgtcttcccggactcggcattttcttttctcatttcgattcctctgtcctggcactggagttaggctgaaacggtgatcttggcggggatttgtgttgccttgatgcttctctccgttggaactggcgggttggttggccatcttctttgtcagcagaaaactgaattgacaatcttttggtacatgatcagttccttcacaaaagaaacaagtgatcctgctcgttggacacctgtcgggtagatggtcttcctcacaatgaacgcatgtagaggcacacgagctggcaacatgaccgatttctccacaacgagggcatgccttaagttctacttcatcttcatcatctgaggagacttgatctgaatcttcactatcagacactctacctccattagctaaaagatgctctgtcaactgttgtgcacctcggaaggaatttcttctctgatgttttgtcattcctggtggaggccattccgtgctggtaatgatcatcttacggacttcatcttcggttcgcattggtgcttttcttttctgctgaggacagttccttgcgtagtgcccttgctcatcacacataaaacagatgatacttgcttcttttgggtcaacatgtggcatggcatgaggggccttctgggatgttggcggtgcgctgacttgtggtgtgagtgcttggactgcctccaactgtacttgaggttgcatctgactcgggttcaaaattggcatccgatgctgctgtagtatctctataagcaatttgttctggttaatcaggtgttggaccactgccacacaactggtgtctggtgcttcattcactcgggagcttgaggtaccaatgtcctgacttctgaccttattgcctttctcattgtcagccatctgttgcaaaggtttggagagggagagagggaaaacaaaggggagagacagattagaactaaggataggaccttaacagatctaagtcttttgctgttatgatgtatgttaggcttattctgcaagttgattaagcaaacaacctagcatggttacatcacaacccactgatgcaaaccacgcgctacacacacaagcaaggaacacacgactaacaacactaccctatagggtggcttaggttctacgacgggttctccaagatcttcactcctgcttcacagctggcttcactgcttcctttgcttcgctagcggatcctgcagtcttccggagcttcggcaaacaactgacgacatcttcttcttcgcaaagctgaccatctagtacttagttgaaatccgaagaaagaaaagagtaaaccttttgcaaatagcattaggggaaggagaaaaaggaactttcgcaaataatttttttatttataaaatatgtccttgggttttatccacttggcttatcctacagtcgagatggctctgataccagcttgtcgcgaccgggaaaattgccttttcccgaacgctagtgtattaatccccgtcccaggaaaagccggggtataccacacaaacatgatataaaagacacatctttattatatcgataatatttacattattacaaaggcacttaaggcctgacaatcaaaaataaacagcagcggactagcgggcctacggctccatcttcacaggcgctcaactggggtataagccaggactccacctaagacatcttctccaaagcttctcttactgaagaggggaaggattgagcaagaatgagtacaaccacagtactcagcaagccacaccggcagatgcatgattaatgcaagggggggtacaagggaataataataggggttaggttttgcagtaaacagcatttaaaagtcacttagttgcccaaagccattttgtaaagacgatcctagagctacacagtattattaaacaaggccgtgaaccctcacgagcctgccttaacccaaggcctacgatgatttggaccgaactggcaacccgacctgggtcccagctcgtcccaagccaacccaggccaaccattccatattttagttgttgagcaaattttaagaattaaaacactgacttgggtacattgctaggcttgcccatatccgagggctcggctattcgaatagatttactctgatcagaggtgtacatctttacccacaagacacatctttactccgcattccatggccttggaacccgtcgtaaagatgtgacatagtttccaacccatcctagccttagacaagagtaccgacccaatcctgcctacggccgggatacccgggacaggcaggcagaactgagcccctagcattgggcaccaaccctccgccgtatgacatctcgactaccgggccgcagctcgtgtagccttcatttgccctggagaatgtccatcgacgcccgacttcatccatctccaatccgtgtacttttgtttatgactagactgagccacaaactaagccttacccattagacatgtggaagtacggtagtgctttgcaatagaggcccgagctttagtccttatagtggccggggtgctacttcccacatctggcatgcacccaaaccccaccgaaaacaggttttaggggttttgaaagaggaagagaggtgtgtgtccaattccaacataagccaacaattccatagtgtccaaatgatatgagaattcccaaagtctaaagttataaaaccacctaaggttgcctaattattcagcgaagcatctacctaaatttatactagtggaaccatgaatagagtacccactagttggggtttttattttcctagggtgaacaaggtaataataacaatagcaataataatgtcataacaaaggtaaataggcatggctaaataaaacagtggtaacgcgggaatttaaacaaagcgataatgcaataatttaaatcaaaataattttataaactgggattcaatatgctcaagggtgatgtgacttgccttgctcgctttcccaaacgacggcttcaacttccacgaagagcggatcttccgaagctgcagcgtctacacgaccgacggaaaagaaaaggcttttactctactaaactccacataacagcagaaacaaagcacaaaaatgggttctttacttcttaaggaaaaattagagacttgaacggtccaattccgagttcaaatggccaagatatggccatttgaagtttatatgctctttaaatggatatttgcgaatttcttcatttaaattttaattaaaaactcatttattgcgtcagccgagggagcgggcgcgcggaccgggtccacgggaagtggggcccacgcgtcagccccacggtccacggtggaccgggcgcacgcggctggcggcggtcggcgccgtgggtcccgcgcgtcagccgcacccgcgggcgcgggcggatgacggccgggcccacctggcagccgcgagggcgcgcccgaaggcggcctcgccggcacggccgacgggagcggcgcgcccgcgccccgatggtcaccgccggcgaccaccggcgcggcggagcggcgcccgagagagcggagagaaggggggaaagcgaacggcggtcttcggctcaccccgggacaacgacgacgacgagaacggcggccggagtggaggaaagcggcggcgcggctcgggatgacgatgacgacggcgctccgacggtcggcgagcgaaacggaggcgcggacgaggtcgacggcgatgcggcgatgccgagggaggtggcgccgagccgggaggaagaccggagcgacgacggcggcgaaccagagcggaggaaggcgacggcgcggttcgggatgccgagggcgacggtgctccggcagtcggcggacgaagcggagcggcggacggggtcggcggcaacacggcgaagcggatggaggtgtcgccgagtcgggagggagaccggagcgacgtcggcggcgagccgaaggtcgacggcgacggcggagagagaggagcacggcgcgagcacgaatccgacggcgagagcgagcggcgagcggcggaaacggaagagcgaagcacggggagcaaatatatagcaacgggagggggagagcgcggccggggagagaggaaaccgcgcgcggagatctcgggcgccattgaagacgccggcgaacttcgcggggtgaatccggacgaatccgagggagagagagagggaaaagggggggaaacgggagagggaatcacgggggtgattttccccctctttaatgcgcgcggggacggcgggaaacggcgagattcgcggcggcggcggctctagggcacgggctggcggcggcgcggcgggaggaaggcgatgacaagtgggtcccacccgtcagcgagagtggcgggcgggcccgcctgtcagcggcgcgcgcgcgcgggggagctgatgggccgcggggagaggagagagagggagggagagttgggccgagccggcccaagagaggaaggggggggagaagacttttagggtttttcttttttataaaccttttcaactttgtttatttcttctcaattattatttgtgctctgaaaattccactaaaatttgagggctccttttagaccaaggagaatttaacaaaaattctccgggtcacatttgaatttttcttgtacgtattttaatgtttgccaatttcttttcgaattttaattaattctattattccttttagaagatgatttttattttgggatgaatttatcaggacgtgacatttatgtaaagaagaaaagtccagtttaaaaagggaagggtacatgtggtatccccttaagagataaaaggaccatgcccacgaagagaaggggggattttgattttcccgggagaggagagggctggttgatattttgtaacttgctcttacacagatccaccaaaaacacaggagtagggtattacgcttcccagcggcccgaacctgtatacatcgtctgtgtctcgcgtttcttccgggcacgcgatctttccacatacagagagagcttgagatctcaccctaagcccccggccgaactggcaaaggggggcctgcgcggtctcccggtgaggagccacgagctccgtcatctggcgcgccaggtagggggctcagcgtgtgttttctgagctctcatactcttccgtgtgcgccaagtttttcttgttcagcctaatggccgagcaagcaaaggtgcacgacctctctccgagtgtgagcggcgacgacggggagccaaacccacgccgtcgagctcgtactcccccacctcctccacaccaaaatcctaagcagggggaggcactcgagagagtcgaaaaatccgcagcatcgccagtcgcgggtggtgcaggagaacggcgagatggggagcgtcgcctcctcgtctacggtgacggcagcacgcctcagggcgcgcttcaggctgttggcgcgctcctacgtcacccgcctgtcgtccctgacccggagtctccagcccagcgatggctggacgacgtggccaacttggtcatgacggcacagcagcgcctgggtgctggtggacggtccgccaccaccaagacctccggcgccgccactaccggttccgcgtcgtcgagacggagggcgcggcgagcggcggctgttgcacgccattcggctgccactccctcgtcggcacctccgactcgggaggatcggcatggagagccggatgcccgcctcgacatcgagcgtcggcgtaatagccggcgtactccccgcgcaacggagggcgcctcttcgtccagagtgtcacctcgacagggacgtgaggaccagccctccatgcccccggctggtggtgtcggctgtagagcctttgtggcgagtcttcggaatgtccgttggcccccaaggttccggcccaccatcaccgagaagtatgacgggagtgtcaaccccaccgagtttctccaggtctatacgaccgggattgaggccgctgggggtgacgacagagtcatggcgaatttctttcccatggccctgaagggacaggcgcggggttggctaatgaacctgccgcccgcgtcggtccactcctgggaggatttgtgccagcagttcaccatgaactttcaaggcacttatccacgcccaggtgaagaagcggacttgcacgcagtacagcgaggggatgatgaatcacttcgctcgtacattcagcgtttctgccaagtccgcaatactataccttgcatccctgcacacgcggtgatctacgcgttcagggggggtgtgcggcacaaccgcatgctcgaaaagattgcctccaaagagccccagactaccgcagagctttttcagctcgcggaccgagtggctcgtaaggaggaggcctggacctggaacccctccggttccggtgtggcagcttcggccgcccccggatccgccgctcagacagggcggcgtgacaggaggaggaagaaaaggtcggtccattccggcgacgagggtcacgtcctcgccgtcgagggcgttccgcgggccacccgaaaggggaggcctgcgagcgacaaaaagaaagaggctggtactcccagcagggagcgcccagccagcaagtggtgctccgtccacaacacctccctccacgatctcgcggattgtcgcgcagtcaaaaacttggctgagcgaacgaggaagtgggaggaggacaggaggcaggaacgccgtgagggcaagtccgcggcagttccctccggtaaacggcgaagtgaggccaaacagaaggcccccgccgttgacatcgatgacggtgatgatgacctaggtttccaagaacctggggccaccattgccactgtcgatgggggagcgtgtgctcacgtttctcaccggagtttcaaggccatgaggcgagagcttctcgccgcggcccctactcatgaggcgacacgtcgggcgcggtggtcggaggtggccctcacctttgaccagaccgaccacccaccgtgcgttgcccggggagggcagattgcgatggtggtttcccccaccatctgcaatgtgaagttggggcgtgtcctcatagatggaggagcggctctcaacatcctttcccccgcggcctttgatgctatcaaggccccggggatggtgctccagccgtctcaaccgatcatcggtgtgacgccggggcacacatggccgttaggtcacatcgacctaccggtcacctttggtggatcagccaacttccgcacggagcgggtgaacttcgatgtggcggacctcagtctgccctacaacgcggtcctggggaggcccgcgttggtgaagtttatggcggcggtccactacgcctacctccagatgaagatgccgggccccggtggccccatctctatccgtggcgaccttaaagtcgcgctcgcttgcatggagcagcgcgcggaccacctcgctgctgcgaccaagcccgagggtggtgacgagaggcttggcacctccgcccccaccgccccgaggcagcggattgccacatgcgacgaggtcccggtcaaggaggttgccttgggcgacggcccatccaagaccacacggatcggtggtcttctggatggcaaataggaagacgcgctcgtctccttcctgcgggcaaacactgacgtcttcgcatggagaccagcggacatgcccggggtccccagggaggtgattgagcaccgtctcgccgtgcggccgggcgcaaggccggtccggcagaaagtgcggcggcaggccccggaacgtcaagccttcatccgcgaggaggtggcgagacttctggaggccggattcatccgtgaagtcatccatccggagtggctggcgaacccggtggtcgttcccaaggcgaacggcaagcttcggatgtgcatcgactacaccgaccttaacaaggcatgtcctaaggatccttaccccctgcctcgcatagatcagatcgtcgactccactgcggggtgcgaccttttgtgttttctagatgcatactctggttaccatcagattcgcatggctagggaggatgaggaaaaaactgcgttcattacccccgtaggaacctattgttatacatcaatgcccttcgggttaaagaatgcaggtcctacttttcaacgtactactcgaatttctttgggtagccaaataggacgtaatgttgaggcttatgtcgatgacttggttgtaaaaacgcgcaaccaagaaactttactttcagatctagcggaaacttttgagaacctccgctccgcccgcataaagctgaaccccgataagtgtgtgtttggtgtacctgcgggcaagcttctcgggttcttggtctctgcccgaggcattgaggccaaccccgagaagattcgagctatcgagcggatgcgcccccccagcaaacttagggatgtgcaatgcgtcaccggttgcatggccgccctaagtcgtttcatatcaaggctgggagagaaggcgctacccttgtttaagctcctcaagcgctcggggccgtttacttggacggaggaagctgaacatgccctcactcagttaaaggcatatctcagctctcccccggttctagtcgccccggagccaaatgagcccctgctactttacttagcggcgaccccccaagtagttagtgcagcgttggttgtggagcgcgatgaaaacaatcctcatttcgtgcacccccattctgtgctaacttggcccgggagcgagcggggaggagaggcccccgagtcggacggtggcctacggcccctgacgaccggagtcggccctctgcccgcttgtcagacggtgctaggtgcccccgaccctcaggagggccccaaggccactgcgggaaggccgcacttaacgccctttgaccccgaggctaaccctgtgctgactcgacccgggaaagagcagggagaagaggcccccgagccgaacggaggccagaggcccctgacgaccggagttggccctttgcctgcttgtccgacgatgccaggagcccccgacccccaggacggccccgaggccactgagggaaggccgcccctttcatcctccgaccccgaggtcatcggcacagaagacaagtgcgccccgaaaggccacttgaatgaagaacgccccggggatacggcccctagcaaagaggatcggccccaccgaagggtgcagcggcctgtctactttgttagtgaggccctccgggacgctaagacccgataccctcaggcccagaagatgctttacgctattctgatggcctcgaggaaactgcgccattattttcaggcacatagggtcactgtggttacgtcttatcccctcggtcaaatcttgtataatcgagagggtacaggacgggtggtaaaatgggcaatcgagctttctgagttcgatctgcactttgaaccacgccacgctatcaagagccagaccctcgccgattttgtggcagagtggaccccggctccagagaccgtctcaatccccgaggccagcacgaactcctcgcagctgcctcacaccacccactgggtgatgcagttcgatggttctctgtccctccagggtgccggtgcgggggtcactttgacctccccgaccggagacgtccttagatatctagtccgcctcgactttcgagcgaccaataatatggcagagtacgagggactccttgccggactcagggtggcagccggactggggatccgccgtctcctggtgttaggcgattcccagctggtcgttaaccaggtctgtaaggagtaccggtgctctgacccgcaaatggacgcctatgtacaccaagtgcggcgtatggagcgccattttgacgggatagagcttcggcatgtgcccagacgggataacatgatagccgacgaactctcacggctcgcgtcctcgcgagcccagaccccaccgggcgcctttgaagaaaggcttacccagccgtcggcgcgacccgaccccttaggggagacggatgcgcctgaccggcccccgaggcccgtcggagtcctggcctcgggacccgaagggagcgctccaagctcccttagattgattgcttggatctctgagatccaaacatacctcacagataagactctacctgaggaccgcgaagggagtgaacgcgtacaacgcatttccaaacgctacgtgctggtagaagggaccctctatcggcgcgcggctaacggaatcctcctgaagtgcattcctcaggaacaaggcgttgagcttcttgctgacatccatgagggcgagtgcggagcccattccgcctcgcgcaccctggttggcaaggcctttcgtcaaggattttattggccgacagctctcaatgatgcagtcgatctggtccggcgatgcagagcgtgtcagttccacgccaagcaaatccatcagccggcccaggccctgcagatcataccactgtcatggccatttgctgtctggggacttgatatcctgggaccgttcaaacgggccccgggcgggtttgagtatctgtatgttgcgatcgacaagttcactaagtggcccgaggcttatccggttgtcaagatcgataagcactctgctcttaaattcattaagggcatcacggcccgttttggagtgcctaaccgtattattacggataatggcacccaattcactagtgaactcttcggcgactactgcgaagacatgggcatcaagctctgcttcgcctcacctgcccaccccagaagcaatggccaagtggagcgcgccaatgcagaaatcctcaaaggccttaaaaccaagaccttcaatattctcaagaagcacggcgattcatggatcgaggagttaccagcggtgctctgggcaaaccgaaccacaccaagccgagcgaccggggaaacgcctttcttcctcgtctacggcgcagaagcggttctcccatccgagctcaccctgaggtctcctcgggccaccatgtactgtgaggctgatcaagatcagcttcgtagagatgacctcgactacttggaagagcgaaggcggcgcgcggccctccgagccgcgcgctaccagcagagcctgcggcgctaccatcagcgccacgtccgggcccgatcactctgcgtcgacgacctcgtcctacgccgcgtccaaacgcgtgctggactgagcaagctctcaccaatgtgggagggtccgtatcgagtgatcggtgtcccccggccgggctccgtacggctggccacgggcgacggcactgagctgccaaacccgtggaacatcgaacaccttcgtcgcttctacccctgaggggggggtcgggtgtcaggtttcgggctcgggctaaccccgcacccccctcgggtgtgcagggttagccgggggctaccacacatgcacagccttacttttcttatttcagcatttcaataaaagcagtttcaatttcctaaaggttgtgtctgtgccgtttttccttctgaagaatcttaacttgaaataaggtcactcgtgctcaaccttgccctcgggggctcggttcggtcagctaaaatcgccaagcggggcccagaaccgagccatgccccggggcgtggtgaactccgggggggaatcggcaaaaacccacaatcgggtcacccataaccctcggtcaccatgttcccggcctggccagtctcgacatgtggatctccccaggcactagccccgacccgagccatttgaggatcgggacttgagcacgagcccttaaatcaagctaaaatgcaaaaggaccacggcacaaatcatcctcaactcatatgcatagcaaaataaagttaacatagaaatttttcatcatttttgattgcagattaagttgatctatacaaaaagaagaaagaaaatgaaaaagttggagattggcgggggcctgggggctcattccaatgcgcccgggtcgccggcctcgtcgccaccgtcgtcctcaccgctggcgtcgccctcctcgtcggagctgagggcgaacgcgagccgaggggccgacccctcgaagctttggacgatatggttggcggcatcccggacccgcgcgcgcgcatcgtcctcggtcccgggagggaactcctccagcgccatccatggggagaagccggggtccctggcctggtaactcgctaacacgagttccaccgctccttgggcgaggtccctcgaggatgacttgatggtcttctcgagctcctcggggagttgttggacagcccaggccatcctcctaaggtgcggggcgaggccttccagattggtagagcgcgaaattgtctggcctttccagaggcccgcttcccgaccggcgcgatccagccgggagactgcatcccaaagcatgccgggccctatctcacccgacaagcggagggcctcggcttccccggtggatgagtccagggcgcgctgcatgtccgcgacggtgtgttcggcagctgcgaggcgggcgactaagtcgctttcgcccgtagccgccccgccgctgcgctccctcgcgtccagctccttttctcgcgcctcgaggttagcagcccgctgctccagcgcggctctctcggcgcggatgcattccagattgcggcgcgcctgctcctcctgcgctgccttgcggagggacaggctgtccgccagccgttgtgtcgcggcctcggactcctcaagagctcgctcccgctcagcaagcgcgtcctcgcggagccggagcgcggactcctcttcggcgcaggcggcctcgtgcgccgccagcgtcgcctcccggatagcggcggcggcctcgcggtccgccaagctgatctccacggcgccggcatgatcttccagcgccatggcacgggcttcaagggcctcttcgcgccgtcgggatgccgcttcagcctccgttgctcgctgctctcgggcagcggcggcgtcaaggaccccctgggcggcgtcgagctttttctttagctcccgtgttgaaggcggagggagtcctgcgcctcaatcatcgcggtggtggcgatgagggcggcctctcgctcctcctccacctctcgggcgatctccgccagcgccgccttgcgggcttcaagctccgagatgtggcggcggtgagccttacggcccacctccaccatggcgtccaccgagcgccgcccctcctcgacgcgcgcccatgcggcctcgagctccgctcgttccgctcgcaaggcctccacctgggcgctgaatccatctagcaccgcggtgtttgcggcggccaaggcttgcagaaggggctcggcactcagcggggcggcagaagacgaggagaagagccgccttggagaaaatgcgacgcggctcggcccgccagaagacgcactgagctcggggatgtcccccggacccgtttggtcctgggcgtcgcccgagggagcgggcccaggcgatgcgcccgcggccttgtcgcgagccgccccggaggttgtcgcctgagcgtcacccgagggagtgggcccgagcgacgcgccggcggtcttgtcgtgaaccgcctcggaagacgccatcgcctcagcctggcgagcccgggcggtttcctcccgagtggcttcttcagcctgacgagcccgggcggcctcctcccgagcagcttcttcggcttggcgagcccgggcggcctcctcctgagcggtatcctccgcctgccgaacccgagcggcctcccgggcggcctcttcagcttcccgaaggcgatctgcggcctctcgccggtcagattctcgcctccgttcctctgcggccgccggatcttcggcctcggattggccggacttgggatggcgggaggaacgcgacgggacatcgctgaagcagaagaaaaaaccggaagacaaacaaggtggataagagaaaacttgctgattgggataaagggaagatggttgtgaaaggcgtgaaacgaacctgcgagggggtcggttgaacgaccaccttggaggggaaatcaggtttccccgggatggttccgtctcccccgtcttgcggagccgcttcttcttgcgctccgtctcgggctgtgatgtcggcgcggccccctccgggcgcctgcggctggcacgcaccgccccgtcccctcggggaggagatgggggaggtgttcctccctgtttcctcttcccccgggcgtcggcagggcggttgctccccgagcccccgtcgcggggcccagaagcacggccccctcctggggttgattcttcctggcggctcccgccggcgccgtcgtggcccttaggagccacctcctctgaggccccgacccccatcatgatggtcagaatggaggcgcggtctggatcgcagcagagggggaggagtccttgaggaataagagacgcctccatggagctgagattcagcaccctttggaccacgatcttgaagtcatcgggagcccaatcccatctgactccccggtgggtcctcatgtagtcctcggacccggtgtactcccatgcgctccgggcgcgccgctgaagcggcgcaatccggcgacggaggtagtcgccgtacaccatggcccctgtgagcccctgagatcgcaggcccgccaggcggtcgaggacggcgtcatagtcatcccccagatccactggcgcccgccagctggagaccggcgccgggggctggcttgggagtcggaggcgcgcttcgttggcaaggggggtgtagaaccagtcgctcttccaatcgtcccacttcttgcggagggcgcaggggatgtagcggttcaacactggcccccgcggctggaagtagcaaccaccgaccaccgacggcggcgacaccgactgcacggtgaagaaccaccggaacagccgaagagatgggcgcaccccaatgaacatctcgcacaggtgcgcgaagatggccaaagtcatcactgcgttgggggtgaggtgcgccatctggagatcgtagaactccagaacatccataaagaaagaagaaaaaggaggaaccaacccggccattgcgaaggggaggaagaagatggaccgccccgggtaatctggtgctgggcgcgcctcgcccagcatcactatctcccggccggtggcggattccggcatgaagcgacgcggcagcccagcctgcctctcgcccacaatgcgggaaggcggtagtacgctaccgtcgagcagagcggagccccgtgccatgtcgtcggagaaagagagggttgagaacgagcgtgtgtggcgaaggtgaggcgcagcaaagagagagtttagggcgcaaacggcgaaggaaaggggaatagtggcgaaaggaagggagcaagtcctttcctcgatggctttatacccttcccatcgctgagcccggctcctcgtttctcgtgcccactatctcgctccctcgttactcgctatctcgctccctcgtttctcgcgcccacgcttccactaattccattcgcccgcttgcggcgcatgaggtggatatgcggttgtggcagtcgagatagatcgtatcgtgtgcgcgttaattacgatcgccgaccgaagcgacgttaccatatctccagacgaaacgaatctgcacgcccagattcgagcgctgctcaagtgatgtggcagtcttgaagagaccgcccatgactgacggccaagacaccattaccgatatgcgtggtttgagaccgttgggtttctgcccaatcacggagaccggtcccacctgtcaccaggctttatgagtggcgtcatgcccgaccgcttcccttgagaaggatgatcgccctgacataacgccgggggctactgtcggtgatatgggaccgggagtattgcgcccggaggcttgaggcagatggaatcgcccacgtggcctggcaccttcggggacgtcgggcccgagggtgaggtgtccgccctcctcctgatttccccgagggggggtcgggttgctcctgccccggccccgagggccgaggtgccccgaccccttgtggggtttgcactatgtacataggttgggtgaacacggtagggctcacctaaccgcatttattgcggtctggtcaagcgtgtcacgctgcatgcagcgcaatgcagcgcgctcttttatccggtctgtgaccagtcacagaccggtcagatcaacggttaggtggcgactggcggtctgacgcacgcctcgccccgtcccgtcaagacgagagcctctaggcactcgtccccagctggagctagcgtgatacatcccagagatggcacgttagccccgatcgatatatgccaggcttcatcctaaccattacaggcaagatgttgtgtgaagaagggcaaacatgcacgttgctaagctgacacgcggtggacaagaatgaccgattggtgaccggtctgacactgctcatgtcgtcagcgcacagccacgttcccacgacgcgcctgcccccggcagaagtggaggtaggtatgtgccgtcccatcagaaggacgttcggagggcaaccgtgcaaatctccgtccatttatgtaaagaagaaaagtccagtttaaaaagggaagggtacatgtggtatccccttaagagataaaaggaggaccatgcccacgaagagaaggggggattttgattttcccgggagaggagagggctggttgatattttgtaacttgctcttacacagatccaccaaaaacacaggagtagggtattacgcttcccagcggcccgaacctgtatacatcgtctgtgtctcgcgtttcttccgggcacgcgatctttccacatacagagagagcttgagatctcaccctaagcccccggccgaactggcaaaggggggtctgcgcggtctcccggtgaggagccacgagctccgtgactgtcatacacacattacgtctcggagtccgtgctgcagctgctcttttctctcttccttttatctctttaaaatatatttatagttggcttatagtctgctattgtatccgctcttactgctcttagtaccagtactaataatgtgagagacggaggtgggagagacggaggtggtgtgaggaacttgagaagacgatacatgtggcatcgggcttggtagattcgaccggatctttgccgaccgtcagcgccaccattgaagacacagtagcaataagagcaagtttaatagtatagcccactactaactttaaatcatttataaccaatacaatagccaattcatacaatagttacttattatactattaatatctggtctcacatgtcatacacacgttacgtcttgaagtttgtgctgcccgctgctcttctctctttttttatctttttaaaatatgtttatagctgactagtttgctaacctgctctaacagatgcgccatggcggtacgggcgacggcgaggcttggtcacgcactctcgcatatgtcaggaggaaacgacagcttacccatctgtagacggaggcgaaaagcggcggcggacgcaaaccgccgcattaaccggagctctcgccgggaagagtggtgggggacaaggatcggaggaaggagaaagggatgtttttcttttcttttcttttgttttttttgagagagagagagagagggagaaggggatgatgattgctgggccacaggttaggatggcccatctaaggccttgcttcgatggcccacctaatcccccgcggcacatgaacgatagattgatcggacggttcacatgtggcccaattcacgagcaaatataaggaaaaagtacacccaaggtccttcactttgtcgtcgagatacaaaatcgtcctcaaaccgcaaaaccagataccggacgtccctcaactaataaaaccattcgctttagatccctcggtggttttgaccccgattttagcctacgtggcggctgagtcagcgtggaacctacgtggaccccacatgtcagcgtgtcacgtcaactctctcttttattgcagtagcagcaacagcaagcagcagctaatctcgccggaagaaaaaccaaagccagaggcgacacgggagtcgtcgtgcttcggcgacagctcggtcggcatcgccgccgccgccgccggtgactctgggcgcggcggcgcgctggatcgcaagctgcaggcggtgaccacggcggtgtacggtgcctcgttgcactccgggaaggagctcctcatccgggtcacgtggacgccgaacgctgccggagccaccggcctcgccgtcgccttcgacgacgcgctctctccgtcgtcgaggtgcgcccaccatgtgctgcacaagaagcgcgggagcaggtcctcgctaccaccaccggcacggctgtgggcgtccactagaacaccgccgaggccacgtacgcgttggattcgtcgtcccctgagcccaccggcgaggcggcgactactacctcatcgtcgttgctgacaccgaggtcacgctgctcctcggcaaggggtggcttctgttaaatatgtgatccgaattttgggcccacaatatattcggattagtttcctaataagagtcctattaggtgtctttctattatcccttatatatactcttgtaagccgtacgggaatgggtgacgttcccaatgtgattcccctacgtttgtaatcatctcctctatagtgatcattgccggtcggcgcccgtggtttttttccgcaagggatttccacgtaaaattcgtgtctccgttgtgcatctattttcataacaagtggtatcagagcattggagatcgatctactgcagtcccggccaccggcgattttttccgatcgaagaaatcgatctaatcggcggtacgcgtcgtcgtattcgttgttccgtcgaaattctgttcggcgaaatccaatccaaagcggagtcgccatcaactccgagtcgacgtcgtccttcctgccgtgcgcgtgtcagaggagcagcgcaggcgcagcagaagccatcggcagcaagcagccgagcggcacaggaaaatccatccatcacaaagcgcacgcataccgagggaaattagggcagcagccgcctgttggccctgttcacatgaagtccaaactcacgttgaatttctacgcgcacacagccaatctaccaggagatttacagtacttcgcttggtgcacacaggaggtgtaccatagttcgtgtttttttctagtttaccctaatttcttactagcaaatttcaggattaattcccatggcgagtttgaagtatgatctaccgctcctggaccgagacacaagattctcactttggcaagtgaagatgcgagccgttcttgcacaacaagacctcgatgatgcgctttctggatttgataagaggacacaggattggtctgttgatgagaagaaaaaggatcataaggttatgtcatatattcatcttcatctatctaacaatattttgcaggaggtgcttaaggaggagacagccgttgggctgtggttgaaattgaaacagatatgcatgactaaggatctgaccagtaagatgcacctgaagcaaaagttatttttgcacaagttgcaagatgatgagtctgtgatggaccatctctccgctttcaaggaaattgttgctgaccttgagtctatggaggtaaagcatgatgaagaggatttaggccttattttattgtgttcattgcctagctcatatgcaaacttcagggatactattctttatagtcgtgatactctaactttgaaagaagtttatgatgctttgcatgccaaagaaaagatgaagaagatggtaccctctgaaggttcaaattcacaagcagaaagcttggttgtcggggtaggcaacaggagaagaacacaaacaacaaatcaagagataaaagctcaagtagctaccgtgggagatcaaagtccagaggcaggtataagtcatgcaaatactgcaagagagatggacatgatatcttcgagtgttggaagctacaggacaaagacaagagaaccggaaaatatataccaaaaggtaagaaagaagaggaaggtaaagccgcagttgttactgatgagaagtctgatgcagaattgcttgttgcttatgttggttgtgcacaaactagtgaccagtggattcttgatactgcatgcacctatcacatgtgcccgaatagggattggtttgccacctatgaaactgtgcaaggtggtactgttttgatgggtgatgatacaccatgcgaggttgcaggtattggaacagttcagatcaagatgtttgatggttgtatcagaacattgtcagatgtgcggcatattccaaatttgaagagaagtctcatctctttttgtactcttgatcgcaaagggtacaaatattccggtggagacggaattttgaaggtaactaaaggctctcttgttgtgatgaaagctgatattaaatctgccaacctgtaccatctgcgaggtacaactatattaggtaatgttgctgcagtttctgattcattatctaattccgatgctactaatctttggcatatgcgtcttgggcatatgagtgaaattggtttggcagaattgagcaagcgaggattgctatatggacaaagcatcgggaagctcaaattttgtgagcattgcatctttggcaagcataagagggtgaagttcaacacatctacacataccactgaaggtattcttgattatgtgcattctgatttatgggggcctgctcgtaagacatcctttggaggtgctcgttacataatgactatcgttgatgattattcgcgaaaagtttggccttatttcttgaagcacaaatatcaagcttttgatgtgtttaaagagtggaaaactatggttgaaagacaaactgaaagaaaggtgaaaatccttcgtactgacaatgggatggagttctgttctaagatatttaaatcatattgcaagtctgaaggcattgtgcgtcactacaccattcctcacacacctcaacaaaacggcgtagctgagcgtatgaacaggacaattatatcaaaggcccgttgtatgttgtctaatgcaggtttgcctaaacagttttgggcggaagctgtttccactgcttgttatcttatcaatcgatcacccagttatgccattgataagaagactccaattgaggtatggtctggttccccagtaaattattcagacttaagagtatttggttgtactgcttatgctcctgttgataatggtaaattggagcctagagctattaagtgcatttttcttggttatccgtctagtgtgaaaggctataagttatggtgtcctgaaaccaaaaaggttgtgattagtagaaatgttgtcttccatgaataagttatgttacatgacaaaccttctactaatgttcctgttgagagtcaggagaaagcaagtgtgcaggtggagcacttgatcagtttagggcatgcaccagaaaaagaagatgttgctattaaccaagatgcacctgttattgaatattcagattcttctactgttcagcagtctccaaaatgttctattgcaaaagataagcccaaaagaaatattaaacctcctcgaagatatattgaagaagcgaacatagttgcttatgctttgagtgtgacagaagaaattgaaggtaatgccgaaccttctacatattctgaggctattgtttctgatgattgcaatagatggataactgctatgcatgatgagatggagtcacttgaaaagaatcatacttgggaattggtgaagttgccaaaggagaagaaacctatccgttgcaagtagatcttcaaaagaaaggaaggtatgtctccaagtgatgaggcaaggtacaaagcaaggttagttgctaaaggttatagccagattccaggtattgatttcaatgatgtcttttcccctattgtgaagcatagttcaattcgcactttacttagtattgttgcaatgcatgatgatgaactagagcaaatggatgttaagactgcatttttacatggggagttaggagaggacattaatatggagcaacctgaaggtttttttgttcctggaaaagagaacctagtctgtaggttgaagaaatctctttatgggttgaagcagtcacccagacagtggtataagagatttgactctttcatgctttctcagaagtttagaagatccaattatgatagctgtgtttatcttaaagttgttgatggttcagctatatatttgcttctttatgtcgatgatatgttgattgctgcaaaagataaatcagagatagaaaagttgaaggcacaattgagtagtgaatttgagatgaaggatttgggtgcagcgaagaaaattctcggtatggaaattactagagaaagacattctggcaagttatatcttagtcagaaaggttatattgaaaaagttcatcatcgtttcaatatgcatgatgcaaaaccagtgagtactcctttagctgcacatttcagattatcttcagatttatgtccacagtcagattatgatattgagtacatgtttagagttccttattcaagttcagttggttcacttatgtatgccatggtatgttctcgtcctgacttatcacatgcattaagtgttgtcagtagatacatggctaatcctggcaaagagcattggaaagctgttcaatggattttcagatacctacgtggtacatctagtacttgtttgcagtttgggagatctagagatggacttgttggttatgtggattcagattttgctggagatttggataggagaaaatcgctcacaggttatgttttcactattggaggatgtgctattagttggaaggcaagtttgcaagcaacgtttgccttatctactactgaagcagagtaatggctatttctgaagcttgtaaagaagctatttggcttagaggtttgtacactgagctttgtggagttacgtcttgcattaatagattttgttccatgagagaacaaagcacattgatgtgagatatcactttattcgatgtgtgattgctgaaggtgatgtcaaagtatgcaagataagtactcatgataacccagctgatatgatgacaaagccagttcctgctactaagtttgagctttgctcaagcttggtgggtgttacagtatagtcctagagactatttggcgcgcggtgattttacctacatgaggtattttttggtgattgatgtttttatgcaacaagaggaaattcgtctcaaggtggagattgttaaatatgtgatccgaattttgggcccacaatatattcggattagtttcctagtatgagtcctattaggtgtctttctattatcccttatatatactcttgtaagccgtacgggaaggagtgacgtttccattgtgattcccctacgtttgtaatcatctcctctatagtgatcattgccggtcggcgtccgtggttttttcccgcaagggttttccacgtaaaatttatgtctccgttgtgcatctattttcataacagcttcttcctgcatgtgcaatgtgttactaacaaaaaagttcagcttctctaattcgagttggtgattttattacagtgtaaatcatggtgtacatgaaagatataagtatgtctccagcctgacattgtatgaacttgggtaaatgcatgctgatgtgagcgttttctggttatctgaatcgcaatcaaatggcatagatagatactgaacatggttacatggaaaaatgatgcttacattgcctccagatagcttcactcagatcaagcagaaacgctttgcattctctgcaacgatgctatcaagtaatgactcgcatgcgttttccagcagatccagcaccagaaaaacattgtgcaacgatagctgtcccctccctccccgccgcctgccttctctttccccaccgccgccgctgccctctcgcgcgccggccgccgcctgccttctctttccccgtcgccgcctgcactatgacgcccgggcgacggactggttggtggggatggcggcgagggacggcacggcgctgaagccggtgctgagcgggttgtcgatgaagccggtgccgagcggtgagcgactccgagaggcgcgcgccaccgccgagcgcgccctcgccgccgccgagcgcggagggcgacgaccccgcggcggtcgacgtcaacctcgtccttgccttcctcgccgcccgagacggggacttaaacgacgtgagacggcctcgcctccgcctccgcgcccaacaccacggcgcccgcccgcgcggggccgcttcgccaatggcggcgacgcagcgtcaccgacgccattcgcgaccggctgccgccgccgcctcgcccggtggcttgctcctcagccgcccgccggcttgcccaaagaagtgaagagaaaagaagagagagagagagagggagaagggaaaggaggggaaagagggggaggcttacgtggccaggctggcatgtggagcccgtgtgggtcccacgctgactcagccgccacgtaggccaaaaccggggtcaaaaccaccgaaggatccattatgaccggttttgattagttaagggactccgaatatctggttttgtgattaggggacgttttttaactcggtgacaagttgagggaccttcggtgtactttttccgcaaatataatgctccaacttgatgactaataacacactagcaccagcagctagttgcttatttatagtagtatttcatacacggaaaaaattttaagcattagtaaatatcaattgttggatcgatgaatatggaataataacaaccattatttatgaacgctaattgctagctagattcatcattgtcatcacagcctagctactggctaattcagatattccatcgtcctcttctgaaattgcagtaagctcggaggagtgaaagtaagaatccatgacttgtggaggtggcatgccattgccaatgccatccccatcgcagaaaaatggtctcggaggcacttgcagcgcatccacacccccttcgagcatctctattgcctcgctcatcgtcaggcgatcgtgtgatttcatctgaatgcaccacagcccaacaaggcatagcttcctctccagctcatgcatgtcagcaacattggatatctcatcaacttgttgatctgctatcagctggtcatacacccatgctgggtagtatgccctgcttgcatttgagtttgcatttggatctgcattccttctacctccagccatctcaagcaacaacattccaaagctataaacatcggatttgtcagatataacgccaaagctccgggataccatctcaggagccatataacctactgttccccgtaaagccctatctgacacaaagctcttctcccttgggtacagttttgcgaggccgaaatcagcaacctttggaacaaagttatcatcaagaaggatgttgtctggcttgatatcaaagtgtagaatctgcatctcgcacccctgatgcaggtagttgatccctctagcaatgcccagagcaatctcattgagcttgtcccaagagaagcttctctcggatgagaagatatacttgtttagagatcctctaggcatgtattcgtaaaccaaggcccttctcatttcttcggagcagaaccccacaagacgcaccacgttgatgtgatggatcctgcctatggtggcaacttcactaatgaagtcttctccattgcaattggagttgccatccaacatcttgatggcgacatgaacatcacccgggagaaacacacccttgtacacagacccatatcctccttggcccagcttgtctctgaaatggcttgtgattgctatgatgtccgtgtaggcgtacctcttggggcctagcatatcttgcatccgaaggaacttttcgactgcatcaattgcaatccttgttttccagtacttgcgagtaagaaaaatcatcacgaccaacggtgcgaacacaaacctgcatagcactgaatacgaaaaggctaatgaattttgcaatgcaatatgtggtgtgaccagctctgatactgtatactgtagaattgagtggaacaaaaatgcaaaagttaattaccagcaatccacttgacaagacacaaggtgtatattatgaagagcttatggtaaagagaatgatcaacgccgcggatcatgtcgctgatggaaagacgcatgtcgaggtaataccgtctggatatgcctatcatgcatccccagaaacggaggtcaatagaaaggatgtcaatgatccggtctttgatgcctactctgggtaatggattgtcatggctatcagctaagctgcaagatcatttattggaaagagttaattaaacgggattggaggagaagagctaaacaaaatcggcccttttcagatgataaagtaaaggtttcgagattataaggaattaaggcgctcacctaacagactcgttgaggcaatctttgatgagaccataccaagtagtccaaggtcctccatatgtaggaaatttgacggcaaatccacccctcatggattttacaacatcttcatattcggacagattaatgctgttaccgttactgccaccgccgataggagtcatggccaagtatccacaagaaggttcgatgtcttggatagatggtgctccaaacgatgggagcatataataaacgtaggacgaagtcgtggtcaggcaattcatgggctggtatttgctactactgttcgtaattagttcctgcgaacaattgacaaagccgacccaagtaatcatatcatcaaggcccaagtcccagctgtcgtgtgatcctgggatacccagaccaacgtaaggcagctggtccgagcgaggaagagggcagctgctgtttgcatcatcctgcaggttggcgtcgacgacccaaaagatggaagcagtgtagtcgatgctactcacatagtatttccctgtgttgatccgaatggtggccttgccatcatcgctgctgcagtctagctcgtacgacgagacgccgcacctgcgagggtcgcctcgccggcgaaaaggatgagttatgtttgagagatggccgcaggagaaaggttggcactgacgatgccgtcgtccttggacatggacgacgtgatgatctgcatccgctaccacaagtgcgagcacacacaggacggtcgacaaagcagctgcttccattctagtgtaggctaccaagctagctacttgttgctcgctcggccggctcctacttataagtagtacgacgtacgcgctaccaagaaggggaaaacagaaaattgagtatacgtcttagccattaacgcataattaattagatattaattattttaaattaaaaaaatagattaacgtggcttttaaataacaatattgtatatatattgttttcaaaaaaattacaacggttaatagtgcggaaaacatgcgcatgaaaaacaagtaattttttcaatctttcagctcggccgaacctttaaagttcgaatttatattaggtcgatcttatgctataggttgtgtccattacatatttcttatttatattaagtcgaccttatgcgaccatcgaactcgttcgtcgatcaaagaaaaggcagtgaaagccaaagccaaagtacagatcaagtggccaaagccaaaactctcggctcacagtgctaaaagcagtaactaaacaggctactcggtagtagaatatactaccctttttatttttttaatgatattgttgattttttataatgtttgattatttgttttattaaaaaatttattacaaatatgtaaaagtataagttaagattataatttcttcgataataaaagcaagtcataaaaaatatatttatatttttagtaaaatggatggacgagcggcgtctgctgtcttaaaaaatgaacatacttgcgtgttgcgaacttttgactgtagtactgtacgacaacaaagctcgcgcgcgtgaattagcatttctgcgtgcgccaggcctaatttccacacgggaattaaactttactggccggtttcttcaattcttcatatgttaatctctcatgagattggacatgagtggactggagcaagtctacgatgttcaaggtcagtcctaggccggcatgattttccaaagcaccccctccgtttcatagcttttaactttttttacctgtcaagctctttcatagctttaccttttttttttactagtcaaactctaatcaaatttatagaaaaatacgacaatatttttaatacaaaacaaacatattatcaaaatgtattaaatattagttgtaatgaaactaatttggtcttttagaatttatatgttgctaaatttttttataaatttaatcaaacttaaaaatgtttaattaggaaaaagtcaaagtgacttgtaatatgaaaaacgacttatatagcacgaaacaggaagaacatacagcgcattgttgcttacaatgaagcacacagttacactatcctgagcccacatatatatatccgccttcactttatgtacatatatggagtacctacagactacagttatcaaaccaattgcttttgcacctatagagtcagagatcaggatgagtagcaaatttctcgccatgtatctcctgcttgctctcctcagccatggcacctacagctacagtgccaccacagcttcaggctgggaagaccaagacttcttcaggcattgcccagtgtcccggtgcagcgacggtggaccagagatccggttccctcacggcctgcaatccagcaacacatcatcagcatgcggcgcttcatgcgccaagctagcatgctccggccaagacaccatcctacatcacccatttctggggccttgcaaggtcacctccatagattacaaggaggccatcatgagcatcatcccgcttgtgtactcctcgtctccatgcccgcttcagaagctcatctttgacaatctacagccttacgactaccatagatgtaaattatacagctgggctcctgcaaaaatagtacgctgttcaaaagagttcacaccaaatggtacttctccagtcgatggctacgctttcatgaacaacgccgattatatcaccggcccaatctcctgccccagtgaggcaagtcacttctcatatttggtggatgctcggctatgcatgtatgtgcttcccttggactgcaggatcgtctccagaggctccattccaatacccggtccagcctactctgatatcggtggcccaacattcaaggaaagagcagaaaaattcatcaactttgctgagacgactgtcagttggtattctgatgacgaagttaccattaactgcacagagtgcgaacgtcaaaagcaccgctgcgcattcagctcacaaaggaatcgaacattctgcatgagccgcgagcatcacggtaccattgctaacttctcaaaatccaatcctatcaccctagttttatttcctgaactacttttctattttccactccctccgtcccataatatagcaatctagtaccggacgagacacttcatagtacaacaaatccgaacctgcttactgtttagattcattgtactatgaagtgtcacatctggtcctaggttgctatattatgaaatggagggagtagctattatgatttagccatacagtactagagtgctgctctcgcatcattaatcttacatgagatatactgcaaaattatttttgcaggccagtagtctgctcctagcaaccatctaggaagcttactagctagctttctcgcacattaagtcattattccttccatacaattccaataaaaatgtcccaatacttagtgaaatgaagatagaactatatttgttcgacgggcatcagtaggataatttgatatttgataataaaatctggaacttctcagagatattttcaggtatacaggacactagagcattgttacaaaaaggaccagaaagcaaatgatgaaataaaattggccaaaagtttcatgagaagtacggtgatataatgttacacacaaaagattgcacacataataactgtctgagtcttttgcaccaattaataaatagccagctttttatttttaaacaagcataaccagccagtttttatatgtaacaatctcatatactgttaagatttttcacgatatttacccaagaaacacaatttggataacatagagaagaaaaatcctccatcaacatatttagctcagcatcgtcacaaataacaaaaaggaaaaattaaagaacttcgagttgctagagttggtaaacggaccagtacacatgctagttcatacgcacttgatacaatccttaagaatattttctgaggaataaacacaaactaaaacagaaaagattacctaccaacagtatcaagtgactcatgaggccatagaagtaaacacgtcagaccatattatacttcagtcgctgagtccataggaatcacattcccttctggcattactgacttgtcagattttgtggctgcattttcgatactgtcctggttcatcctggaactgcaggagagccagttgacaaccaatcctggaaaaaaaaaagagaaaatgattgaatatcgatgtcactctggctcattctggagctgattttgctaatacactgaggtaatgtgctcctggaaaaatgaaatagtttgatggacccatatgaactatgaaaccatgcaagacaaaacaaaacacccaggagtaaccaaggtggcgtctggctgcctctagaattacaaagtagctcgaaagtgtaaataattgagactgcgagggagcacttgactgagaaagatataacctgagtattgcttttgttaactgatacaacaggagctgcagctagatctgtggttgcttcaatgaatgatcagtagatacaagagttgatatgtggaacccttgataagttaacccgcaatcaacctcaactcgctctaacatccttatctggcattctagcataatgacaaaattatcagagctagtatgcagaactggcttatgatgatactgctaactaagatgtaaggaaaaattcactattgcaaacatattcatataaccatagactcatagtgcagttgttcctttaaaactaaaactctatcctatcccactagggccatgttctgttgacatgttgtgtaactaattaactatgctggatctcattgttttttcaagaagtacttgttcattatcagttaaaccatcaatcaaatcttattatcttttttggtacttgcaggttcgagtgtcaaagtcatttcaggtactgctataattcaaacctaccctctattcattattcaaaagagagaagaagcactgttataacttatcagcaataaaaagttcttattgctggcgcttctgactcaatattttgctaaaaaggacactaccttgccttacccatcaggcaactacaatcagttgatcactagtccatagctttctatcctattgcaatgcgctgatttcccattctctgtttattcagctacatcatcggcagctgcatttgttgttctttcattgatcatagccactgtgctctatatttcgctgaagtcaaggtatgacgaggaggtacatttgaaggttgaaatgttcctcaggacatacggcacatcgaaacccacaaggtacaatttctctgatgttaagaagatagcaagacgcttcaaggaacaattaggtcagggtggatttggaagtgtctacaaaggagaactaccaaacggagtgcccgtggcagttaaaatgatagaacacactacaggaaatggagaagaattcatcaatgaagtagcaaccattggacaaattcatcatataaacattgtccgccttctgggcttctgctctgatggaacaagacacattcttatctacgaattcatgcctaatgaatcattggagaaatatatattcttgcatgacccaaatacttctcaagaactcctagcagcaaacaagatgttagatattgccttaggcattgcccgaggaatggagtacctgcatcaaggatgcaaccagcgcatcctccattttgatatcaagcctcataatatcttgctggactataacttcaatccgaagatttcagactttggtcttgcaaagctgtgtgcaagggaccaaagcattgttaccttgaccaaagcaagaggcacaatgggctacattgcaccagagttatattctaggaactttggggagatatcttacaagtcagatgtatacagttttggcatgctcgtgttagaaatggttagtggaaggaggaactcagacccgagtattcagaaccaaaatgaggtctactttccagaatggatctatgagaaagtaattactgggcaggactttgtacttagtagggaaatgactgaagaagatagactgaaggttagacagatggccctagtggcattgtggtgcattcagtggaacccaagaaaccgtccctcgatgacgaaggttgtaaacatgctaactggaaggttgcagaatatagaggtgccccctaagccatttgtttcatatgaaagccatgctgtgccataaatcatagtaatgttatgggagttatacacttatacttagttgacgtgttgcatagtaatgtctagaaattgcataatatgcaccttgactgcacattgataactgtatgaattatgaatcgtggctctttaccatgtaatgtaatacaagtaataagaaacacatcagttgatgtgattaccgtgttcagttgttgctatgatatatctccatcaaaccatggtgtgcagagtactcctggctgcactatttcagtaattcatgggtccgtagctagtggcttgcaagaaaatcctgaaaggaaattgaattatggcaatttttcccaggcagcacaaatataaaatatcgaagcaaagagtattatttttgtctgtttgtccgtgcgaacggccgactagggtaacattcataccctgaattcgtcactgaataaagaagtagattcatatcctaaattcctcactgaactaagaagtataataagtaaagttggcttggtcacattcctatccatcccattcaaaaagtcagggcccgcctatctatctgatggaaatctcaagcaaacaggatgctgctgggcaagcaatcgaggagctacgaatttgcaatgtgaagagatgaatgggcatggactcgactagtgaataagtacactttaataaaacttagcaaaaataatcaaaagcagaggaaacgggctacctttatcaatgcaaggagggggcagcgaactgaacaaccaccggatcaggagatctccccgagttctgtcaatcctgcggctcggcatggcatctcgcttggggcctggatttgcggctcgggtctcacaaggacgcagggagaactgaaggcgacgcatagaccgggcaacgcgcgttgacggcgcagtgctaagaagagacatcgccggggaagcagaggcggccgggagtcggtgggatcgccggcgacggcgaagggttcgtggcaagagagggaggaaaggggattccgtacggtttgcaaccagaaactaagctcggcctagggctagtaatggggccggccctaaagctcctgccgctaatgggcctttatttgcatttggaccaaaaaagacctgcgggaggcctgtcttctttctgctcgtggaaatttttataactgtaaatcgaccatttttataacttatagattttgtggttttttcacggaattttattttatagcatttacttttgaattactaagaacccgtatttaaaatttttatctacaatttttttaattgctaataagtcgtacaaataagcatatagataagcaaaatatgaatcggaaccgggaattgctagatttcagtcacgtaggaaagaacatagcaacagtgccgaccaacacagaacactagcttagctcgatttttgcatgcattcatacagatgaagcacaagataataaatcgtacaagcccacatatacgcattctacaggaatataggaataggagcatagaaactgcatctgtgtgactgtctacaatcatcacaggcttgagcacaacctgctcacgaaaagacatcaacacaccatacttgctagtactagctaattcaactcagtgatactctcgtcttcctcctcggagattgcagccagctccacctcggaggacagatacagcgactccattgccgggatgtagtcatcgtcacagaagaatggcctaggaggaatttgcaaacaatcaacaccaccttcaagcatctctatcacctcgctcatcatcggtcggtcacaagacctcatctggatgcaccacaatccaacgatgcagagcttcttctccaactcatgcatgtcggcggcagcggtgatctcacctgtttcttgtcgggtcagctgacggtacactcgtgatggatagtatgcctggcttgaattctccgcattcggatcagcattccttcttcctccggccatctccaatagtagcatcccgaagctgtaaacatcggacttgcttgatatggcaccaaaaccccgagagatcatctcaggagctatgtatcccactgttcctcgtgctgcgctcactgggacaaaactcttgtcccttgggtacagctttgcaaggccaaaatcggcaacttttgggacaaagttgttgtcaagaaggatgttgtgcggtttgatgtcaaagtgtagaatttgcatatcacacccatgatgcaggtagttgatccctctggcaatgcccaatgcaatttcatttagcttatcccaggagaaactcttttcagacgagaagatgtacttgtcaagagaaccctgaggcatatactcgtacacaagcgctcttcttatttcttcagagcagaacccgacgagtcgcaccacattgacatggtggatcctaccaatggtggagacctcgctgatgaactcttcccctttgcaatttgcgtcacccttcagcatcttaatggcaactcggacatcaccagggagtagcacacctttgtagacggagccatatcctccttggccaagcttgtctctgtaatgacttgtgatggcaataatgtcggtgtaggagtatctcgttggggtcagcatttgttgcaattgcagaaacttctctacttcatcaactctcatctttattttccagtacatgtaggcaacggaggtccacatcagcagcatcaccaggacgaacctgcatgctacaccataaacatgttcatccctgctgtagagaccaagtgtatgaacaaatagagcatgacgagactacaatacagcgaaaaaggaaaatgtaactgaaatttgatatgtgtgattgtcacgtaccagaaatgacccttaaaatccagaaagtttgtggcactaacatcaggagcacaacaaaagggtgtggaagttgagttgcatggcggccgcatatcgagaagtaagaattgatattagtaacaatgacgaagatccgatatactgtcggttctccattactgtcgctgcaagaccacgatgtcatgcatgagccattgtacagcaaagcaaatttccaagataatgttatttggcattggtaaatttcactatcaagaatgtacaaggaagacgggccaaagtgttcagttttaagtcccaaataaattgactcacctgatcaagccccttaggcagtcgatgaatcccccagacctgaaaggaaaacgaacagcgaatccttcactcatggatctgacaacatcttcataatttacatcctccagtgtcgcagccgcagtagcagttcgccaattctctagaccacccagagctaaaggagtcattgccaggtatccacaggaaggctcaaggttctcagctaaataagatcccagaccagttagcacatagacgaaagaagagttgccgctccggcaagccacaggcctgtacatgacattgctgctattcatttcctgcgagcatttcacaaaggtagcgaaccaatccacatcaggggacaactggacttggacacggcggtgtgaatcttctccaagcctgtagttttcattataaggagtctgactccaccgaggaagagggcagttgttagctgaatccaagcttgcatcgaccacccagaagtactgatcactgtagttgatgtcagttaccaagtatgttgccttgtcgatctgaattgtagcattgctgtctgcacaagtcagctcatatgatggaacaccacattcagcggggtcgccttgacgacggaatgggaaatgcacatagctaagacgtccgcaggagaaagatgggcacttgcctctcccctgaacctgatctggtacaacaagtgcaagcacagagaaggcagccatggcctgcagggcagcagaacgacgaaacgcaccagccatcgctacggtagctagcttcacaggcagtgcaaacaagcctattacaatagagaggggcctgctgtccaagctagctagctatatgcttagcccacatgtcagtgactttcaatatagggataatacagcagaggatctcaattgcaaatggacacgggtgggtaacaattacatggctgagagcagatgacagtgatggcattgactgacttggggaaggaaacaatcgagcctggatgtgacaaaagagagcatgtctccagcctcaatccattagagcatcagtatcagtaaagcagtgaaaactatgggattcaattcatgtggtctggtaaatttggagagagcaaataaaactggagtacctcatctggaattccagagtgaagacgagatgcacatttggactgaagctggtccgtcccatcatctgtcacaaaataattaggaagatcagtgtgcagaataaggctttcggagaactcttttacaattggatatggattggagtaaactatctatgaagaacttcacaatatctttactacacagggctgtgctgcagagggtcatttacaatagcttctagccactgccagcaaattcacagtttaagtttaacactaacaacagttcaccgttgcatggaagtgcggcttcattttctgatgacgccaggaatgcagtcacactaaaaaggactgcaacatgggaccacagaagtttcattgtactttgggattgctccaaaagtacgctgctatcatgagttcatgacaagcacagcataaactcccagtaaatttcattatagttacattcatggccttctccttgtgccttcaatcttcaacagcactacagaaacatggctaaacttcttgttgttgtgctgctactatctcttctcatctatgcggccacagcatgggatgccgagagcttcttcaacttcaagagttgtccaccaaatcagtgcagcaaacatggaccaaaagtccggttcccactccgccttgcatcacaatctccgtcgtgcggcacacctctcatggagttatcatgttctggacaggacaccatcctgtatcacccagttctaggctcctgcaaggtgactgcaatatcttacaagcatgctgccatgtccatcatcctgcttgtagattccacacctcactgcccacttcagaagctcatctcgacaaatttatcaactgatgtgtacaaacctcaaaaattggaagctgcaagcttagtaagttgttcaagagatttaccaagagatcagcacggtgtagttggcccaataacttgcctcagtaacaacgcaagccagtggtatttgatacatccttatgcatattgtctgttcttcagccagactgcaaagttgttagtaatggcatccaggcaccctcaacttttaaggaaacagaaaatggagtaatcggtgttgatgagttggtattcacttggtactccagtgacataaccagagattgtcaaaaatgtgaaaatgaaggcaaacactgtggtttcagctcacaaaggggccgagcattctgcaattatggtattttctctttctgaagcagaaatcttacatcaatattatgacttgctttgccttggtaggaaactctatggtctttaccttttcattctcttagtttaaagtttgccaattaaattgttcaaaagatttccatagttgaattagttgtaaacactgcagatcagagcagctgctagccaatggaagcataccaaagctctaggttcacatgcatggttattctaatttaaaacgcgcgcacacaagagaaggttataaccgattaagagtaacggaatttttttgaaattcttaaaattaaaaaaaaaaccattcatctacaaggtaacctagatcaaaatgaatttttctttaggattggagcataggcatcccttggtaactagagagggtgctatgaatgaacacactctccaaaataccattgttagtatcaacgtatagtttatttgattgtaaccatttggactggaccgcctatacatgttccaagttaaagaaaaaaaaagaaagaagaaaacataatttacttagcaacaactgctaagcctcacgttggttccatgtattccagccatagaaaccacacccacattccttaatgtcaatactatactctctactctagcttatcactagaaccaaggatggacatgctctcagatttgatgtggtgttctggttatctttaatttctcactttttcacaataagcatgacctgaactttggcttgtcagcaccttcttggatacatattcttgaaaaaaacaccatactgggtacttgcaaaaggaaaaaagaagaaaaagtgaactccatgtagggtcatattgatattttaattctgaactcttgcatacctatgttagatacacagaaagcaacaggatcttcagcatgaacatgtttgcacgagttctaggtcactggtgatccatcatgaaacacagcttggtgcccaaagaaaccagcatcccatctgtctattgataatatatatttttttagagtaaatttcacttagagccatcttttattactgatatttcgctttggccctttaatcaatgttctcactttcgaccagttctttgtttttaacctttgtggcactttggaccaccctcaactattttatccatctacatccaacttatcatatgccaaataaatggtctttcatatagctgagagagttaattgacgagtacaagccgacatactcgagatcgttcatatgcttgagaagagagttgtgatggtccaaaatgaagcgaaggtaagattacccggaatgcatgaacctaacaggaatgcatatctattttccagacaagttaggatccttattggaaaaggaataatttttgaggagtttatacatatatagccctttgttccatgttgtccttcacctgttatgcttcctagtgatagatcagagatgccctctctcagtgacatgttgcgctagaatatatatatgggcgctggttgtcacatggcaggatgcttctcattccttctttggcccatctcctcctatacatgcgcaggcatgatgcatgcatacggttgcatgcacaaaccagttaagatcagagaatcccagcagtgtagtacatgcatacttgcgacgtcatatgctatatacctatactccactcggtgctagctaggttgaattgagatcgatcgatcagatatggggataaaaactgatagagctaagctagggcctggatgcagagagatgcagccatggccttctgttttgttttgttctcaagtgagatacgacgaacctgcatgctacaccataaacaggttcatccctgctgtagagaccaagtgtatgaacaaatagagcatgacgaaactacaatacagcgaaaaaggaaaacgtaactgaaatttgttatgtgtgattgtcacgtaccagaaatgacccttaaaatccagaaagtttgtggcactaacatcaggagcacaacaaaagggtgtggaagttgagttgcatgacggccgcatatcgagaagtaagaatcgatattagtaaaaatgacaaagatcctatatgctgtcggttctccactactgtcgctgcaataccacgatgtcatgcatgagccatggtacggcaaagcaaatttccaagataatgttatttggcattggtaaacttcactatcaagaatgtacagggaagactggccaaagtgttcagttttaagggattctttttagaaataatacttttttattagagtcgcaataatagaggttgacagacaaaaattgcaagtataacaccctatcgagcaatcgaactgtggttgttcgacggataaaaaataaaaactaagagagaaaaatcactgtgcgccactgtagcatgcaggacctatcaaacatccccagttcgataggccaccctgccatgctcttccatgtattttttttaagtggaccaacaaccctgtcgaacaacctgtcgaactgtggttgttcgacagggtataaaacttgcgattttagccaatcaatttatatttttgcaattttttattaaaccaccgggcagcggcacagttcgattgaatcttcattgatttcaattgaatcttcagttacaacattaagctattccagtgagtatgggcgctctggatcctttatatctctaatatgatgtaagaaggttaaggagtgcaaacaaaagaaaaattttgagggcagcagaactccagatagaggtaagtataacaggaaagaaaaggtacacagcatgtagataagttaacgaagaaagcacatcaaatatttctagctggtcaatagcctctgccgcattttcatctgtggtttctggtgcctgccgagcacgcctctcttttttctcataaactacaggattagcatttattaatcccacaaccatttttctgatgcaatgcactaatttatatcagaatggcgaaattcctgcaagttgaaaacatggaaattataccaatatcagtcttgaataattttgttaatcactataaacgttcaatggagatattccccgcccaatctatcactagtagtctactagtaatattattgtggactgttaataatcaagactaaattgcgttcgttaaactatgaaatgtaatttgatccctcaacaccccgatgaaagaacagattgctaaacagaaatgcaaaatagaggtgtgataagaaatttgctaaaggatatttagcaggctaaactctgaagcggtcgcgggccatatggttaatcactaaagactgcaaggactgatgtaacatggggcatgggggggttcagctgaaccccaatttctttcggaaacaaattgcttagtataattaggttaaggcaaaggcaaggagtaccgtattgcaagagaagctaagcgcatctgtagtatcgccccaaattaaacagaacccgcagcgatagtaaggagtatagcaaccgtacgtcgcgcaggaggcggcgcaaggcagaggccaccggagagcaggcgtcgtcgtcgcgcgaggcgaagaccaccggggagaaggggccgccgccagcggaggaggcggcctgggatttgggggccgaacgaacgaacgaacgaacggggccaccggaggaggagactaaatcgaaccaaaccatgcaccggagaggatgcggcaggacgccgggagacgctgctcgcggggtggagatcggcgccgccggccggcaagcccgcgagttgatggcgacggggagatcggctagggcagggcaggaagggggagatgagaaaacgcacccctccaactccaaccacaggaaacgggcaggaagggggagctcggaactcggaactcggaagagaagaaaagctcaccggcggcgggcggcgggcggcgtaggcggccgtacaccaccgcgggggcgtttgagcccatctagtggtgctggtggtgttccattctgacttcgcttgtaacatctgggccgggctgtgaatcctcctccgtcatgggccgacatgccagagtccaacatgaatcacccccgaacccctttccttccttgggtatttcatttactggccgttcgatgcgatctagattgcgcggattaagggtcggtgtttaaaactcctaaccccttttttaggttgtgagcgcgttagattgagcggataataaataagccattcgtcgcaaaacgcaaagtgagccgagcgctaatcatgctatgcttgcttagatctagggatgtagctatatttatggcgccatattttttataaaaaatagtcggtatatatttacattgtaagtatctaaattacatatgtaattttagtgtatttacaatgtaagtctcaaaattacatatgtaagtactaaaattacatatgtaaattcgaaaattacatactaattatatatgtaagtggggtgtaaataagatataactactgtgtaagtggctaaaaaaatcaactgtagcatatagcgccatatttctagcaactccgtagatgtagatctagtgccatcagatcattaaatcaccaacggattaatggccatgtcgtaatttcctccctatcaccaacagtcaaatgtagtattcattggtcaggtcggatgcgattttatatgcagtacgttgcactgtcttcttttcttgtgcccctgtctaaataaaaatgaaatcctgaaaccccctttttcattaggcataagaaaattacaaataactaaaagagtgacggattaaattctgaaatggcgacgaacacacagtgaaaaatgccgtcgccaaacttcttctcatcggcaataccgttttgagtcaactacaatattatggaccccaaagcagggcacggctgcagatacgttcaaattttcagatgttgggcggaggtctttcagttctgatcttgcccgagtacccgcgttacgactccaacagcgattgtgcttccaccagaccttaagaatgccctgccaagagctcggcatttggagaattcttcaacacagaccggagcgtctaaggtaacctgacaaatatcaagaaaatcacaacatcgcaaatgatgacttcggaagcaatggctcctcacaaggatctgtgatcagttgttacctgcacaactgcattctgctttgacttaagaaatcgaggtgcagttttgcttggtttgccagccttgtcaagcaatgccacgattttcgtaaccctcgcagcctccttcacatgatgtatgtgaaactcgacctaggcccatatttttatcagattgcatcagggaagaaaataatcaaaaggagagcttttggtcatatctttacctgatagccaataaggataggaatggtgacgtccaacactagaacccttagctccaagaagttagagacaggcactgggaaaccagggttgcaaagaatcccacctgctattagcttactcccatcgatgccctgtaaactaaccgctacattatcaccagctcttgctatgtcacatgaatttgaatcccgctcgatggatttcactgtcgccacttccccacaaggtgaaattaaaacctgcaacagcaagttccaagctgtcaaaacagataggaatgtcaagacatttgcgtacaaaagcaagtataaatatatatattttttaaaaagaccaaattccgacatcatgctgttactgaaagattggcatgcaaatatgcaactagcaaatgtcacaatgtaaacgctcttgatcaatctttcctctatcctcatatttggagctcatctcaatgaaatatacaagtatcaatagtccctgctgatttgtgaggaatgtacctttgaaccaattcgaatagctccagtctctaattttccaaatgctgccaactgccctgttgactgagacttgataacatcacagataggaagaatgaggggctttgaaacatcccgagatggaagctgcaaggaatctatagcatccaagagacaaaatccttgatacctgaaaggacatcagttcaagattcctattcttcagataaacaaatgattttttttctaataagacagtatggtcccaaatatttcaaaatatcagtaatgctattctcacgagtgcttactacaatatgtcgatattaccatgtgaaaaggttagaaattgcaagatgcatgaaacagccatctctgttgaaaaattctacacaatgtagtgtttcgaatggcatggaagtagtgtgtcaaaacataacttaccaggaagttaaacggacatcagaaggaattttgatcaaattctgattttcaacagcactaagaggaatccaggtaacagatgaatctttgaagttgcatgcccgcagaaaactaccaagttgaaccttgatgaactcgaatctttctttggagtacccgatggcatccatcttgttgaccgcaacaataagctgttcaacgccgaagcttctaataagctgagcatgttcttttgtctggccaacacttttccctccttcaccgtccatgccagcttcaaatgaaccagtgcaagcatcaacaacaagaatagctgcatcagcttgcgttgcgccagatatcatatttggtacaaaatctttatggcctggagagtcaagcaaaactacacggtacttattggtctccaaataagccacagccacagtcattgtcacacctctttctctttcttcactgctttcatccatagcccacgcataagcaaatgatccttttccctggtaaaaaataatttccataatacaagaatatgaatggaacatcaggatcaagtatagtacaataacaacaataataaacttactttttctttagcctccttctcattcttgtgcatatcttttttcgatatccttcctaacagatgtagcagtctcccagagagtgttgacttgccagaatcaacatgacctacctaaacaaattgttcgtagacagtaacctatttagacaaagcacttttagaataacaaaattgttacggaacatatgccatattcagaacagaagatgagtatagcatactattgcaaggtttagttggctcagcactcctgattcctcattagcaaacatccacttctcaggcttatattcttcaggtaaataaggttttgcagtatctacttcattcttttctaaacctagcttctgtatgtcagaagaaagtttctgggccacatcctcattctgtgcagaactggtagccctactactctggtcctccttcagctgaaaatgatcagaaatcaattgagctgtcctctcgacaggcacatcttcaggaagtgcaatgtgtttcacctttttcccagcgcctgatgagctaccaacagatgcgtactgtgtggaaccaactgttgaataataaaataatttaaattaaggtgacaataaaagaacaaagctaacaggcttttttttcaacaggaaggcttatcaaccaacagatgatacaactggttgggaagatctgcaaatcaagtacaaataagtcacccttacaaaagtagcttggttcagacttcagagggcatgacacgtgagctgtgggttgttgttgtccaacaagtgaaacattttttagtggtatgcaagggaacaatctgttcagccacagtaagtgacaatggtgcttgggaaagaaaaggatcaaaatctgcttcccgcacataagatgagctaatgtgattcttttatatggtgaattatgaattatccttttcataactcaataaggtgttatggtaggagaagctagtttaaaggtagaacagagttgcatacacaaaattgtacagcatctaccatttgcaccagcagtacctttctcatgagatatgctagcattctttatctcagggtcaccaccaaagtctgtagtacgagtattcactggcatctttgtagaatcagatttcggcatcgaaggtgtcccaaaatcacttggtatcccatggactgtaatttaatagttatagtacactatgattacattagaattccttgtcagaatacaaattgtgattcaaagagaattagaatgggtgaaggatgttaccttttattgaaccatccttggcagatttcataaaggattctcgaaaaaccccacacatctcacaatacaccatgctttcatgattatcgaacatgcacatggagcatctccaaagcacaggcaccatacttgaggacttcttcgatgactctgcacaatagagtggtgacataacattagagatcaaggagctgcactacacgcagttagcttgatatgctgagtaagtcacaaaaaaacttcactgtacaacaacaaagcaaagcattcgatgcgtggagcttatgcggaaagcaacggttaaatgtataagcatatgaattatttcaaaatgtgtcaaatatataaaacaataatatgcatatgcaccaggattcagcaagcaaccagtaggtaatactggtagttctaactggcagccagctatgtttcgattctcacccaatttgggtagatttaatttgtagtaagtttttattttgatggactggatgaatgatatttgactcattccaaaaaatgcatgttgaataacaatgccttcaagaaaacaaatatctgaagtgcatatgatgggataaatgggcaaggaaattatcacaagaccaggtaatcggcaaacataagctacacgatcactgcatttgtttgaacaagcaatgctattggaagttttagagtaattaagcactagaaattcttatttgcataatcaggcaatagaggatgcgatagcaagtacgaatgcaggatggaaacaatgtaatgacattaacaacatttaacaccactgagcaaattatgataacgggtgaaggctcctagtaacctacaccgccgtgactaacctacacgagtagatatgttaggtgtgcatcatgaagcgactccaatagctatttcaccattcttacatgctgaggtgtacactgtctagtactagcttcaaacctttgacataatacctttctccttcgtagggtgctgaatgtcgtcactgtgcccagtcccaccgtaatcatcatagtcttcatcatactcatcatagtcatcattgtactcatcatcgtagtcaggcccagagacaaccttgcgcggcatcctgctgacacagggcagacctaatgggggaaaaaatagtgttatt

SEQ ID NO: 7051 - DNA, 3177 bp, Oryza sativa
accgcgtacactcacccatataaagacacaagcacgccctaacgttaggaacacatccaaactatttgaccggcatatctttaaattgacgatgtcaatacgaatgtttcactgtcgactggtatattatttatacaattttttttagtttcatttgaatctggtgtagccggtcttcctccgccgcctgccagcgttcaaagcgaaaacgatgccaaaatcatcatttgttaacagtgcaaccagcacatcatcgccactagggatgaaaacggagcggatagtttccgtccgctccggacaaaaacggatacggatacctttcggatcggataattctcggatatttcggatacagatacgaatacggatattttctcccggatacgaatacgaatatggtatcagagtttccgtcgaatacggataataattcagatatccggtgaatagtgctattcggatatccgcaggacccatgagacataccccatttctttctaactctataaccttcaatgtacctttatagattttaataatagtttatctcttaacactagtccatactattaatattatttaaatttaaaaaaatatttataaattatacctcattttatataaaatgagctaattatatatgttgaaatttatttctattagaagttgagttggttttcgtgttccgagaaaaatttgtttccgtattcgtgtccgatcatattcgattcttattcgtattcgagataatccgtatttgtttccgtattcgagctatccgtattcgttttcgtatccggtaaaaaatatgaaaacgaatatggtataagcattatccgtccatatccgctccgttttcatccctaatcgccaccactactcgctcgtcacctttcgtggattaccactaaaaaaacgagagtgccacacgcccgcacgtaacccccggctgctactagtacaagcacgacacagccatatgggcatagcatagcatccagtgcttttcttatcgctacatcagcccactaacaacatgggatcagtaatactcctctgttagtgttacagtaggattctatgctttaatcatgccgtcaacatccgtcggtgcaaaaggtttgcaggtacggaactcttatagaaaaaggaaaatgaaacgagtgaggtacgaaatgctttaattagtacatgattaattaagttttaattagagtaaagtccatcaccggtccctaaactggtaccgctgtgtcatcccggtcactaaactcacaaatcgaccgttcagatccttaaacttgttcgactgtgtcatccaggtccctaaacttgcagatcactcgtttaggtcctccaacttgttcagttgtgtcaccccggtccctaagcaggacggtctaaaagctttatatcaaaaataattcataacttttttatgtaaactctaatgaagacaaactttatattaaaattatagccctcgacgcgacctacaactttgtagttgataagtttttgaattaaaactgtttagggtcccaaaatattgttgcatttttatagattttgaaattttaattttaaaattacattttgggacaaaaaaatgacttaaaataaaaaaaatcaactataaagttgtagatctcgttgagggctacaagtttgatataaagtttgtctttattagagttcacataaaaaagttatgaattatttttaaatacaaagtctttagactgtcctatttgacccagatgatattcaaatctaagtttagggaccgaggtgacacaactgaacaagttggagaatctaaacgagtgatctgcaattttagtgaccgggatgacacagttgaacaagtttgagaaccggaacgatcgatttgtgagtttagggaccgcgatgacacagtggtacaagtttaaggaccggtgatggtctttactcttttaattattataaattttaaaaagtaatttatctgatattttaaagtgatttctatataaaatgcttttatggaatacacacgttagcagtttgaaaaacgtacgataacacacgaagtgagcacaacagggtttaatgctatatatgatttgactttgttttgctactgttttgtttgttttgtttcgatttataatctaaattggcagagtttgtatcaatcgtaaaaattgtctttgtaacgcaatacgtatttttgccagttaacgcaatacgtatttttgctagtttaataaataaagaaagaggcctaattaacaaaggacgataggtgtacgagcatagcatcaggtcccgttcgaagccaaccgaagtttgtttggtgtttatatgggggttcacatgagggggggtgcagatctgtgtggttcacaacgagatggccagcttagatccacgaggagaagatggccaactgtcggttactagctcggttgacggtgcggctcaatttctttcaacattttccatttcttgttgaggagagaaaggtacaaacctgaaaaaaaagttattcccatccatgaaaatccctgaaaaagtcaaggagcatatgacacaaaaaaagtttattgcactcactataattatttatcttattatttttttggaatatcatttttggatagaacgatttttatgttttccctaacaaatttatttggtgtttttaaaatttcacatcatctaccacccttcttgaatttcctggatcctttggggctgtaattttcagatataccaaatgttttgacctagcaacgacaagatacagtggaggagcaaaaaaacaaagtagctgtgcaaagcatgcacaaagaacacacaatagaaaggtcttttttgggtggcagaaaaacggttaaggtttcaacagttgaaagtaaaaaaaaaaaaagaaaacacacacacaacgcggaatgtgaaaggtatgggcattctctagaaggaaggagcgttcaacgtgtttgtcagttgacaccgtctcaatatgcgggctttattcccaggggtcccagctgtcatccagcaaggggccgtttagttcccaaaaagtttttccaaaaaacattacatcgaatatttggacacatgtatgagtattaaatataaataaaaagaaaaactaattgcacagttacgggggaaatagcg

SEQ ID NO: 7052 - DNA, 8947 bp, Oryza sativa
gggggggagagagaaatgggaaagaacacatcacatgcagcaggagcagctaggctttcagctcacctgtgtgggaaaattgtctctgtttcctcgcaccgatcgatcaacacctgctcgatcgctctcctcgatcagcttttgcttgccttgccaaaaaaaattgtctctgctacctcttgttgcactctaactagctgctgttgccgatcaagaagctggctatctgaatgcgtttgtttatgtaagtagggagcagctgcgaactaactctatatatctagtacaccttctgcatggacatggttgctccagaggaggaaaaggatgagcagattatgataggaggaagaagaagaaagttgctgcctgccttgcaccactgcaattatatggagagcacttcactgtactcctaaggcagagagatggcgcaattccggagtgctatataggtggaggtaaatggaagaacggaaggagggggatggagaaaaaaggatgcgtgcgtgggtcggtggaattcaattctagagctataagaggaggtgtatgtagtactactagtatatgtatatactgggggaggagttaagctgcaggcagagctcaaaaaaaatttcaaaaataataaaaatggaggattaaatatgggtgtgagaacgtgagggaaggtaagaaaccagcacagctttcaggctttcagctgggacttgagaggagacgaaaccaaaaaaaaaaaaaaaaagtggtatctgcttgctgggctatggctcctgggttttgaacgttggaggctagctaagctatggcggagtggagatccactcccactcctcgttcccttttacactggtgctcgcacacgacctgcacggcacacgcggatgggaggaagaaaaaaggagacgatgcgtcgagctggaacggcacgaaagagacgaccagagagaggcgcccttctacagctaagcttccgtccgtcagtcactcactgcctcgtgaggacccagcaacaactagtactactactgctgctactatgcatgccatttactgggtctgggacgactacttctcccacgattattacgattacggtcacgattagcagtgtggtaaatgggttgtttaaccatccatgacgtaaaaaaaatcaaaatcaaatcagcgtggtaattaggatcgttgagcaaccacaattgcttgctggtagtaagtgctacagtacagggagatggggacggtaggtgagccttcctccctcactgctagctgtcctcgcccctgtcgtgacgttgaagtttcctccctctttctctctcctcacatccctctttttttcccctctcccagttaaccaaaaaaacccagaaaatacaaaatgctaaaatcaccagctcagattttttttctctccctcctgtatgtacacatggcgctgggttatcacacatggatgggcatgagatgccagctgctgtcacgacggtcacgactttcctcccccttgcctccgccgctcgctccttcacactgtttaaccgacagccaccgctcccgggcatcggtcgtcggatcctctgcggccactggtaaaatcctcgcacgccagaccggtcgtctcgtcgcagctactagcgtccagccgtgtcgcggttagcgcgcgcctccacggaagcatcccgcggtcgccgccgcaccgcggccgcgcattgaccgcgcggaggccgcgtcgtcttgcttcgcttgcagctgggtgagaacggtcagaaacaattggaatcggtagcatctcttataaaacaatattagattaatcggtaattaattatatttattatttaaattactcagtgtcaatagatacagcaaaaaaattagaaaaaaaaatttaaaaatagccaaaacgataccattttggaaacggcgctccgtccatcagttgatcggcagccgtatggacgcggactcgcgagccgcgcggcgcagggtgcgtagccgcatgcgacttggagaccgcgacggcgatgtgggggggcaagttgggcaacgagacagacgctgcggaattgcctcttgattgagaaggacgcgaacccgattcaaaaattttctttctcggtccaaaggactcgtggggttgtaaattcaaaacttatctaactcgatcgtcgattgcatatccgttcggttttgttttttttctatgtgcctacttgttggcgttctagggtcagcgtacgtatgctctctcgcctaacacttttttgagtgttctggtatattgcccaacccatggaggatatgtgcgcacgaacgacagtgcagttaatccactgtctctgtcaaattaatcccttcggtcgatagatatttaccgaacttaattactgccgtgcccatgttacgacttactaggatatatacatgacgtatacgcacatatataggacgtaatagtagtagtagttgatcctttgatccctgatgcattactactagattaatcttatcctgccaatcgatcgatctgcatgcatgcatgcagctggtgttggtggtagcaaagcacacctgcacatgaacgatcgcatctggatcgagcagcagtagtggccaggtcgggtcactcactcactcactcgacctacctacttctctctactactacctcctgcgtgtgtgcacacacacagccacgaatacaaacgaacgaacttggtttcgttcgtgcatgcaggtggatgggatgccatcggggactactactacacccgtctaaaattaggatatctttttgagtttttacttataacatttgactattcttcttatttaaaatattagtgtaaattaaaaaatcatatttaaagtacttttggtaataaattaagtcgcaaatttaaaaataataattctatatattttttaatatgatgaatggttgaacgttaaaaattttttaaaacgataagtatattgaaacagagaagtactgatcacacaaatcaacaacaagagttgtcctgcacaggcagcacagcatgcaagcacagctgcgccacatgtgacttaacgaccatcgtggttggggttgggaaaaaaatcgcacggaaaaaatggcgattaattgctggaaacgggagaacggagaagaggggggtgcgtggtgatggaaaaggggagcaacggaaagggaaggaagagtaaagtgaccgcacaaccgatggttgttcgggcctcactgcccccagcaaatcatatgacgggtcccactccactacgctactgatcaacctcttttcttttcttttttttctcatatcatcttctttctttgcataactaacttgggttgcactccttgcatccattccttgagctttactactccccaactcactctcactctctaccccgatcacacctaaacccattggccacgccagcaccaaagcctgttccacgtgtacgacagtcggattcgtaatgcttggcttcatctttttagtgtaaaactcgatacggtatcagagtcaatttgacgaaaacgtaaacccactttcaatcaggtgaacataagtccatatcgtcaatgaatgtttaaacttttcatatatatatatagggatctggaggatgaagcatgcatcattttattttataaaaaaaatatttaaagcgtacaacttgatgggaaggaattgaaaaggtattaaccattttgcggtgacataattcatatgtgtgtgtttttttcagtggttgttgcggttgccactgccgttttcgcgaggcataattcgagcctaatgatgccgactttttcctcgatcgcgcgctgcggacgcagcagaaagaaattcgtgcgcggcatgtctttgcttgtttgccaccgacggggccgagcgacctctgccagacaaatgggtggcatattatactagcaaaggaggtcgacactgaagagttgatcgagtgagttaacatcactcgtcaccaacccgtatatatacgttgtcaaatcaatcggccgggcaactcaaattttatgtcaatctttgttaacatatttttaaaattattaaacggtgtgtttgattaaaaaaattatataaaaattgttttaaaatactaaataaattcatcgttcaagtttgcagtaactaaaacttaattaatcttaaccgtgcagttgtatggttttcgggtctggtttttcttctaaagtggaccgattctcttcttctaaatataaaagtggaacaaagttccgccagtggtttaaaaaaacttaattaatcatacgttaatatatttttaattttaggattgctaatttgatctttatctttattagaaaaagaacaccgttgaagagtggcatactagcaaggagagttcgagactgaacagttgagtgagttaacgtcactcgtcaccaacaccaacccgtatacgtcgtcaaatcaattggccgagctattcgatcagtggctgtgctgctctctcagctcgatcagatcagttcgcttgatggccgtggctaactaggtacggcttcaatttgttggtgtcggatcactcactcacttgatatgatccaactgccgcctctgatctctctcttgcatctccagcaagcaacaattgctgtagcatttctggcctcattttcttccttcctattcttctgttgaacatataattgcacgattgttgtatactcccttcatttcaaaatatttcacaccgttgactttttagtatgtgtttgaccattcgtcttattcaacaaatttaagtaattatttattctttttatatcatttgattcattgttaaatatacttttatgtacacatatagttttacatatttcacaaatttttttttgaataagacgaatggttaaatatgtgctaaaaagttaacggtgtcaaatattttgaaacggagggagtacatcgaatggaaaaagtagtatactgataatgttggattcagtactacactgttggtggcagtagtagtaccagtgccacgacgactgtacacacatgcatgctgtctcagctcggtggcttggcttagctccaacacctgcgttccgggcagacaaggattaattatggtttgttgcaaggcgagacagccagccatccatccatccatccctacggagaagaggaccatcggatcgagtactcatcttcatctagtgcgtgacatatatcacgagtcgtcgtttaaccactcgtttggtggttagttagctgtgcgtattagcagcgatcgaacaaacacatgtagtactactggttccagtaccgtttacattgatcggtcccaaaataagcttatgtgtgggtttctatgcttaacgtttgatcatctattttatttaaaaatttatagaatgttaaaaaaacaagtcatgtataacgaattattcatattttatctaataataataaaaatagtaaattatattattttttttaaaaaataagtctaatggttaaacgttgaacataaaaatttacaaatgaactcgttttggtatggagggtgtacaatttctcatgggcaccttgtcttcttttgccattgagaactcacagagaatcagacatgtatttgttactgctactagtagttggccaggtagattggcattagcaggagcagcaacaacatgatgctgcttgttgcttgttgcaagtagagagtagagtacagtaataatcagtgagaagaagcgacaagaagcacccgatctctgacaattatgggatattcaagtcccctgcatcgatccctagggggagcggattatgattgctgcatgctcaacatgcccctttgtgctgtcagacaaataaagttactcctactacgatcagttccaatagtaggctattaggcagctgtaaacatattttaatgagataaacaatgagagagaaaagcagcgggctatagatctgtagtcagctatagcacggactccaagacacattgtgtgtatgataggtgggaccatatattaatagtataataagcaattattgtatgaattgactattaaattatctattgatgaattagagctaggagtagactgtactattatacttgctctactagtactactgcaggcagggcaccaatcattcaaatgctgccagtaattaaactggcactatctagtttatctctgccgtagaatcacttggtttttaatcaaccgtgaccgatgctgacggcccactggaattcagattctcccttctccctccttgcaagtaaaagcttgcattctggtagaaatggctagctactgattaattaatgaattgaagtgaaatccaccggtcgatcgatcgagccatgtgtcaatgtaccaaaagggtcgatccatccaaccaccggccggttaagaccaagatgagagtttatctggatgatccgggagtaacatgggattatatcagctagtaacatgtacattagttgctagtatcatggcctgctcttacttactgtagccttgtgactaatgagcaagacaacaagtagtgataacaattcatcaggattagtgagataattaattcactagtatgcctgagtatccttgtgataattaactcacttgatcgcctgttagtgagataagcgacaggctaactgcttggaatttcctctggtttcactgcacaggttaattaatcaacaagattgtagattagtactattaggtggatcatcaaacgtaaggaagattcagacaaagcatgcacgcacatggccggagttaacagacaaaccagcccaaattcatggttggatcacccccaattgcgcaatttgataatgaactgacataaacaaatcgagggcataattttttttaaaaaaataaagggagctgatggagcaaaccccagtggcgcgagaggtaacaatactggagtagtagtggtactaatcagtttgacactgatgcatgaatggatggctcctgattaattaaattaaacaatttattaataggatggtagaattagagctagaaatttaagtaagttattcagaggagaattattatagccgcgagatgagatgagatgagctagcatgtggcttgcaagctcgatcaccctggcgtcgtgttggttggttgcccggtcgctggtttctgctagctgcttcacctgctatctctccgcgtgtgcatggatgcatgtattctacgagtactagcttagttatgtatttttttaataatagaatataatatcggtttttgctcaaagagttacagccagttctccataggttcctaaatacaaacatttatagattatttagcaaagattaaaaagacaagatctccctttagccatctctcattagttaaaatttgaattttgaattggttagatttgtcttgtaagcatctgattaacttcagatgcttggttttttgtgtgttgaaatcagttccttagaaatgtttatgttgtgtattacaaaatttaatttatagaaatgcttatatttttgtaacgctggaagtattagctagctgatgcgttcttggatcaccaccgtgtccatattgctgtgcctggtcagcgcatgcacgtacaacattgatcatacagtccaaattcagattaaggtgttaatcatgtcatgtgcttgccctctattatgcactaccaacacacagtcctcgtcgtagcggtagtgccactactacaactaccagttgtacattctagtatagtatagtactatacctcattctagtatagtatagtagtgtatgctaattgttgctttgaccggagctggattggagattcgtcgcctttactaactgacgcatgggtaaaaaatgcagaggtaaataaaacaggggttttactagcttgactctgtaattatcttggagagttgagaaaaggactggttcctctgcattgccttcccagttgtactctgtcaaaatgttgttatttttcttcatcaacttgtctcgtgccaaatgttgaagtggtaatacgcgcgccgtagcttcctagctagtgaggtaaccaactctgcgtgaattcctgatctgttctaaaataaaagaaatctggtttaaaaaataaataaaataaatcgtgatcgatgcaggcacgtcatgtggatcgtgctttgtcaaacctaactgcatagtattttagaagtagtatatgcttcattcgttttttgtacgatttaatttgactgaacaaactaaaatatatcgagatgggccgttaatgcaaggagaaaagaaaatccctgtgtcctaaaataagttttatacgtgaccgttcttcttatttaaatttttttatgattaataattttattgttattaaacgacaaaacataaataatactttatacgtgactatttttttttataaattttttaaataaaacatacggtcaaatgttagacacagaaatccacggctacactaattttgtaacggatgcagtacaaagagagttaatatgttggatcaaatccggccgttgattttgtgggtgatggatggagcaggcaaggcagctgacccgggaactgtttcccaaaccggatgcgacgaccaatgcccttgcccttgtaggacagagagaatgaaatggaagatgtggctggtctacttctctactacagatgtatttattactaacaagcatagtggcccgcgcagattgcgcggctagcatcattatattttctctcatataatagcatatatgttttctcattatattattcaaatatattaaaatgacaacataattttaaatttacaataactttacaaaactactaatgtgtaatatttatattatattttatatacgtgttagttattaattattttta

SEQ ID NO: 7053 - DNA, 6225 bp, Oryza sativa
cttgcttttgaaatacgaattgacagggtaaattggtgcttgttgggcgtttggcactggctaaaccttcgatttagtcatttagaccttgtggcatcattgtcacggccctgtgaattgcattcttatcttccatgatagggatgagatcagctcctgaaatggcttgtccctgcttagtggtaacgcagagacaaaaaggagttcctaacgtagaatggttttttttactgttattgtctatctgcaattaaccattcaccctagatgctttgataactaaaaagtgcgaaactgccattgctcgtaggtttatcaaggggaagtttctggaggcttttgtcttctatttttgtttcctgtcaagtgtcaatatgtctctgccctttttgactgaaatgtgttcttgccaaaatactcctggctggcataggttaagctgttacccggtcctcattctccttccacattggtagcttgacagccccatcttttcgcttatgcttatgcttacgacttttttttacttaaaatctatacagcttattagtaacccaaaaaataatttatggataaaacttttatatacgtgtctttagttgttattttgtaaataaactatgatagaaaacccacaaaattgagttttaaaattcaaaatgttattagcataaacataagcaaaacggttgggctgtgaaatatcaacccatgcctgtccaatttgttcgaggctgactgatagtttcaattgcacttttttttctgcatcaatcttttgcaggaggcaatttgagcgtgccaacctagaagcaatggatgaatctgctgaatggagaatgaaatatgacacagagtttgcgaaaaacaaacagatgcaagatgaacttttaaaggtctggtctatttatattatgtacttgtacacagctttcctcagtttccttctgcagtgctcatttgagaatcttgtttacaggctaaggcctcactctctgcttcaactaagagatttagcctattgaaaaaggtaaccttttgggggcaaactttgatgcttctcgttgtaacaccctaacataatattagctctatgcttcctcagtaatattgagcgctttctcctggtttctccatatatttcactctcttaggtgttaccatgcttatgctcattttttttcaactcttttgagatgctcgttttcacaactgcaggataatgaggtgttgaagaggcagattcagatcatgaaacagcaatgcaattgcactgttacatcgaaccttacacaagaataatgacattactacatacttcttttgtagtttagcattcatcttccttaaaatttgacatatgaactagcgggaggcctagtagagtggtgaagtatgaagtaggagaaatagctactgtagcaagaatattactttgcttgcaattgttagtgagttttacacatgccattttgaagtggttgctcctgactagcaaactaccagtgcaaatagaagatttttggttcatttgagtggtgtattcagttataagttatccttgactggcccttacaaggctgtttggtatttgtaaatatacgttgtcttaatggccatatccagttcctttcttgtttggtccgtgcccacatttggccatgcgttgacatcaagtggtgcagtaatatattcaaatgtctgaagtaacattatgaaaacatcatgcatcatcatttgatgctaatcatgtttcttaaacatctactagctgcaccatcatgacatcaagttgtgcatacatatattcaaatttcttgaagtagcaatatagatccatccaaaaaaaaagtacttgcattatataaacatcatgcatcatcatttggtgctaatcatgccttttaaaaatctactctagtgtcatcatcatgaataacaccaatgccagggactccaaaccaagcaatcgcatttatatccaaatgatccgttggttgagagagcatgagtacataactttcttcatgtattgtgacacataattttctgacatagtacgtccactcttgtcaacatgcaagatcaaaggacaaaccaaatatacagtgtttaaagtggctccgatagtgagagcacaaacaagataccaatacattcatggaatcaatagtatcttgccaatgtgggaactttcttccatcaacttgtgagcttcagcagcttctgacagaggaaacgtcttgtatattactggtttcaccttgccttgcacaacggcaggccatacatttttctccacctcactgacaatcagagctttattatcaaggcttctgttgcgtagtccagcagctgcacagaatcataccatttccacacatgctaaaatcagcgatatcgtttaggtatcatccaatcacataattgtgattctcagtaaggcaacaaccagcagtggtataagatcgtaaataacaaaactagaaacacaaaaatctagtatgagggacattgttgcctatagatcaacgttaccttgtatggtcaatcgtcgagcaagcatgggttgcaggttcacttcagttacagcgcctccttggaaaccaatgatgaaaagtctaccatcaacagctaagctgttcaggttacgctgaagatacaatccaccgatgttgtccagaatgacatcaacacctggtaaatatacttccatgtcaagagtcactaaagcatatgcaaacttggcaggtatcaaacattatagacagttccatggagaaatgccgttataagaaatccatctgcatataagtaccaattggctggggaaaataatatgaacatgaacacacaaaaatggtgaacgcgtgcgatataccctttccatttgtttcttctttgacacgtgcaacgaaatcttcagttttgtagtttatgcatacatcggcacccaaacctttgcaggcagctagtttttcctcactacctacaaacacatagtgtaacagcatttacttgagcgatctctgcaacatcctattatatactccctactgtatctattcttgttctactataaacaaacctgcagtaacaaaaaccttaattccaaggtgctttgcaatctgtatagcaaatgtaccaattccactcgatccaccatggatctgcaaacaccaaggatgcaccgtgctcaggaatgaatcatggagtcaatgggggattgaaaaggagagaagttatcttacgaggaacgattcgctgggggagaggtggctggtcacgaagacggtcgaccagacggtgcaggccacctcgggcaagccggcggcgtccgtcagagacaccccctccggcaccgggagcagctgccccgccggcaccaccaccttctccgcatacccgccgctgctgagcagcgcgcacacctgcaaggggaaaaacaaatctcccaaaattttacatcctatcacatagaacgtttgaacatctgcatgaagtattaaatatatgctaaaagaataactaattacatagattacgactaatttgcgagacaaatcttttgagtctaatttctccatgatttgacaatgtggtactaccgtaaacatttgctaatgatggattcattaggcttaataaattcgtctcgcagtctaccgacggattctgtaattagtttttttattagtgcgacggattttgtaattaatttttttattagtgcctaaacacctcatgtgacaccctatataatatccgatgtaacacgctaaaactttaaaccctagatctaaacaccccctaacctaacgtcctaatccaaacggcagcggcggcggcggcaatcaccgattcacctggtcaccgacggcccagcgggaggggacgttagggccgagggcgaggatggtgccggagcactcgaggcccgggtaaggggacgcgccgggcggcgcggggtaccggccctggcgctggacggtgtcggcgcggttgacgccggcggcggacaccccgacgagcacctcgccttcccccggcggcgggaggccctccccgacgtcccgctcctccagcacctccggcccgccggcgcgcgcgatcaccaccgccctcatctctccccctacctcgtcggggctcagctgctcgctttgctttgctcctctcgatgagtccacgcacgcgctgacactctgcgtctctgctgctgactcgtcgactggatattgagatgggccttgggcctggttgagtaaaattggcccagatagctgaaatctggtccagccttctaaaaaaagataagtacttcctaagtgctagtccttccgtttcatattttaagccgtttaactttttttcattcaaactttgttttgattgatcaagtttatagaaaaatattactaacatattaaaatagttttattgaatctaacattgaatatattttgataatttgtttgttttgtgttgaaaatactactatatttttatataaatttaattatactttaaaaggtttaactatgaaaaaaagtcaaacaactaaataataaataatatgaatgaaaagaagggagtaatacggtataaacgttgtttgctacattgtctatatattttgaaaatgaatcgattcggggcgagttggtattgactggagaatagaaagtctatatatctgtgtaattgaacatttggagaatactctcacattaattaaaaagatataatcattaatttggtggatcatacttgtactaaaacggataccttctgaggtatggcctgatatagacttccattaaaatgctattctcttacaacatttgagaggacaaatgactatactaattaatgcacaattttttttctaccacatgtctttctttttttttctctatccatatatactaaagttttcctctataaacgcctagagtcgacgaccattgtcacatttaacaagtatatttctctctttttttttcatttctcttatatgtcagcaacttaaaagtctgtttattaattgtctttgtatctgccctaattaactcttacattcaccagaaaaatgttcatacatcaggttgatatgacctaccgtaaatagtagtttaaagtttgtgtgtcaataataatgcaatttataaaaactatggacttattaattgtattttattattttaataattttaatgttagaattatgaatacgaagtctatacatcctatgctctcaatttagttttaactttttattttaatttcaaattaaagacttgcatgatgtaaccaatatgtacaacaactaacatattcagtcatcgtctcgagtggcaacgaatagagtgttaaatcatcaaattttgcttgtactccgtgcaaacatcccaaaaaaagaaaaaaaaagactggataattctctagtgatgatataaagttacaaactcgtgcaacacatggattgatggctacttaatgatattccatgcatatttatgaggttgtcaattttaattgtattttagtgtaacgaactactatacctaatcttgttttgcttttagtatgactagttactatacctcatcttgttttgtttggtattgcagaagaattgtttttatcttctttgttaagctacgcgttatttaaggcatcagaagtactatacagttggaagagaatcaaccagtaaccatgacaaaaatatcagttgagtggcggcaaatcatgtcatgctcgtgtgggacatagtactagtactactaatgggcgatagcaactcagcaaggcgaaagaaaagaaaagaaatgaaagtgaaaaagactgtgttctttatagatgagacggatattttgtacgtaaaacgaaatgatcactaatccataattaattaaatattagtaaaagatatatttaaggtaaatttaatatatctttttaagaaatattttttaaaaaaaatatattatttcaaaatttaaaaaacatgtgcacggaaaaataaggaataacgtgcgcactagaaatgacaagtgttgcaaagaaagctttccagattgagatggattcccacggtgcgggggcttcacccgcacgcgcgctctctttcgccaccgttgccggctaaccaaaaaagtggaacacgaagaagaagcagcagaagaggaggagcatctcgcaaccaccggatcgattcat

SEQ ID NO: 7054 - DNA, 25927 bp, Oryza sativa
aaaatcgtctcgcggtttcccggcgagttctgaaattagttttttcattcgtgtccgaaaaccccttccaacatccgatcaaacgtccgatgtgacacccaaaattttcttttccccaactaaacacagcaaggtttaaccatgcaccacttagcaatacaattattacaatctattaaaagcacattaacataacatacaacaaagtaaataaataaaataataggaacccctacactaacatgttacaagtcagctgtaaacacatgtgaaaaagagaagagaagagaagagaagagaagagaaggaaaacaatctatatattggtagccagttgtagcacagactctaatactgtacagactctaataacacgtgagtgtataagaggtgagaccatatattaatggtgtaatatatgattatagctaacttagctattagatcagctataaatgaattggagctaatagttggttatattattaaacttactctcatatgctttccctttctcagctccagctcattcgctattcgaagaaaaaaaaaactaccaccaaaatacgcaaaaaataataccagtactagatctcgactaatcccgcgtcacgaacttgctaatcagtcaataaacctaatcaggagacaccaaaccaccgaaaaaaaaaggagagaaataataatattcgcgcatccatcacgaccccaactcgtcctcaatcgcggccacccgccgacccagcgacgacagcgcagggaagaagggaggacgcgacgcgacacgagcgcgagaggaaagcggaggagatcgaggagaaactccatttccccccccctcgccttctccgatttccctcgcgtggaatccccttggactcctccccctcccgccgccgcgcgagccgggcacggcgagcggcgccgccctgcccccgccgatctgctctgccttctcctcaggttcgccgtcttgttggattcgcctttttttgcgttcgtttcgggcgccgtcagatccccgcgccgtgtttggtgagcgtgagctaacggaatggcacggccagatctcgtgggggggatccgaggcggtcggcggatgctagatctggggcggggagctgtacgatcgccgccgcgttagatctggtcccgttgctcgcgccggattccgctgcttttgttgttcaaattgttttggtttcgagctttacctttgcgggctattgggttggatgctccgtgatgcttcgaagctacgggagaatgttagtgatgatgcttttttggatcttatggacgaattttatacaggggcttgcaccgaggaggaggaggaggagagagctgagcagaacaagctagattctcaaggaagggcgccatgaagaaagtattcgatcaaacagtccgggacctgtacgtgattcacctgccatcttatcgtataccgtgtgcagttcgagctccgttcgtttgcttgatacaatatatttctgtcgtaatttaatctgttctggtctttgtttttgcagaaaaagagaggtgaacaagaaggtcctcaaggtgcctggtatagaacaaaaggtaacagagatctctgctgctccctcacgcaaaagcatgtgttaagcatgatagttactgaatttaatggattgctcgcctttcaattttcatgaagcataatcagtgacatcagacttattccattttgctcgatggcctcatacagattcttgatgccacaagcaacgagccatggggcccacatggatcactcttggcagaaatcgcccaagcaacacaaaattagtatgttttcttcttgggcttttgttatttgatcacctttgtaacaaacaaaacctaattttcccggtgccaatgccctttgcgtgcttgcagccatgagtaccagatggtcatgaatgttgtgtggaagaggatcaatgacactggtaaaaattggcggcatgtttataaggtgtgttttcttatttgcttttaccccttaaccttcagtgttctctccttttatggatgtaagtggaaatagccacagcaatatgtagggcagtttattctgatgctatactatgcttgatatgtagggattgattgtcctggattacttggttgctcatggtacagagcgagttattgatgacataagggaacattcttatcagatatcggtattgctggaaatctattttctgtttcatatactccatgtagtttctgcctcaagtttcgtcagtatcttagttgcttgatgctcattaactttgttattataattgcagacactagctgatttccagtatatcgattcgagtgggagagatcaaggtagcaatgtacggcggaaatcccagagccttgttagtttagttaatgacaaagagaggatacaggaagttaggcagaaagcacttgctaccagggacaagtgagtgtgcttgcttttcgttatattggtacattgtgttttgtggacatgcatattctctgttttattgactacttttatgtgttcatctgaagataccggagtgcattcgccaccagtggaacacacaggagcccaggtggctatgacaatgaccgctatgaaggaagctatggcagtaggtatgataacagaaatggctacgggggagaaagagagtatggatatagggatgatgacagatatggtgttgctggaactactcccaatcgggaaggagatcgttattctagggattctaatgagcagcgctacagcagagatagagaagatgagtacaaaggaagtcatagcaaccatgaatatgcagaaggatcaggtcgcaggagctatggacgagatagggattcatatggggatgatgaagcttattcatcccggtccgtttcattgtttttttctggatttaaatttttacacgttcatatagcagtcaataagcagcctataagattgttatttcattaagttgctaatattcacttggttatttatggttctttatggaccctaacttacatacatttttccatcacagtggccggcaaagcaatgctgacggacctactcaggatgagaggtaaatgatggagaaatgctaagttcataacatattaacttgtcttatttgagcaatttatcttatgttctgtacctccttcggtaggcccatggagcggaagccttctaaccagcagattgcttcaccaccgccaaactatgaagatgtcacaagagatacacaggataataatcatgatggacggtatgtattttatgttataatgtttgatcagtagacatgacaacgatctctgatttctgaactaccgttcaatatcagaaatggagggactgtgcctgtgccagttgctgcagcaaaggtgtcttcacctccaagaacaagtgtacccccaggtcaggtgaatggtgtacatgataatactgtggaagacgtacctgcaccaccacctactcatcctgaagttaatgggtttgacgagtttgatcctcgtggatcagtaccaggtatattttcctccttttttgacacattgcattgcatatgaaccaaaagcccacattaatagaaagcatcacacaatattattttctgatacatttatgaagagaactgtagaaggaatgacccctattctggcattatactagtatcaatatcttttggtagtaattgagtactgattttttttttcaatatttgcatcccatgtcagatacctcacctccagtgaacccctcacaagccgtgaatagcttggaaatggatttattcggaccagatcctattaattcgttggctttggtatctgtgcctcagccaactgccagcccaaatgttgagccatcagcaaatccaggatttgagagtaacagttttatgggcatgccaccggcttctactggattcaatgaggtacgcgtctattgaacataaggccattcacgatactaatctcatgttctaatggtggcatggatctgttatactgaattgtagttctatgattttgtgggcttgaataattgcacgcgacaaagtgacacacactataggacaaaactttatttaaatcatgttgtttcttaaatgtatttaaacagcagcagtagtggtcacagaattgtggtcagtacaaactttttgaattaacatcaagatacttgttttggtgatgggatggttgtgttgttctatgtttatttgattggaatttgccttgtctggtagttaaatccaaccacctgttcatcttatccttttggattttgaccttgcaggcctttgatgcaactaatccttttggggatcctacgcctttcaaggctgttcatgaagaaactcctgcagtttctcagacaaatgctgcacctgctggttctttccatgctactgaacctgctgcagatgcaaatcctttccagcctgcttcagcagcaagctttggttttggagacactcttggcgacctctcttttggatcgaatgctgcacccgggcagcaagatatttttgtgcccacctcatcacattcagaggtaccacctgcaaacccatctgtgcaccctgaacaggcagtcccatcttatgtctcctcccaggcacctcagcctgcagctgctggtccacaaactcatgctgctcccgcttcatttgcttctcaagcacctcccacttcatttgcttctcaagcacctcaagcaggggcaccctatcctcaggctgcctccacatttcctcattcacaagcatctcatcctgcagccactaatccatctacaatccctcagaatgttgccacaccatttgctcctttacaaatgcctcaacctgtaccatcaggccaatcaaactattttatgcaaccagttccagggactggcattaatggcatgtctggggctccttcacagaatggagcaccatcctacatcccttcacaggcttctcaatttgcagctccaacaaatctacagccctctcagccaaccttccccccacaaactgccatggcagcttcacaggcaacatcaatttctcgaggggcatctcagcctcttgcagtgccgaattcaatgccttctggtgtgaactttccattacaatcaagttcatcagctccccctgaaacaatcctttcagccttgcaagttagtcagtctgagccagtgaagaaatttgagtccaaatctacagtttgggctgatacattgagccgaggtttagtcaatctggacatctctggacgtaagtggcttctctctggctgtcttctacacttgtacttttgtacttttgtgatctgacgtaatcttatgtctgttttacagcaaaggctaatccgcacgctgatattggagttgacttcgattcaatcaatcgcaaggagaaaaggcaagaaaagaaagtctctcaagctcctgtggtatctacgatcactatgggcaaagccatgggaactggctccggcatcggtcgggcaggtgcgagtgccatggcacctccagccaacccaatgggtgcaagcaggggcattggcatgggtatgggcgctgctggttccggttacggtggtggaatgggaatgaaccggccaatgggcatgggaatgggaatgaaccaacaaatgggtatgggaatggggatgaaccaacaggccatgggaatggggatgaaccaacaggccatgggaatggggatgaaccaacaaccaatgggaatgaacatgggcatggggatgaaccagggtatgggaatgaacatgcggcctcctatgggaatgggtccaggtagtggatataatccaatgggtaccggatacggagggcagcaaccatatggtgggtacaggtgagattatactgtacaatgcgatactcagtgaggggttgagaaacagtttaggaggcgtttggattttggtcacctggattttctttatgtatggtttcttttgttttgggtggggggggggggttataatttttcatcactattcttttcctatccatgttggatattgtatctactaaatatatgacatgtgaacgggggcaatgctacaactactgtgttgtgttggatgcaaagccttaatactataatcatcaatgtagctgtataattctctataggatgtttttttttcagtaaacattgtgattgtttcagcgttcttgctggcttgacaataaaaaggctgtaccattttgttcaagctatcttcctttctttttatgtcgtcacattttgaggtgcagacctgcagtttttgtgtcagatgtcacccgtcagtctgcaaatagtagtatatttttgctcgtccgaactttggaactacaggaatggcccatctctactgtcgcctcttttctgttctgatgcgtggtcacacaagccactgttgacacagcaactttgtatctccattattgacacagcaactttgtatctgaccataatgaaacgaagaattttgtgagttctttttatttggctgggattcttacaaaaactgcaacctaaccagttaagtacttgaatcttaagtcgaatcttgaagtttgtaaaacgtgtcccaggagcagcaattgtcgcatgtcatttaaccagctgtatgtgaggttcaggtcatcaggtggcatcaaaacgtgtatgcattggcgcatgcacggtcgagaatttataagtcattttgactttgctcacgctactagcgtcctagctacaaaatctcgtggccaaggtttccgtttcttcttttgagaatcccgcggtcaccacaagccgacgcctctaaagtcaaaactggttaaatatcgagctttgtacgccaacgagttgcagtaacctctgcgtgataatattggcttaatcacttccatcgattacctttcagcttatagccgtaaccaaaaattaaattttaaaatttagtttcgatgttgattttaggagttttcatcttagtttttttttttaattttctctgttttaaaataaaccaacctttatacatctatatcaaaattcatatataaaagtcggtttatttttggaacatatgaagtattatttgccttttaaattgctaataacatatttataaaagttttattcataaattatttttaagttgttaataagccgttagagcttataatcagcaaaagtgaaagtgattcttgtacacttatgtctcattacccaagtataagaacacaggtcagtcatccaccctagtcaaaatcaagactccgacccttgcatcatggaggcctaaagcttaacgaaatggccatggcaccattctttcggaagcagagaaaaagctccggttgagctgtatcgctagtactaccatatttgtgatgcaagtttgacctaaaaacgcagggtcccttgcttgctctggaaaaagaaatcagaagacgattgcagacggtgtttgaactcaaaaaatcaaaatgattggccctgaaaaagtctgaccacccacagttaagaggaacacaaattgttaactgttgcttgcactgaaggacattgagcagtgaattcaccaggggttttaacctacaggtttgcagcaagcgtaatcttggtaataggttgtaacagcatattctaatgactaattagtcggccaataataattccaccagatacaaatgtctgcaaaactctgaatactagtacagtgcattttgtgaggtgcaatgcacactatagaatctgaatctctagacagagcacagcattgttttcagtttttgtacagtgattcagagttgctgacatacagtacagtacagtacattgccctgggctcagaaaacgagcaggattgcttcttcggatgaactgtgcatctttgccctcaaactgcagcaaactcgattgcaatgttggcgtgaatgcatgtgcgaatgctcttggtttgtaggtgtcgcgagatccacgaatgccggtggtctctgcgtgctctaatggcgatacgacgcctctcgcttggattagctgcattctcgctgtgccccttttcctccttttcttgcttccttcgtctctccgagtgactcatcctgctttagctttaacccataataaacttgtcatctggcttgcattgcccatggtggtttaaccagggttcacgctacgtgtgttgacattttgcagatcactgcagcattgggaactgtgtcccgttattagttctatgatcactgttaattactcgtgattccggtaattaggcttgactgaagcataaatccttcagatcaaaggccatttcttgggaacttgctggttctttgtctgttccctctgttagctttgtttgcaaaatgcaaaccctttattcacatcatccaacgtgccagagttcgatcattctagtaatttgagaacaaaattttaaaaaaccacattttacagccataatcttcggatgcaaaagttggcttttgacgctgtccggcagagcgcatactatactaattaagccaatgcatgcttggttttcttagcttagttttgtctgaatatttcctgtgatgttgagagcattttgtgcagagagcatgtagctctcgcttcgttgacactcgccatcgtcgtgcctagtgttcacattcctccttcctctcactctaagcttctgacagcaccaagtgattacagtttgatttgcttcggaaccaattctgaactttgcagtgcagcatcgacggtgcccttattactagcttataaaaaggaggcacatgatgcattgcaacctagagtccagtccatgaacgatcatatctacctgcactgcattcctctgtgctcgactctcctgtatcttcctttctctgaatctctgattcatctgatgttcattcattcattcgtctgctgctgcactgcactctgatgcagtaactgctgcttattctgatcctgcaatgcttctgctgaattctgcatgtatcagctcaatctgaagagttaattacgttgtttctggcgtttcatttcctgaaggtaatagcaaacaatttctctgaacttcatagtaacatgccactaagtatctttttttttcttttttttttgttctcgtgtcttgtactagcagtcatcaggctacaactagctagctgcatatacaaataacctaaggcaagtcatatacaggttgcttgtgtgttctgaatcatgtaatccactttactgaattcttactgcatctcttagattcagagtaagtaattcatcgtgtagcttatatactcatcaagtcaaaagtagtactagtagagatttctaatacatttcatctcacacagttgatcgttgaacgcttttttttttctctctttcagttgatttcccgccacaaagtgcacactagtagagacgttgcgaaagaatttaaaccgatcgatcaggcggggtggcgcgagcgagttcccgccaccaccatgggcgtcacccgcgcgcacatcgtgaagaatgacgcactggaggggatgctgggcgagttcgtcggcggcggcaagggcggcgggaaggcggggcgcgcggcggcgaggcactcgtcgcggctggtcgcggcgctgacgtgcctccagctcgcgttcgccatctacgccaccttcctactctactacatgagccccgccgtggacctccgcgccaagccggacttcgcgtgggcgacgcgcatcgcgcagcactggaagcagctcatggcgcagcccgacggcggcggcggcggcatggcggtgtcgccggaggaggtgtgcgagcacgagagcatcgacttcgagcagaagaagtcgacggacgccgtgatgatccgcctcaagcgcgagctctacgacgaggtccgcgacttccagcgccggagcttcggcgccgagacgctgccggagctcctccggatgcgctcgcggtggagcgccgccgccgccgccgccggcaatcagccgcgggtgacggtgatcctgaaccacttcaagcggcggacgctgtgcgcgcagctggacacgctccggcggcagacggtgccgttccaccgcgcctgggtgctcgccttcgggagcccgaacgaggcggcgctccgccggatcgtcggcagctacaacgactcccgcatcagcttcgtctcctccggccacgacttcaagtactacggccgcttccagatggcgctgcagtcggagtccgacttcgtctacgtcctcgacgacgacatgatcccgggcgcccgcatgctcgagatcctcacccatgtcgccggcaccgacaagtaccgcaacgccgtgctcggcagcatcggccgcatcctccccttccgccagaaggacttcaccttcccgagctaccgcaagttccgctccaaggaggccggcctctacctccccgacccggcgtacgacatcgccgtcgaccgcatcgtgcaggtggacttcctctcgagctcgtggttcctcgccgccgacctcgtcaaggcgctcttcatcgaggtccccttcaccttcatgaccggcgaggatctccacctgagctaccagctgcagaagtacatgggcgccgggtcgttcgtgctccccgtcgacgccggcgacaaggagacgtggggggacagcgagcaccgcctcgcgtacgtggcggagacgacggtgatcttcaaggacatcgtgcaggtgcgggacgagcagtggtggcgcgcgctcacctccggctacgtcacgcagtgggcggcgatgcacccacagaaggtggacgcgctcttctacgcgcactcgctcggcgaggtccgcgcgctggcgccgctgctggagcggttccgcaccaccgccgggaggaaggcctacctcgtcgtctccggcggcggccactgcccctgcgaggaggcggcggcggtgctcaagtggcccaaggttgtgtgcaaggagaggcgcttcaagatcttcgacctcgccgtcggcgcgctctccggcccctcccactccgacgtgcccgtcctccacgccgtctactccagcatgcgcggcatcgtccgcatgcacaacccgagcgtcatcgtcgccgtcgccgacgtcgactccaagatcaaggacgccctccgcatggccgccgacgccgccgtcaaccgcaccgccctcgtcctcctcccccgcaactccatctccaaggttctctggatggccaacctccgccccacctcactgcccagtaagcttcttctacctcaaagctctaatccgccattgttgcattacatcaaagctctaaccattcgggaaagtgaattcatacctcgaggggatatcccctggtttcgtgaatacacctaaatagtcatcaaaaaatatataaaaaaaattagcaacataaattaatatgaaatatatcactccataaacacataagtttaaattcaacttctataagttataacaaaaataatagatatagttgcgaatgtgcgataactattttcagtttaatttgttatctttgttgcaatttatagaagttaaatttggtcttgcatgtttgtggaatgatatatttaatattaatctatgttatcaattttttttattttttttataacaatctagatgacatgcaaaccacgagtgtatcgagggatgaaaatccagatcctaaccaatccatggatttcacgcagactggaacaggatgcggatctcggtgaacatcatcacgcagaaccgggccaagtcgctgcggcggctgctggcgtcgctgcgggacgcctactacgtcggcgacgaggtgccgatcagcttcaacatggacagccgcgtggacgcggcgacgctgaacgtcgtcaacgccttcgactggccgcacggcggcaagacgctgcggcggaggatcatccagggcgggctgatccgcgccgtgagcgagagctggtacccggcgaccgacgacgactacggcctcctcctcgaggacgacatcgaggtctccccctactactacctctggatcaagtacgccctcctcgcctaccgctacgacccccaggtctctctccctgagctctcctccatctccctctacacgccgcgcctcgtcgaggtcgtcaaggagcggccgcgctggaacgccaccgcgttcttcggccgcagcaagaaccaccaccccaacaccccctatcttcaccagcttccctgcagctggggcgccgtcttcttccccaagcactggcgcgagttctacgcgtacatggcggcgaggttcaccgaggatgccaagcagaatccagttcagatacctcggtcccgcaccaatggctggcaggcgtcttggaagaagttcctcatcgacatgatgtacctgcgtggctacgtcgcgctctacccgaacttccccgaccagagcagcttctccaccaaccacatggagcccggcgcgcacatcagcgccaagggcaacgtcgtcaagcacgacaagagggacttcgaggtgccgctcgtcgccgacgacttctcgccgctgctccccgccgggaggatgccgccggcgtccaagctccccgtgctcaacctcttcaaccagccggtctccttcaaggcgctcaaggccgccggcgccaagctccgccaggacgtcatcggctgcgccgccacgcagctcgtcgccgtcgaccacgtcaccggcctcccaaagaactgcaccgccttctgatcccaagaaattgaaattgcatatatatattttgcattgaatttcttcgatgcatgaacacgttataaacgatctgatgacccatacgttgttttaccattcgtgatttttattcttttgctcacgatctctacactgtatttagctgtggtttacatgtctcgtttatttcggttttctttgtatcatttagcagtgaaactgaagggagttgcagagcattttcgcgctctgtacgatggtctgtaaagggctaaagatgtagccaaaagtggcttctctttgttattgttcttgattttcaccatagattcatcattcatggaaagtacgctgctacctcaataagaactgttctagttgtatagtcttcaattcctctgtttgtgtacaatgatcttcaattcacaacaggttcatgcagagtacattgatttcagagagagagagaagcaatcttgagatggttctaggacagtaaatttgtgaaggaacgacagcaatttcccaccattttgggcctagcaattctgctatgcttgatgtttcatactactacttgcttagacaggagctccagtatccaaatagcagctgatccactctctgcttttaattgtaaattttactgaatgtcataaatcttcgggtgaacaaagtacagaaacagtaggagtatgactctgctcatcgaataatcgctactagcaatccatcttgagatttcaaccgtggagaagaaatggtgagaggaattaaagatggaaaagagaaacagagcgcctcagttttagccttcaggagagtaatgccgacttgcagagagctgcatatgatttagtcgctgctcccctctcctgcccggtcgcccacgtggacgccatcggccatttaggcatttaccaatctggtgatctgccggacctcatcgccggtccgccggccgctggcgtcttcactggtcatcgccggccgcgtccgggcctcacctagtcacctcccttcggccttggaccaacagcccaacaggcaattccttcgagaaggctaattcgcgactggtggcgtgcggagaggagggcggtggacggcgcggtttctttttttttttttcggtttacagtttcctttttttttctgtttcatctttccgtatcgccctttgaatcgtaggaataaaaaaacggaggaataggaaaaatataggattctgacaggaatgtaagtgtaaaacagaggattgcaaaacacagaaaaaacataggaattatcgtttgattggaccatagttaaaatacaggaatcggatgagagagatagactcaaaggatttttaccaagaggttggacctcttgctaagtttcctctaaaaccaatatgcaacaagccattccataggaattttgtaggatttggaaaacttcaacctttgaatcaaagggctacatgggaaaatttcctgtaagatttcaatcctatgaaattccttcataattcctttgattcaaaggggccatagtattttcgccttttttaatacgtatttatagaactttgtatacatacacatacaaactttatatacgcgtatacaaactttatatacacgtatataaactttgtatatacgtatacaaagtttgtatatgtgtatattttgggtttttatccgtacgcactcaaacttagtatatgcatatacaaagtttatatacacgtatacaaagtttgtataagtgtgttttttagacttttttatacatacgaacacaaactttgtatacatatgtatatttttatacattaaagtgtgtatgtatatacaatatacatacatataaattttgtatttacgtatacaaaatttatatgtatgtatatagtatatgcatacgtatatacactagtacttcctccgtttcacaatgtaagtcattctagcatttgccatattcatattgatgttaatgaatctagataggggagtggattctaatccctcgaggggatatcccctcgtatacctttttctttcaaattcgatgtaaatagttatgaaaaaatctgaaaaaaattgacaatgtagagtataatgatacctactagtgcaccaaaattcaagttcaaatttgaactacacatcgagaaacaaaaaagacaaatttagatataaacagtacgctactattcatatgctgaatttgtcttttttatatctcgacgtgtgagttgagtttggacttaagattttgtggagttgtatatatatgttgtatgaatgttgtcaaatttttccagaatttttcataaccgtttaaatggtttttaagcaaacgaggaaacatcgcttcgagggattagaatagtttcccatctagatagatatatatgtctagattcattaccatcaatatgaatgtggcaaatactagaatgacttacattgtgaaacagagggagtatataggagaagagagactagagggggccagctgatcgcgcacgtgcgcggccgcgcgactagccgcggatcagcagccccctaatgcagaagcggattcaacgtgggtgcctgcagggggacttgagtctcactacacccacaagacctatggataccccctcagcacccttttcgattttttcaccatggatgataaaccaaaggtctctagatggctagaggttgaaaaaactgcgtaattgagcccccccaatttttttcccggatccgcccatgccccaatgccttggcctcctctcacttctcctctttttttctaattcttgatttgatttgatttgatttagtgtaagaactccaatatttctattaaaagttttgaatcactgtataactagcatgtaacatgttaggccacgtagattacatggctagaattattatatttttctcacataatagcatatatattttcacattttattaataaaatatattaaatggtaacataattttaagttctgtactaacttgatcagattaacaaatgtgtaataacttaattatatttctatatagactctagattcctcttccaatattccttcttttttaatttgaagtttcgttatttataaattttattcctatatgtactctaaacccttatttcaatatttattatttttaaattccgaatttcagttatttataaattttatttctatatggactctagattcatattccttattttttttaattccgaacttttgttatttataaattatacttctatatggattctaaactctttttttcaatattccttatttttaattcttaattttagttatttctaaattgtattcatatatggtctctagactccttttccaatattccttattttaatattcctcaaccactcgcagagaactccggtgggatcgctaccacgccggtaattggaccaggtgtgtagttgtaccttgaccactcgtaaagaactcgtagaggtggtgggatcgctaccacgcaggtactcggaccaggtctctagtcataccttgatcactcgtagagaacttttagaggtggtgggatcgctaccacgctggtactcggaccaagtgtgtagtcgtacctcaactactcgtggagaactcttagaggtggtgggatcgctaccatgtggctactcagaccaggtgtgtagtcatagctcaactactcatggagaactcgtagaggtgttgggatcgctttttaaaccacgcctgtactcggaccaggtgtatagtcatacatcaaccattcgcaggagcgcttgagttgattattacatgtgcttttcatgtggccaacatgacatcacatacctaacttataagcatgtcagatgtccattcgcaatcatgccgggtgatcaagctgacaatgctcgcgaggagattgtatgtagcaaccttttcacaaataaactgggtcgtgaccggcactaaatgtgagataggccgccggtatttgttggtaggtttggtccgacaagtccacgtttgttcgagaacgttctcgacaacggggtgtaatcgacctctggctattagagtgctcgatcattcctaaaaaatattttctataagacaaaatatatagcatagaaagctgagtacatactcagaaaattgtataaatcttctagtattgcaacatatataacatagaaagccgagtacatactcagaaaattgtataaatcttctagtattgtcaggatgtaatgagcatatttggattaagaatcgggtattatgtataccgtaaacaagcgtcatatatacaaaaagaatagagtaagccctcagtattaaatggtaatcggcctaatatagggagcatttgcacaatagatattgtataaaaatatgttatatgtaaacataataaattattgatatgaaaataggtatggtaaattgtatatataaaatattatgtatctttgtagatatatgccgaatatatatttgaaatttttagattaattgaaatcaattagtctactaattacctttttggacacatactacagtctacaggtaatatgcgtgtctgtctcctggatgtccatgtgcacgtttctggtaagtgaccaccaaacaagcacgttggttttgtcctttaccgaataggtgcatggatcgggtcatacggtgtattcgcagttacagtagtagactcgtaggtatgtgtcgacagagtagattgtgattacggtatttgcatgatatgagtatcgttcgtgctaacgtagaagcgaaattgagataaaagagatatagacaagtatttttatataggtttgggctccttgattgtcaggtaatagctctactcctgtcgatcgaagccggtgttgctcttattcatcaggatcatatgagcacaatatttgggtctaacctacctagtcgtcgtcgacgtggcagcatggaacaccacatgtagtagacgacagggtagtcttcttacttgaatattaactagacgaggttagaggatagctctagatccctcatgtcggcctctgtgactccagattgggtctatctaggcatgtccctcatgtttgtgtttgttggcatatattcgtgtgtgtcccctcttcttctaggggatcttgtatttatacccacgaatatcccttttttcaagtagaactaggaagatacatatggatatgatccgaataatccttgtagtttccaacttgaagtagtttccttccttatctagaacacctttcgtatatgaggtatgatttggtataagactagttatatggtgggcctcaccgagaccaatccaagatcattaagcatgccttatccataacacacaatatgcattagttgttgtcgtgttcgacttgatgatagatgggaggatgcaagcgcacgacaagtttgcaggggagatcaacatagtactctgtactcgactctgattgctcgagagtgccgatgtccgtccaatgtgaagggcagtcttcccgaggtttaggttgttgagtcttggtttgcgttgatttgaaagtaatcagcccgggtgaactcttgtggtcgacgatatcgaaccgttgttagtcaatcttggtagatggaaattgttggtggcgacgttatctagtcgggtcatatttcccagagcccaagccgttgaagtatctctcgtcgaaaaaaccacactagcaatgtcttgacaaagtttaagacaacgaggatcccgctccattgaagagaacgcgctccgattgggtcgtatctcctaaagccgaagtcatcagaaagttcgccacttgaaacccatctcgtcaaaaacttgaagcaccaagtcccctacctagtgctccactatcgagggtggatatcccgaccacagtatttatacagtatggatatccctacctggtgttaggttatacgtgagattgaggtaaaagagacgggagacagatattttcatacaggtttgggtcccttaactaaccggtaatagccttactcatattggccaaaaccagtgttgcctttatatataaatatcatacgagtacactatttgggatgatttaatctagtctttgtcggcttggcggcatggagctctcacacgtaggcgacggctggtgtagtattcgttctcggatctcgaatatgaactcggcgagattggaggtagcgctagatccctcatgtcgacctttgtggctccaaattgggtttgtctaggcttgccttccattggtctagatttgtattggcttctgttggcgtgtccccctcctcctaggggtcttgtatttatactctcggatgtctccttgtccaagtaaaactagggagataagtatgtatatgatccttgtccaaatagaactaggaagataagtatatatacgatccgagtaatccttaagtgcccgagtagaagtttgttttttcttctttatccggaacaccttccgtatatgaagcataattccgtataagatttagtatatggtgggccccgccaaccccaacctaagattattgagtatgcattatctataacactcattcctagaggctagatggaggaggctgccccccagtaccacgtggccctccccgaggggagtcaggcccgaggtggggcggcagccactccttcttagagactagatggaggaggctgccccccaataccacgtggccctcccccgaggggagtcaggtccgaagtgggacggcggtcaccccctcatgtgactaggggtcgggctcccccgaccccctcagcaggtcgccacgtgcggtgggttaggtggccaccttcgagcgctcacctacccacattaatggtgacctgagcagacgcgccacgccgcatttaatgtggcgtgcaccgcgcgctaatttggtctgtgactggtcgaatgaccgacaggacccggggtgtcaggcgtactattgcatgggtcagggggcgtgcaccctgtcttgtcccatcagtcatgatgacgagaggtcttaacctctcatcctggccagagttggtccgtccgccctggtcaattggggattccgtttcccggcgcaaatagggacccagaagtctccacccattaatagcagctgacatgggcgcccctcgtgtcaggcagcaagatttgacaggccccatcatcaagatgacgtgcgcttgcttcccaagtcaagagacaaacaggcatttaatgcaaaacacttctccaccggagctaggtttttgggcccatgtggtaaccccttgagatataaaaggaggtccaggcctagaaaaagggaggagggatcgaggacgatccattggacactctagagcagtctctagccacggatgatcaacaccacattttactccaacaaagagatcttataatccttcactcaaggagcatagcacaggagtagggtattacgcttcttagcggcccgaacctatataaatccttttggtctcatcatctttgaggggctcgaccccctcaacacaaacactgcttcgctcaccgaatcctcaaatctcacccgctgcctccggctgaacttacaaaggagggtctcatgaccttccgctagagaggatcactcctcgacaaaaccaactagcaatttctcctctagatgggttcaatccagcaccagatacacaatgcaacatgaaatccgagccaagttggttgaaatatagggattgcgaagaacaagaaaacaacaggtcaactggtacctgggtagaggattatatacgccggcggtagctcagccacatcgtagccggcctcctccacaacttgaagccacaccaacgaattggattcgcgcagatcggcacagccgggcgatcgatcggcggactagaggcgatctatcgtatcgtaggacgtccgacgctatcgatgagatcaataggcccaataggcccattgccgtgaggcacccgcacctctttgctcagtttgtgcgagttttctttgttctgttttggccatgaactcttcaagtttgtctaattctgatcctctacttctaaaccgtttaatgatgagcaatgaacgatgggagaaagaaacagagcgactctgtttctagtcttcaggtcagaaggagagtaaggcagatttgcagagagttgaacatgatattgcgaattgtgacgggctgatgatgtacttagtacattttcatggacatggcaggcccaagttttattaccactagcagccgaacaatatctaaagaggatttgattcgttattgtattcatgactcctcttaaatctactgtagtttcttctcaagcagttgagccccgtgaaaaatcactcatactaaggtggagtactagaacacaagatgaagatttgaatgttcatcatccgcacacggtacatctatggtgtggctgtgggtagtaagacgataaataatctccattctgaaccctcgtttgtcagaattagtttgcattatgttctttcttttgtctttatattattgtactgatccggcacaacagtagatttcccattcataatctgcacgacagtacagcaatgttcaagtgcccactggtccagcacattattaggtgcccaactgcccagcagaagccgcaaattgagttgtcagtaatcagcagtagcgcatagttataccagaggtagccagatcacaagaagaaagaaaaagttcagagcataaaggaatatatctcctcaaattggatgatcacaacttgtacagagggaggcaccaccaaccaacaaggcaggagaaacagaaaaaaggcatatagagatatataattaattgctacaaagtaattgctagtatagaaaccaaataacacttatcaatccctagacatagatgaactgcaaaaagaatttttcggagttcagtacatcaagctccaatataaactatgatggatgtcccccctgagtagctactagcaagaagaaacttctaattagcaaaccaacaaactccacttcctcatcaccccccttaaaaaaaacacatctcattttcctcctcctaattgactgactgactagctgcaaagttttcctctctaaatctgtctccctctgctgctggtttagctctccttctcacctacctaattttgcaagcaactgcaaatctgcaatgcaacaaccactgtgattcatctatttctcctgccctcctcctctctctctctctcacccacctctatacaaaacaaaaaatcatctttttaaggggaaccaattaatcaatagacaaaaaggaaaaaaataaaaccccaagaaaagccctagtgaactaacgccagtatgaccccggcgatcgatccatggattgatgatgatgctgatgctgatgctgatggaaaccaatgcagagcgggtggtgatcgatgatggatgatggcttcaggagggcaatgctgctgatgatcacactgctgtccatgtccatgtccatggtgatggtgatgacgaggaagacgacgcactgacgactgaagcaagcatgcatgcatacatactaacatgtatacatatatagctaagggggactgagaccgacgaccaaccgtcctccgacgacgccgccgccgccgccgggagattaatcccggcggcggatgtactgcaggaggtcgcaggacgggtcggcggtccgggttgccttctggcgcatctccaccaccttcttgtgggagttggaatggatggacggcatgaaggtggggctcgccgccgggcggtactccgggaagaggcggccggacttgtagcggacgccgcacgcgttgcagagcgtcttggggccgagcgggcccgcgcgccactgcggcgtcttctcgatctggcaatgcgtgcaccgccgcacggtgcccggcgggagcgcgagcgcgccgccttcctcgtagtcggcgtccgccgcgtcggcgtcggcctcggcgtcagaggcggcggccggagcggccggcttcttggccttcttcttcttcttcatcggcggcgggtgcgggttggactcggcaatgctctcgggatccgagtgcgacgaggtggacgagtacattggcgtcggcaccaggatggtggtctccgtcgccgccggcgcgccgcggacagccgggaacgcggacggcctagaccgtttgctgcgcgcgcgcgccgggatgacgagcacgggcggctccgggcgcggcgacacgggcgcggaccacgcgcggccgctgccggagaacgactccgacgaggaggacgccgacgaggaggacgacgaggaggagcccccattggttgccacgttgaagccgctgtgctccagcacggagatggggctggagctgcggaacagcgcctcctccgccttgtccggcagcacgacgccggcgttcgccgtcagcgccgacgccttgatcggcgccgcgcagttgacgcccggaaaactcggctcgtgcgggatggttccatcgtcgaacagccccgacagccactccagctgcgccatgtccatgtccagctcatcacactgcaaacgacaaccattgccacgtcagatcagtcacatttcctctacagctgcattgcagcagcctgctaattttgtcgttactagctgttcatgttcatggtcagtagtactactgctagtaccaccatgacatcataatttcttccatccactactactgtgtaaatctactgtaaatcaatcatcattagcggttggaggaaggggcccaggtttaatttcggttgcttaaagcggagaaaagggttactgctatgctaggactgtttgtaccacgttgggtttagtactagcatagtatagttgttgggcaggctaactacccaaagtaaatgggccccaaaaaggccgaaaccgccgtaaaaatccaaccaaacggaagcaaaaaactcccatcacgatggcacgccgacgcccgtccaccgacacggccatcgcctgacccaactaccccattcacacacgacgcgcgcgccgcgtggcgtggagcgggcgccaacgcctaattggcgcccagctgttttgaacttgaaccgctcgaccgacgccgacgccgacgccgacgccggcagcggcaatatcgtccgaattcctctaaatcggccgtacgctcaaccacggggaggtggtgggggagggggaacttaccgggccaatgtgggcgtccttgcggtcgaacacctcggcgccgagcgcgccggccgcgtcgaacagcgccgacgcgtcgtccttcgcgggggccggcggcggggggagcgccatcatctgcggcggcggtggcggcgccgccgccatggtggcgtggccgccgatgatgcgcgaggacagcgggctccctggcgccggcgcgtcgagcaggagcacgtcggcggccgactcctccttggggaagtcgagcaggtcgtcgatgtggtcgaagaggtcgccgcaggtcgcctccaggaggctctgctcccgcagcatgtcctccacgaatccaacgcccgccattgctgctgctaccaaatcacaatctgttcaccgtataaatacagaggggagagaatgaagaaacgcgtgtcaataatgcctcatctcgagatcaatgtttggatatgcatgcattaaacaaggcagtatccacaataataagaaagcaaattaaagcaacacggatttattcacctatgataaaattaatcaattccaaggatatgatccacctatatcaataataagataaaattcgtataaatggttacacaacacaccactgccagaaatggatagatgacgaggcgttactaatctatccctactactaccagaagaagtgcaaatctatctctctgagctgtaaatcaaaagctgcaggagggagatttttttttcttctctttcaaagtgacggcaggagcgggctccatatgtatgcggtgcatgatgacgcgcttccgtgggtgggccccacccacccccagccatgtgaccccgcatgtgacgggtgaattttcttttctttattctgaagcaaggctatacaatacagatggcgtactactctacccagggaagaaaattaatatacactcactccgtatataaaataaaaataataaaaaaataataaaagtaaaaaagaaagaaaaaatctgggcgtttgtttgattgattcaccaccaaggactccatccctatgcgtacgagtagtaaaagtcaaagcttgccagcacaaggaatttgtcaaaagggcggggggattagctgacgtggaggcgccctattggtccggacgcgtcactggcgtgccactggacaaagcagccgcctccctcggtaaaagcagctaattattgccgagtcctcgggtgaaaacaccgaggaattcatcaaatttttttctcgcatcaatcgcggccattcccacaggaggagggagcagtacggatcatgcaaaggcgaatcttgccatggcggcaatggaaggaatctttttggttttttttttccctttttgttgttgtttttactgcttgcttgccggcgtattgcctctcagaatttgcacattttttctcactgtccccaaatgtttccagataatccagactgtaaaaaaaagtactacaaaatcagggggacgcggttgaaaaagcttggaataatagcagtagtaccgacgtgtgaaccctgataatcccatccaatttttccatgactttctatccatctagtagccggaagcttccctttagtaattttactctcgatttttttgaattgatttgaaaattttgaaatcttcaaattgagaaagagtccaaatcggaggcttccgagtttcgtcatcctcctatattcctcccctttcgtcttccttccggggaagatgaatgaagcaatgaacgtgcaaaaaaacacgcatggcaatgaattaagctggcgacgcggcgaaatacggccgcgcgccaccgggaagccaacttaaaatgcaaagcccctttgaattcccgatcatttcttgccatttttttgaatttgaagaaagcggcggcggctgattttgcgggggggggggggggggggg

SEQ ID NO: 7055 - DNA, 26690 bp, Oryza sativa
cagtagtccatgcaattgtatttctatatggactctactctcctcttctgatattccttattttttaattccgaatttcagctatttgtaaattgtatttctatatggactctagtcccctcttctaatattccttatttttaattccgaatttcagctatttgtaaattgtatttctatatggactctgttttttctttttctccgattaatgtgagaatttctaggccatgagagcgaacgtggaggctcctttttctattcctttaatggactctagtctcctcttctaatatttcttatttttaattccgaatttcagctatttttaaattgtatttctatatggactctgtattttctttttctccgattaatgtgagaatttctaggccatgagagcgaacgtggaggctcctttttctattccttaaattatatatttaattctgaatttctattttttcctaattgtatttctatatggactatatagtctacttctaatattccttatttttaattccgaatttcagttatttcctaattgtatttctatatggagtctatactctacttctaatatttcttatttttaattccgaatttcaggtattttctaattgtatttctatatggactctagtctcctcttctaatattccttattttttaattccgaatttcagctatttgtaaattgtatttctatatggactctagtcccctcttctaatattccttatttttaattccgaatttcagctatttgtaaattgtatttctatatggactctgttttttctttttctccgattaatgtgagaatttctaggccatgagagcgaacgtggaggctcctttttctattcctttaattatataatagataatactttaccactatttaccgataaatattagcacacttacttaaagttgaaacgattaaattttttcacaccttaacaagcataaggaaatcttaccatatttataagtcaatggcgtgcgagatttagtttgctggaaaaaaaatattgccatgactgtatctataaacaaacaactgctaatgtgatcaaacccgtctaaccttagacgtgacaaaactgtggtaaaacgtggctgacaacctaagggcatccacaatgtagtctaaaactagtccataagcaataaaatatttcattcagctacctcaccatattgtggaactagtccatagcaagaaaatagcaaaagctacctataagctataagcatatgtgttgctcatatagaataaaatatgttatttgtctctattttctctctcctcctaatactagttgctatctatatacattgataataatagttatagtctatatatgtgggtcccatttatatggactacttttgctatatgcattgttgttgccgtaagcacaacctactgctgtattgttgcgtaacgcgtacagcaaagcgcaagtggagaccatgcatcgatgcagagatgcatgcagctagcccatgtcgagaaacaggataaagaaaaggggaattgcgagatggcaaacgcccaaaacgggcagcttgttgcctggagaggaagagtgctggagagtagtagagcattgagcattgcagaacgtgggtgcaagtacaagcccactttacttttaagtttttttttttttaccaacgctgcatgttacccctcatggatggatgataatgccctttctggtttcatcagtacaatgtacagtacagtactagctctagtttgggatgatcacctactttatttgttcagcacccgtagtagttgtataatctatgctactagttgtatccaatgcccatccattcaagtgatggcatccaaataatacaatagcgagaacctatcatccaacaaataagcgaaacgacatatttaccaacgacaaataatttataaataaaacttttatatacgtgttcctaacgatataaaagcaaaggctaaaaaataaagttcgagatataaaagcaaaggctaaaaaaataaactttgattaaaaaactcaaattcaactccaaatttaatattgagaattcaaagctgataaatataagtataagtgtgaggccgtagtataatctaatctaatctaatcaacctgtttgttctctcactgcagttgggtcccacaacacagcaagggcgagtgagtgagcgagtggtgcggcggcacgcagcgacgacgaaccaggaaacgaagcaacgcaacggtggacagctcacgcgcggtggggggcagcgtggtcggcggcacgtgacaccccccgcccgcggcttggcttgtcgtgaacccagccagccatgtgagtagtgatcaccgggggctctacgccgtcgattccgaatccgatgggcgtgatcagacggcagagagaggggaggaggggggcaattcagcgcggggatcacgcatgcgttcacgcgtcggtgtctgtttggattctgaacaagaagaacaacagtgggtcgattttcagtgacgcgctgctgggttgtgaagtcgacaaatgaggttcctcctctctatcgtactccagccgttccataaaaaaatctagaattagatgtttgattcataatattaatatgtgttacattcggtgatagtacatctattatctcgatgctgctagctacgagtactagtttcatactgaaattttctctttaaaaattgttccattctaaaccaacctctttacactgtaataataattagtttatttatttttactctgaagtaggttataaaaagaaatagattattcattaatttataaatttcagctgtggggtctttaataattaatattgatagcgagtcggttaacaaattcagcatggttaacaaatttcatcttcagaacatactgtttatttgccaaatcagctctggatgttggtatagcaatctgacgataaacccaccttttttctgaaccatgatgaaccgatccaaccagctgacctgacatcagtttcatagtgaggtcctacaacatcccggtctgttcatcaatgagcagttcccaatttgacagcatgtagccaagctactgctaccagtactgtcctcttcgtaagtctttccaccatttttaatggctgacgacggtggtaaaatatattttaccactagtacttaagatagtagtgattcattggattccaaaagaaaaataaacggtttgaatcaatttatgttaccaatagagaacattatagttgtcggtaagaaattcccatgcatctaccaacctcatcttttctcttatgcatatacttatcagttaaaatttaaattttcaaccttaaatttatagttgattttaggattttttttattgaagtttatctttcagcctttgcttttagatcgctaagaacacatatataaaagttttattcttaaattatctttgtttgtaaatatgttgtcaaacaatggggccgtatatactccctctgtcccattataagtacagccataagtttccgtgcctaatgttcaaccgtccgtcttatttgaaaattatgaaaaaaatttaaaagttaagtcacgcataaaatactatttatattttaccatctaataacaataaaaatactaatcataaaaatatttcaaataagaagaatgatcaaagttaggtgctaaaaccctgtcacgccccgaactagtcccgaccagcactagcccgtgacgctccaaattaacctgttaatcgataccagtcccaggaaacagtgctgatatcacagggagacagaatatcacagcaacagaggtctctttattatagagtagatgtacagtcatgttgggctgcggacagatcccgagctcacaactgcatcacaaaaggaaagcggaagccaggacttggaccaatcaacacaggcgcgacttgggaactaggccgaaaccctaaaactcatcgtagccggcttgctcctggaagaactcctcatcagcaggatccgcttcatcttcttcagcaactgggggggattatttatatagagcaagggtgagtacgggagtactcagcaagccatgggaagtaagtgtttaatgcaggcttcaaggaaaggctggtgtttttttgcaattaattttatttgaactcttttctgaaacaactaagtgagtgcttctcaaacgacacggatgagacagtgcgtctcgtccggtcggagtatgtgcaatgtatcagtctttagaatttaaacaaggttggcacccggccaacagctttttcaacggccacccgggccaacaacttttcaaacggccacccgggccaacaacttttcaaacggccacccgggcctagctgatcccatcagctgcagatttttcaaacaccgaaccccttttcacacagcaatttcacaagcagtagtcaaaccaaactacgctaggaatcacctcacatccgcccatgaccgtgggcacggctattcgaacagtttgttaacctctgcagagggggtacactttacccacatgacattactaacccggatcacccagcccgtggggatcagccacgtcgggagacctccaagctttcatgacaaggcatttccaaagccgacacaggtttaccatatgccgacgagaggggtcccagaccaacaacaggttaggtcccagaccatactgtgccaggaagcccaggggtcctccccgacaccaccccggcgaatccacatgtctctcggcatcaaggctcccctgataagctagttactcagccaggggtgtcccattccacccatgtggtcgtacttgtcttatgtttggatgaaattccaaggaatcggtccttaaatgcaagagcaggaaaccgtacacccggtacgttccccgatccgcggttttggaaaattcatttagttcgcaagcaccgacccaggtgtcgggttttccaagtcttttgtaaaactccagttttacccaagttgttaaacagattttaagtttgaaggcgtccgtcgatactcgcacagggtgcacgaatatcgagacgcaactagatggttacaaggggacaagatatagcaattaacaaaggaaggatcaaatgcgacaaattaggtaggtccgccaatctgccttgcagacgggacaaacagattaagtgcgatcctatcaatgcataatattttgcaagggatataattaaatttcaaatataggctcaagatattcaaaggtggcttgccttgctcgagatctggagcttgatcctcaaaatcctcgcactgcgggtcttcgggctccgaaactacacgcaaaacgggacaactcaacaaacggcaaaaataaagccctattaatgacctctaagcgtgcaattagatagatctcgagatttgagaaattttggaagttgaacggagtcaaacggatttacggttgggaagatattgaatttctaagattattggatttttgatctaaaggaaaaaggattaaattaaatcctttttgaaaaagaaaagaaagagggaggagaagtagacttccctcgggcggctagggcgtggcccgagagaagaagcgcggctcggccgagctaatgggccggccggcccaagaggacccggcccagagcgcgcgcgggaggggaggagagagggggccggtggaccgggctcaccacgcgcggtcccgggtgggacccgcttgtcagcggctcggctcaccgtgcggagggagtacgcggctcatgcgcgcgggcgggggagggacgcggtgcacgcgcgcggacgcgagagccgcgccctgcgcccctccgcttctcccccgctcagctccgctccgcctcgctcgcgcgccgcgcgctctagcgcgtaagccgcccgcgccgagccaagtccaaacccacaactgtatttattttgcgacggagggtgtatctccttagaggatcacatccagacttttgctgcgcaatgagcgcagcaacatgagcaagcaaatgtcaactccttttttccacaggtcttcgactagcacaatcgacatgagtacatacattgacacaaagtgaatgacaggtggagctatcatattcttcatacacgctggcgaggggggcccacacgacagtggcagcaaagctagtgcaggagcattggcttgcaaggaaggaaacaaagagaaaaaagacaggggagagagacgcagaagaattccttgaaagcacactatactatcatccaatcgatcgatcgattgatcaggtgatgggctacccatatgcacatcacagttcctgtacacagtacatcccccctttctgtttctctcagcatataattgtttcagtttctatgggccaccaaataataattcctctttgttttatactagctgggaattttcaggccactgatcacagtgttcagtacaccaccctgatcaacagtttaggaacaaaacatactcattagagtaatttgaaacacaagaacgccaaaaaatgattgtttatgaaaaccgattaattaattgaaaccctgattacttatgtgtatacttatttcatcagcagacagaatgttgacctatgaactgcaatgtgcgatctatctatgtgacaattagcaataataataataataataataataataataataataataataataataataataataataataataataataataataataataataataataataataataataataataataataataataataataataataataataataataataataataataacaataatcacagttcagtacacaatcctgatcaaatggtttagaaacagaacatactaattaacttgaaacataagaatgccaaaattgattgttatgacaagtgattaattgaagccctgatgattactcaagtgtacattttcttacatcagcggacacaacagttgacctatgaactgcaatgtgcaatctatctaagtgacaactatgaataataataataataaaaccaatggtgcaatgtgtttggagagggaggcatatggagcttagatatagccatcagtgcatcgctttcatgacggtggaatattggtataggttaggtgcagagacttggacgctaacacggtggaattgataaaaattttcaagctaatcatatagttttacaactggtcgaactatattaggtacagcttttggatggtagtagcatatacatagcttcctctatttcgacggctaagctgaaccaacttagtacggcacatgctacactcttttgcgtactaaggttggatagggtgagactatcaagaataaaaagactccttttgaatccttgaattttacagaaatttcaaatggattagttcaattccaaaaaaaaaaaaaattctataaattcctccattcaaggaatgcaaaagttagatgaattctgccaataaattttttaattaatatactagaagagcatatttttcactttgtttttaattttatattataatatactttttatattgtttttgtattggtacaatgtacatgggagaaaagcaagcaagctgcttagtttaattaggagtacacagtactatgctcttttgtgacctgtgagctgtcttgtaatactgacctggcgtcgcctcatgaatccgacgtgccactggccagcatctctgcggccagctggcacaagctgacaagctgtagccatcgccacgtaggatgggtaccacgacaaaaaatgacttgcattgctttttgcaagtgtttgtttagtcgccactactgtcgttgcaacttcttaatcacccctactttgtgtaccaatgtatgtatatatgcatacacgccccaagatggagtacattaattactagtttcatgtcacaatccaaagtaattatattttgggtacatacagagaaattaattgatttggaagctaacctctacttacatgttttgatggatacgtgtgtaatgtaaggcccttttaattcttttttttttgaaggtagtactatagtgttttgccgtgctggtaatcttgcttctaagatacgtcgttgcatcattattatggcaaatatataatagtaattctactgttttagcagctgcataattaggtgatgggatttgtcaattggatgctggaattgcatgctcaaccatcaaacaaatggtttagtttaaaaaacgtaaagtaaaagggaaatgaaaagatgggaaaaaataaaggaaattaaacatgggatcacgttggttgcatgtgcgccaaagactaagctccgtattctagaccaagtgatgactaactaatttttatagtttatgagcgtgcaaagatgtggagaatctgaattattctttttaattttttttgcaagtggggaatctctagtctttatgtccattttatcactttggaaaatggaaagaaaaataagacaacatcggtcataccgtactacttttgttctcctaaaaaagaaaggaaaacttcaaagtatgtatcactgcacatatgatcgaaaaaagaccaatttataaaagaagaaaaaaaaaacagaaacaatcactggtattggaccaaatagcacataaaattcagttaggggagcccactaaggagcatttgcaacaaacttttcatagaagaatatatgtaaacaatatagtatatactaatatgtagctctcccatattattgttgggatttctctctacagtttgcattgttagttagggagtgaacatcttcctctttttagctagtccaaataccttccttgcattggtattttccctttttactcgtccaaagcaacaatttccaatgggttattcatatcataagattaacttgattgcatataaatttcttcacggcaacgtaaatttatgaacatgattcaattaatttctatcagagtgtagtattttcaacatgatataaattaatttactaggtttttataattctgcatttttttgttgaaaattatggaggccatatgggaaagggtgacgatggagttgtcggtgatatggggtatggcagacagggaggagtatatactactgctacacaaagtcacaaaactacaccgaataaatcaaattatttcttcagtagcagcagcagcaaacagctcatcaggtgttggtgatacctatgttccgggcaccgatgcggccgtcggccaccgacacggcgactccaccggctgcagccggtgtccggcaccggcgatcgccggtgagcccagccatcttctttcttctacactgacagactagactaggattcgtctttgcctcgggattcccaccaaagcagagatgtcaaaatggtcccggtcaaactgccctacccaaccacattattgaaaattgctaatttaatcgttaacaaatcgtaaaataaataccaaaaccaagtggatcccagtaaacaatgctttgaacatgcaaattaacaactcctatgtgtctacatctcatgctaatgtgcaataacatgagaagctgctcctaagattgaacagattttgacaaaggtgagatctttcgaattttgaaacatttttcacgggcaaaacacagatcaaccaatcagaacgtcagtattagaggctattcactacttggaagctgttaacagtttttcacacttgacacggtatcagcagtcaaaaaattttcaatgagccactgtccatgtgcaagtattcctttttcttgttacaaaaataattatgaccgatctgaatcttaatggtgcaatgtgtgtggtttgtgcagggcataattctgggtcctaaagggagataaatgatgttaaaattcgttgagtcacatgcattatgaacagatctatccatgcatctgccttattggtgtggtgtggaggatgatgagggctctacatgcatatgcatatgcatcccatgtgacatgttcttcagcttccatccaatccaactatctcccagtcctcctcaccccacaccatccactcaacaacagcaaaaatcttttttcaatttcctcaatgagatcagcacagcaggctcaaccaaagaaacaattatcagcaatgatccaacaaccatacagttcagaaaagggggtaaccaggttggtgccaaacatcataaaggccacagcccacactaccaccccctcttgttaacacacaaacagtctcagggtgccattgtttagtatacaagcattgttgttgtagatgtatcagcaattaatgaaggtgttgataaggaaacataagagcataaatgcatgctgaaatttcaacctccaaattaagctagaagagttcatcaggaaaatgacagtaaatacatttaccactttacagtgcagatccatgatacagaccagtggaaatatgaaccggcacaatgaaaccacagcacttccttctgaatatctgatatcttcaggtacactagtcataagattgttacagaacataactgaatatgctccaccaagggggaaaagggggatatcatcatatattgagaacaacaataaataatgttggaagctgtatggtttgtttccttcttcaggctacttctcaggagctctgagtgaaggaatgatgtcatggttactacttcaaaacaatacatagcaattatatgccatacaatgtactgtccagtctccactatacagctactatacatgtgaagtgaatgagctcgcacatcactgtagtatctacatgtttcaattgctctactctgatcgtatacacttcaaatcttgggtaatagcttcaagtgtgaagctgtgtctcagtttctctgttctgatcatatacactacatcttgggtactagcttcatcataaagttgtatcgcactccttttgctatcttaggttctggccacttagcatcttctggtacatggatgcatttgtatcctagatttttgtacagacgcagcgcagcaatgttgtttacatcacaatgtaatgccatggatcggcaaccccaactctttgctcgctcctctgcttctgcaacaagcattttagcgattcctttacgacgttcttcctttcggactgcaacatttgctatatatgcaatacctgttctgcatgtttcaaacaaatctggatgatgtcaggcggcaaagtactagctcgtgtgttatattaaccctccaaaaatataataatggacaatcttctacagtttatacagagtgaggcaaatgaaaacaaggcttcacatatctgagcatttcatcagtgcaaaagaatagcacaaccaatgtttttgttgactttgtatccaaccaaaaacaacttattccatacatgccacagtgctgcagcttcatttagaccgcataaggtgttagaagaggttgtggcagtgttgagatggatgtcataagaggtgccatgctctataatgcagtgcaataaatattagaaaactgccacaagaaacgaactcagagaatatccttttatgttatcttgtatatgacatttcacatctggtgagattaaaggccacacagggcagcctttttggcagtgttttcatgatgatctgttggctaatttggaaggaaagaaacgcaagagtattcgaacaaagagacaaaaaccctgctcagttggttgaggatatcaaagaggaaataatcatctggaagtctgcaggtctcttttcacattgtgagaagtagaactgtttttcagccttagggctttttattttccctttctcgtggggtaaggttttgcctcacaacacgttcgacaacttcttgtcgatgtacccttgtatgtttgtaatttgttttcttccaatcttaatgaaatttggtcagccattccttcggccaacccggcgaaaaaaaaaagaaggctgtggcacaaatacaatgcgcgttctatcctaattcaacaagacggtttaatccctaactatgatagacttcgttgattgaactggatgttcattttaacccaggcaagttgcactgcatttaaatgtatttctccaaaaaatataataaaacacatgtttttcctctatgtttccaatcaagttgaaattcaaatttgctcactgtttacaaatattttcttgaaatagtcaacaatgaacaagaaattcatgatatttattgcattttcttcaaaattctgtaggtaggctgagccctcttgtttcacacagttctttcatcttgtacaagtaaagctaggtgagagtcacccaaggaaaggaaagagacatctccaaataaattccaaggcaacaaatggtgccctaggtggacagtcaatacaggaaaagagagtgcgcatgaagttgtgtttgtctagctgtagataactgtatctccctttggatcttagtcaaagaacaaaaaggaaggacagcaaacagaaaagtgtatgggggcacatacaagttataaccataaacgggagctgaagcaactcatgtcgaagcatcaggacaatatatagcttttttctttagaaacttacaaggtgagaatgacatggactatggtagttacaaaaaggataaacagtatagagaaaaaacatgtgatggtaaaattcaatgcgatgaggtacagatcatgataaattaaaacctagcattaagttaactatgcattcctggagaaaaaatggagcacaacattttatgtattatgcccaagattgtagttttcttagttttgattgattcaaaccaattgtgcttaagacttatattacatcttggcaccagtgatcaaaagactgaggatggtgaaaaccaaaaagatgatactgctatgtgcaaagcttgggagaaaattaagatgccacggataggaaatttgttgcaacaaaaaggttttatatgacgattgagttgccgggtcctatgcagatttactatgcatgctgctagtggagtttcactctttttaatttaatagttctttctgtatttcagaaattccaacgaaatataagtgcaacaaggcttaggtggctgttaacaaccaaatttggtaacatcggtgtcaggaaagaagattggatcaaagcgaagtcggaagcggagatcgagttcggaaacagagcaggaatcggccggagtccagatcggctacggttaggatcggctaggtctgagtcgggctaagtaagccggtacagccgattccgacaatatgacttgtacacgacatcgggttcaagttaatgtagttcaagatgattgccacgcacggatagagtcctgggaaggcaattgtatctattaattaggatatcttatgtaaattccttatagataaatataggcaaaagtctgccgcaaagacttatggtatcttaagagtttgttagagataatagtcatgtccggtatgggcatatcttgtaattctcgggcataaatagaccccgagccctatgtaatttaacaacacacgttcaatacaatctcggcgtatcgctaccctttttgctttagttttgtttcgacgagttcttgctttcgggttgagctgcatcgatttcgatcttcaacaagaggtaaaattcgttatgacggattgcgttcttaggattagtgcttccatctttatgatactctaatcccgtttatgtaattcgtcgagttatcatatgtcttacataatctctagcaatatcatcatctaacctgccatcggttaacttctgttaatagagggtagccgattaggttaaatattgatgttgatctagattatatgagatatctaccattctatgaaacttctagcggcttgattgtctagatatcgttattcttttcatacttaatgctgcatcagttgagtttgatctattaagtcgtgcttagaatatcgatctctagcctgccttctagttgccgattagaatagcatcggagtttcagctgatcgtatctgatttaactatatttattctatatgcctcattgatatgttaaatctgccctttatatcaagatattgctgtatctaaatatgttaggcctttgtttgatacattattcttgctttaatatcctggtatggagtagtatcggagtattagccgatacatgctagatttatctgatcggctatgctataaacatatatagtcctgttattgatatatatttcgatctaagtgatttatactgtctcggcatgatgaccgatctatcccaatcacttgatttaagtatacatcgatataaggagtatatatcattaatatctacagccgatcgagtagatttagttcttttttacttattcatgaccgccgatcgatacacagatgacatcggctcaaagataaatgatatgtcatcggcatctagccgattggctatcatttatagatttaaccacggcttctttgcttctatttcttgttgattacaggatcaaatcaactggcacgctaacacatccgaaggcgagctttggacctgcactggagttaagcagacctcccaggccacatgttttctatcaacagtggcatagttcagaaattctattcccgactccaatggtaaagagaaacgctttcctttagtaattattatcatgcaagaaacacttgtctgttatgagagaagggaaccattactttgtatacttaaatactctctccccattttatgggaaggaatcatatcataatttatcactgttctagacacaagtagtttaagacaaaacatatttggcatttgagttttgcatgcacctcatatttagcaaaatgtatatgaattgaaaaatgggaactcaggtgttcccccatttatgcaattagtataaaataatatgttattgtttttatggcattgcatagtcaagtgtagtcttcaaggctccaattgcacaataaatttaagttattaactagcatgtttttttaatatgacctgtgttaatctgttattgactagcacatatccttcagagatggaaaggcattacaacaaattatcaattttttgtagcttggtatgaactgttagaaattcccaagccaataaagtaagcttcaaatgtaatgggacgaataattacttggctgagggataccaaaaaaaaaaggaacatcaatgtcaggacaaaaaggaaacaacaccataagtagaatggatatggtaaacaggctttggaaaagtgagtgaatgcatttaaggtgcaaagaataagcaaaccatttatatcttgcagttgcatatgtgtatatgtgttagcaatcttataaggtgtttgaagaaaataaaggtataccttctctgcttgagaggccctcttctgggaagatagtctgccaccgtgtctactgtaagaatgccagctatggaggccttactgagaccgtgtttttcttggaagtcagcatctcttaaatctccacattcaatgctgatacttctactaagcgaattactgttaacggcgacaaggcaagttctcatgcagccaggtggaaccgaaaaaccggataggagggcaatgtaacgatcaatacgtagaacaaggtccagtggaaaagtgtaatctggaaagaacgagctgcaatgagtatcagctacttcccagcaatcctctagccgcgcatctcgaaccaggatgtctgggctcaaagatggcaacaattcaaccgccgggctggcacagcaaactcctgaaaacaaagtagacattctcatgggcacatgccaaccatgtgaaataaacccagataaatttacagttagctcatacaagaccaacatataaaacactgaatgtttagtgtagtaagttcaaattatcgcgatatattcattttgaggtagcatggtaccctttctaatgacaacactctaagccaaatgccccagttggagcaaggtattcaccaaatactaattcagtcgatttgctaaacgacactcccatcctttggggagaaccaaaccgattgcgtgctgtcaaattaatcttccccggataatccaatactacccaattgtaaagaggattacgattataacctcaattacttatcaatgccaagaaaattggagcggtagataagacctgcagcgggtttggtggcgaaggacgggcagcggtggtgccggacggcgactgcggcggatcggcggacggggtagagaggagaagcggaggcggacgacgtcggagagcgagccaagcttatcgccggcggcatcatggcctccctccccccgcctcggctcctccgctccttcgctgtctctctcctccgatttttaatctactactgtttgcccccacactttccgccttccaaactcgtttacgtaaaataaaattacgccttattagggtgtagcccacggcccacctttccgtcttcgaaaagagtttacgtaaaattaaagtgcgccttgtgaactgtgcagcaactaacaaggcagtggattccggaggcgagcgagagagggagagaggaggggtgggagcgggggcggcgcggcggcggcggtggatggcgatggcgggcggcggggggctcaaccggtcgtcgtcgagggggcagctgccgccgcaggagcttctcgacgatctctgcaggtagcccccatcccaaaccctcgatcccatccatctcgcgagtttcttctcggcttttgctcagatcaaaccccccggaaaaaaactgaatcgaatcgccggtggaaacggaaaaatcgcagccgcttcgtgctcaacgtgcccaaggaggatttggagtcgttcgagcggatcctgttcttgctggagcaggcgcactggttctacgaggacaactccgtcgagcacaacccctccctcaagtcgctctccttcaaggacttcactacgctcagtaagctccggccgaactccaccttggattcatcggtggcgcttccgccgttggtttgatcgctgacaccgttattgttgttgtggtggtgtatgtgtgcagtgttcaatagctgtgctgcgctcaggccataccgcgcgcaccttgatgacatttacaaggatttcactcactataagttccgtgtccctgtctgcggcgccatcatcctcgatgacacctacgagaaggtaactacacccctaccccgatcaccttgtaccatattactttctacctagattaagtttagctgagtagctgcttatgttgcacaatgtgtgggtgtggcagcttggaaacaatgctaaagtaattctggtattttgtctgttgctgcaaataccttgtagatggtttattgtatagtcgcttcaatgcgtatagtttcaagctctatactgcaatgcactaggcacaaataaaaattacatctttggatctttaacccttgtagacctcaattcgcgcattctttttcactttgtcatcacatactcacaccccaagtttcattcactttttctccttctgtgcagtgcttgcttgtgaagggatggaagtctagcgccagctggagttttcctcgtggaaagaggagtaaagatgaagaagatcatacatgtgctgttagagaagtaaacttctgggctgaatcgatgttgttctttgcagttttatcaattaaattagacttataaaggatagaaatttgtataagtcactgaacaatagttttacatttctctagatcatcaagatgcttttttctacaattcaaatatcaaagttctagatattctaccatgctccaacacttactgttttcatttagtgtttgcattttaatccattgcatacaccatttgttgtttcttctctaaaaatgaattgcattgcctatctcatgtttaaaaaggaacaaaaaaagcttagcattggttagctaaatattgtcagctggtcctgtgcataattttttttaaagacatgcagtgatcacgtcttagctttcgtgaactagtttccatgttttgcacttccctttgcttattgcattactagtctatgtaagtgacatttatttacataacaatgcaggttctagaggaaactgggtgtgatgtttcgaagcttttaaaattggaagattatattgaagtttcaatgtggcagcaaagagtccgcctttatattataactggtgttaagggggatactgtttttgcgcctcaaactaagaaggagatcagtgtacgcaaatgttcagtgtttttatcatatttctttttgctcaactacattcagaatattttggactcgctatctgaaaacgaaaaggggaattgcgtgacatgattgcaaaatgatacaatatgactttgattgtttgattaatggccataatccttcgtgtgtgcttagcttatagtaaggaatagctcctttccgattaacaagctgttctacagatttttttttccataatgatctgctaaatttcaactcagttgagaagagactcaatttgaagcattctgtaatcactttattgttacttaactgacaagttagtacatgttcagccacatatttttgcttgctgactgaggtactttatctttttatgctggtgtatgaatcacttgcaatgctagctgtcttgtgtggttgtgtttactaccttgtgtctacttgaagactgtagttactgtaactacaatttattgtttttttcgttgtagtttatccattgacccttttgagttttgaacctctctttggttaaagagagttaaataggcattactgagtcgtgatcctctgaaattgacaggagatctcatggcacaacatcgatgaactccttcctgctggtgatgacgcaatatctcgtggagtgaatgggatgaagctctatatggtcgcaccatttttgcagtcagtacctttttgacccactttagtttttttttcttggtgcagacagtcatcatgagcatgttggtttaatggcttctaaaatatttaacccgcatccacatttcctgagtgtgaatttgtttctacattgtttaattcctttacattttacttcttcatccaggggtctaaaagcctggatagccacacatcgtcacccacagtatcagaaatcagacacgtctgctagaggtttcttctgatcctccctttgcccatttatgttaggacctaaaaatgttaaattatttgtcaattatttttagcagttctgcttcaagtttcgcttgttgttttctaagttaatctgcagaagtagttctcaactgagcaaaatatcagctagtacataattaaagcaggtctgatcctggcatagtcatgaactcatggctatacttatgatcaacttttagtacatagtgtgtgtagtaccattggtgaacctggtgcaatgtactcctagtatgtaatttgtgataaaattggtgaacctctggtgctacatataccgtttgcctctataattgtgataacatctatggtaccacacatcatttgacaggtactgtgtggaaagcgaagaattcctcaactggagcggcgcctgttgagaaccccgttattactagaacaggatctgacccacaaactcttgacagccgcccaggtaaaagcttccgaaacttcaggttcgacacagcgagtatcctgcagtccatggaagcttccttcctacgtacctaggagcctgacaaagcatcaccccatgtgtgtatgcttgatgtgtatagactatgtaagccaagggcgtgtcttctgttgttaactcagctttttcttcacttttctagttgtatctgtaatcctgaatgcaacagatgcttctaccattgtgataatatccctacatttcgtgcacatgaatgttttttcttctgtccattcagatttgtgtttgaaatgttgctcaaaatggagtaagaattcctctgcattttgcatgatcttgttccgttattcttacattgtggttgagaactgagaactgataagcatccttccttagacaatgtagcgggctgtgcatggcccgaatgtgtagaattatgatgggcctagccttttgagtacggagtttgggccgatccaaccatttgtagtgatgggccgtgggccttggcgacaagcgaagctgaatgggctttgttcttttgctatctgtggagacgagtgatgcgccgatgacgtgtgcggagcgtgtggccaggcatcttctccttcacgctttcgctgtaccaccaccaccgctgctagtgctcgcgcgctctcctgctgctgctagaagcttctggaatctggagccgagccgatgccatggcggcgctcgtgcggcccgccgtgctgcccgtctgcgccatgacgggcggcggcggtaacgacaagcggtcgccgccgcagcagcggtcgtggtggggcgggaacaagcagagattgccgcaccagccgcggcggcagccgggcgggaatggtggccgaggaggaggaggaggggcgctggaccaggtgctcggagtgctccgccgcgacggcgagttcctccaggcggcagccggcgcccccctccgcgacatcttctggctccgcttcctcgagaagaagaagcagcagcggcggcggaagcaaccaaaacctaaacccaaacctccggagcagcagcagcagcaagaggaagcggcggcggctatccaagccccatccttcccacctccctcctaccagccaggtttgtcgccgcgcggcagagaagcatctcgattgggctccgttgcgcacgcattgttcctgttgctgatggggattctcccaattggtaggattatcatgcctggatcttatgactgctgatttcgaagccctgaagctgtatatcggctactcgaagcatgcaatcgagcagcaatttctcaaaggcaagcggcaacctcagcatcagcaaactcctaaaccaaaactccagcaacagcagcagcagcagaagaagaagcagcagcaacaagagcagcagaatcagacacttcaacctccggccttccctcccccatcgtaccctccaggttgcttacaccaagcagtgcccaattagctgttgcttaatcatttaagtttcatcgattgcattattaacttgttttatgatttttgctagggctgtcttgtatggagctgatgatggctgatatcgaagctctcaagttgtacatcaactactatgtagccattctcaccactcctctaccccagcattacgatccggagatactgtcccgttacttcacctcgcgtcctcatattctcgcatttcgcaccattcaggtaaaagctgtaattactgttcatctttgctcttactaagcttcaactgataaatctaatagttcagtgtgccatgcttctgtatctgtagataatcttcgcatttgtctcggctgcagtaaagatgcaaatttctaaaagaacaaacttgatcacagatgccacctacagctgtaatagcaccggaagcaaaggtttcaatgcttcacaatacatggttggccagcttctcaaagagacatttctagatcttgggcctacttttgttaaaggtcaggttttcaggttcgatagctttaagccatggtagtggccactcggttcggattaatgttgacttgcttgtcttctgtgtgcagttggacagtccctctcaacaaggcctgatatcacaggctcggagatttctgaggttaggtaaaattactgcaggatacaataacatttctgcatttctttaattgcttcatcatcttcagaagtgttttgttgatcattaaacaatctccatagtctttctcaaaattaactggcgcacaccccaatcataggcactcgccgagttacatgaaaaggttcctcccttcccgagaaaagatgcaatgaagattattgagggagaatttgagctccctgtatcacacattttcagttacatttctgatgagcctgttgctgcagcttcctttggacaggtaatcatatcttgcaaaacttttcccgttcttttttaaatattagagacaggagctttgtagtttctgattaagccttattatatttttctgtactatctctttcaatttttctgttatgctcagtgtactcttgtttgttgtactttaggtttatcagggacgtacagttgatggtgctcttgtggccataaaggttcaacggcctaaccttcttccttcagtattgagggacatttatattctacggcttggggtacgtatgcaactatatctccattaaatatataagctcatctgtttttgagtgtttttaattctgccaagtgctaatgcccacatcttgttcatagaagatatatacaccataggttcttcgcctactgtttgacaaaaaagaaagttcatcttctgatcctcagcatgagcataatacctgatgccttctattttgttgtccctaaacaagctttaccgtttccctgattttgtgtttaattaagagtgttaatgtgactatgataacctgtgctgacacaagaaacattgtacagtactttctttcaatacagatggaccttgtctcatttaagtttatctgtatttagattaaatgttcttgcacttcattttatttctttattttgcttacaaaattatagcattgcagcatttttccactatagtcctagcaacttgatgtcttttctaccatatatgtttcagctttcttttgtgaggaaggtagcaaagaggaaaagcaacattgccctctatgctgatgagttgggtaaaggtttggttggcgagttggactacaatattgaagctgctaatgctaccaaattcctggtgctttggtcttgtctcctacctatactttactaacatatgcctattcctgttttggcgttttatctcataatttgtacttctgtaggaatatcattccagatattcatttatgctggttccaaaggttctcaagcaacttacgaggagaagagttttgacaatggagtgggtatctggtgaaaatcccacagatttgctttccttatctaaaggaatttcatcagaaattgctgaatcgtcagagaagcagaagatcgaagcaacagcccgtcttcttgacctggtatttatgttcgtcacaagttatttctaaattatctgcttcatttgtaaaaagatgagcaccataaataaattaatccacaacaatcagtgctcccgggtagcaaatatttggaattgaagtcgtgctcagtgaatagggcttttttgtcagttagaaactgcagtttacatggttctttgcaatattgtgtttgtttcagaaacacgcagcttaattttataaatatctatcacttcaatattgatgttcttttctctctgctgtggtagaaatataaacattataacaacaattactacatttcaataaacatttttcccctctggacaaaatgttttaacatcttgttaattactatgatgataaggtcaacaaaggtgtcgaagcatcattagtgcagctcctcgagactggtttgttgcatgctgatcctcatcctgggaatttgcgttatacacctgaaggtcgtgtcgggttagtgttaatttatctttttatgtacgctctataagaaaatgtcttcttactataatcagcagaatcatgttatacagtgggtctgatgtttttgtaatggttttcctctgtcattctccctttgagcaatagtaacaccttcctaattatgttaggtttcttgattttggtttgctttgtatgatggagaagaaacatcagcatgctatgcttgcaagtatcgttcacatagtaaatggagattgggcttctcttgtttatgatttgactgcaatggatgttgttccaccaagaactaatctacgccgagtgacaatggtaattcatcaaaatgcagaatatttatttatttatggttattacaagatggaaaaaaacaaaggttcttatctcatactccctccgtcccaaaatataagggattttggatggatgggacacatcctagttttacaaatctggaaagggagcttgtagtgtaatttagtttgttattccattattatttttaatgtttgttgattggtaggacttggaggatgcgttgggtgaggtgacctttgaagatggaattccagatatcaagtttagcagggtgtgtagctttccctctttaagttcagttataaactgcggcatgtctctctctttatcggcatcttcctgaactgttaaaaacatcctttaggtgcttggaaaaatatggtctgtggcatttaaataccacttccgtatgccgccgtactacacgctcgtcctgaggtcacttgcctctttggaaggttagtttgtttagatgaaattcagtactgaactagctcaattataagtatgtgttgcttttttgtttctgacttgtacatatttgagcatgtgtttttttttggaggcttaccagcgtccccttttgtgtaatctgtagggctggccattgcagcagatggaacttttaaaacatttcaagcagcatatccatatgttgtgcggaagcttctatcggataattcagttgcaacaaggagactcttgcatcaggtattattattttacctcatttgtttacctgtatagtatatatgttaagttgatttaattaattgattcacttttcttatattttgtgcaacctggacaatatgtgctctttgaaacagtcaactcacccattttcgtttgtacgagatgtacagaaatcctgcaataaaatttgaaattctgagttttgttagttcacgatatcaaacgtcaaacacccaagggaaatggcatcgatgataatagagttctgacaccaattattaatacacaggctattttcaacaaaaggaaagagtttcagtggaacaagattacagtatttctaaaattagcatcagcaaggtcagttctctagttctgagcagaattgtgtgtaaacatcatgtttttttcactaaactgtatgaacagaatttcttctactatgatgcttacttgcttagttttcacgagatgcatctgatgatgttttcgtatgtgaaggggtaacttcaggtataatactggcgttttgcctgagaggaagggtttggatgttgcaaaacttgtagagatcagtgatgcatcttcttcactccatcttaaccgtgctacaccagaaagagcactacatactgcaaatctgtgcttgcggcttttactatcgaaggagagcattgtgataaggagacttgtaatgacagcggtatgtacttttccttgtttcccctctttacctgaatcgactggcccttttggctggatttctgaacgcataaaacacactaaactagaaatcaactgagctcaccatacttcctgttgcacagaacgcgaagtcacttgctcgtgacctgatctccaaagatgcatcgatttaccgggtgctcttaagtcgggtacttgccgatgtcatcttccagtggatggtgaaggcaactggttttaaacgagccggacagctcgagcctcacccacgcgtgacagcaggaaagaacgatgaagacctggggctgtccaaagaagcaccagccttggtgacattccagacagcagtaagagatcgcaggctgaaggtgatattctccaagttcgtcagggacataagagaggaccccatcctgatggtcagagtgagctggaacatgtttgctatctcggtggtctccgctgcaattggcgttcaccgtttcatcgtcgtcttgtcggaggaatttctgtctacattaccaccgcctgtgcctccgccgcggctagttcagattcagagcatatgaagagcagcaactatgccttggtgcatgaagtaacttttttactgggtatcccgtagctgtatataaacgttttcaggagcagaatcagccatcctgtagctgacagtagctcgatcagagttctccatggctagttctccgtaaatttgtcttctactattacaggcttcctttgaaaagggaattttgtgggaattaaactgatttttgtgaaagtactgtaaaattcttgtcatcgtgtcgcaaaggagcgaaaaagcttactaactcgtaacgactgaaggctgagatcgtgtacaggctaaacatttgcacacaaagcgaaaagtctaattaacacatgattagttaagtattaaataatataaatttaaaacccatatatttatttgtttttaaaaaaaacttgtatgtggaattttttttaaaacgcgcgcgcgcacacagtttataatagttcggtagagaaagtaaccgtagaaactgggccttagccaattgggccgataaatgggccgtgcgagcgtcgtgtaccggtcgacgagacagaagcagctgatgcgccttgtgacctgacctgacagagagagcaggtggagctgtgtgtgtgtgtccgtgtgatccagagcgggagggaggaggaagcggagggggatggtggggggaaga

SEQ ID NO: 7056 - DNA, 42559 bp, Oryza sativa
aaactatccgctccgttttcatccctagtggcgatgatgtgctggttgcactgttaacaaatgatgattttggcatcgttttcgctttgaacgctggcaggcggcggaggaagaccggctacaccagattcaaatgaaactaaaaaaaattgtataaataatataccagtcgacagtgaaacattcgtattgacatcgtcaatttaaagatatgccggtcaaatagtttggatgtgttcctaacggtagggcgtgcttgtgtctttatatgggtgagtgtacgcggttatcaacgtttgcgttcatattatgttttttttaagaaaaggaaaatgaataaactatactatattagtaatagtgttcgaatcagggtgaaccgttccagagccaaaaaatggaatatcaactattgtctcggagttaatgaaaattgtttcaaaacaatagaccctcgacaatattcgaacatcttttaattaaaaaaccagtttattttttaaaaaaattaatcgaaaaatcaaactgtcggtttgtgttccggtttttggcaaaccgagctgttcctgacggtaggcggtgcgtagtacgtatcgatcagcgctagcgcttgcgtttgcgtttgggtcggtcgctatcggagattggcggagcgtagctacctgaccgaccggatcagcagcagcagcacagcaaacacaagcacggtcgtagttgagccattcacgtcaaccccgcccaccaccaaccgccacgccaacgtccctttcctttccatcacgcaggcccaaacacatttcggcccaacaactcctcctccctggcccaaacagaatgggccgcacgcaatacagatccttgctaccgaactcacatgggccagccgcacgtaagtcgggccaaccaaaatgaaccgcatgcaggccaaaatccatggaataagtttacttttggtccctagttgaggtcatgtttaagttgcacatatccttcaaacacaataccaggtatcctcgacgccaactcttttggatcccattcaactcgtcccattcaactcttttgtataccgtcctacaatctcgggtataccggtattgcagttgagagacacgttatacaaattcaaactcgacgtaagatgaggtatctgaagtaaacttattgcaaatccctaccctcgaaagtattcatcccgttcttgggccgcaccaaaatgctggaaaccggcacgtttcctggcggcgcggcgcaggcggtggccgacggcgatcgcccgccgccgcgtggtttcggcggtgcccgaatcggcagatcgagctggagaaacgccgctccgtggccggcggtggagggcggctgcgatctatcaacgatcggtcaagcatttcaaggtgccaattcctccgcagattccccaattttcctttctcttctctcgccatatcgagtacacttccaccatcacagaataagttaatctagtgctggatatgatatattctagtactagatgtgatatattctatagaataagttaatctagtactagatgtgatgtgatatattctaagtgctgcgaatctaaacaggatgaaggtagtacatgctaagatgctagtgttgcccatttgctccaccaaattatttcatctatatcaactgggagaattttttttcctcatcaatacaacttcatctaccaaccgattcccagctgatgattgtccaaactcctgatgctgaagatgccaactggatcatccctaccagttccaccaagccaacaaatcaaagcaaagcgtcataccaagatgacaacatgcagcagcatcaccagcagatgcaaacggaaacaaaacagaacacaagaggccatgatcagaattttcaatttccaggaagaggcaagccaagccttgcaaaaggattaggtatccatccccatcctcaaccacattccagttcacaaatgtatacccttctctttatgtacatcaccacacaaaggagagaggagagctactagtacaatactgggagtataccaggtaaccaacaagaaggaaaaaaaaaataatagccaccctatcttaccccatttccccaactcttataccatccttctcccaaatacagattctttttcccttttacccccaccacacccaaattaatttacaccgttaaaatcccccttataccacacaaactatacccccgtcccgtcctcccgccacaaaaccaagaattcaactgacactactactttcaccaaattcacatctaggctttagcaaaacccatccttattggcgttgccaaacactagaaattgcagttacctaggctgcgggcgcgctggaaacgacttcacatgcctcatctgtggaggggttgaggagcggctcattgtctgcgagcgcagcagcatgtcgaccatggatgaagtctggtaggcctggattaggctctcgctgtctgtggagtcacctcgcgcagttgctctctgccatgagtgtgagctcaagccggagaggacataggcgcggcctgatgcttcgtacctttggcgattggccatcctttcttgcatctccttcagctcagcatccaatgcttggcacaaccgatcaccggattgtcctgatgttgaccccatgatcatcctccggcagtcttcgagtaaggaaacagcatgtgtcaggtcaccacgctcggcagacaaccttgcttcagccatgacttcagctgcatgaagacggttcttttgtcggtccacctcgattgacacgctttgtactgagacgaatgctggtctagagatcttgacttgcacatcagccatattgatagtctccttcatcagtggatctttgtagacacagccaactttgagaagtgctgtttcaccgtaacctgggggaacatttactgacataaggaaatccctctcctcttcggcatacatgtcaccaacatctatggagccattcctcttgtcatctgcaagtctgctagaatagcttcctgatctgatcgagccaaagtgtacatcagggtggaggctctccacctttacatgcaaatcctgtgcaacaacactcaagagtccaccaatacactgggcaaatgcatcttggatggcagcctctgtctctatgaatgaaaaggtgcccccggaggtttgtgagattgaatgcagcgagactgaatcatggtcagcaccaaatccaaagacatgaactggtacctgttgacaaccattactagtatatggcaggagtgagcagtactctggtgctgctttgtgtacaccagcggttggtgagactgtatatgtatcttgcccatctgatagtaggatgatgctgcacactggattcttggcctgtcgatcttcaatcactttggagcctttcctcaggccctcagcaatattggtcccaccatttgatgtcagtgaataaacagcttgcaagctttgctgacgaccagtctcagtcatccgacggagggggaagagtctacgtgcagatgatgagaaggcaattacagaaagccgatctgaggagccaaggttctgaatgacaaatcccatggctcttttcagcaatgcaagtttggtaccagccatgctcccactgacatcaagcactgtgatgagatcaacaggggctcgagttgtgcccaagctattgccatcttcaagtttgctgcttgtttgcaaagtctgagcaaggggtgcctttagatgaactaggactgtaaaatttctttctgaagtactttctggaacttcagtgaactcaggatatgtctttatttccactgttcttaaacacccctgctgcgagccttcatttgcttcagacagtgagtccaagggttcatcatcgttaaaaatactacggtcagtgtcaggcaacaacgatgtcatatgatgcagccgaccagaagaacgagcacggggaagtggtcgcagtatggtcatctgcccgccattttggtgcccattaactggattaatccttgcacttccttgaggaaattcaccaggcaagggacctcgaaatgggagttccttccacttggtgcggcaaactgggcaattgttgcttccatgcttaacatttgcagctatacaatggaagtgaaaggtatgtgagcactctgctgtgaatagagcatggccctgaccaggcttcattgtggtcaaacatatcgcacatgttttctggaagaaaaaagaaggtacagtgagattataaaatgaacagtggtcaaacatgaaacttgaagtggttagcatgcatgcttccatggtatacaatacatgcttatcagtgatgctgcaaagaaagcaaacgagcatctagagacagcaagattaaagggataattcatgaagatgatgctgtgataatctctaatcaggtactaaatactagcatacttagtttatttatatttattgaagcggtcattctataatatataatagagatattacgaataattaacaacacaaagcagcaacatcaagaatgccaaagaactaaagcataggcagaaacgtgtaggcatgtagttggacctttacacacttgtcgtcttctatttttcataaatattttttcacaatgatgaaaaagtccagagttttttttttatccccaaagagatattcatcccaaaccttggtcagacgccgtagtttcagactcttttttcagaacaaacttgctaagagaattgcaatacaatttgtctcggagaaaaaacatcaatcattagtcatgtggcaagttgcagtccatggtcaagctaattttacaaatggaagaaacaatctttagcattatcgagtgaggtaggtggcttaatccgaattagtcattgctgactaactaacacacctcaccctctataacagaagattaaatggttgaccagtgaccacccacagacatttgaaaaacacgactctaatagcgtgtccctgttcagtttcagtacactggtttggtataattagctaggctgctgcaattttaacatttgcaaactggcatcttctgaatataggttcattttgcaattttaacatttgcaaactggcaccttctgaatataggtttccttttgcaattctgggctcttaaagcgagacgggtggtgggctctgcagttttaagttggaacagcaagagaacgcagaagggatctgagaacagtgtggaacagtgtccactccaagctgttctgaaaagaggatgctatggctatggcactgacctcttctttatgcctcctccacgaaaaggagtgaagtgagaggaggctagaggaaagggcagagaaaagtgagtgatgaagaaaagaggtgtggactatggaggaggagagtagtagtatagtcagtagtgagagtggagctgcaagagagtagaggaggaccccatcgttaaagaaagacaaactcccccacttcatgattatattcctcctccaccattgccctctgcccatcttctcctgcatctccttttctcctcttgagctcctcttttttatcttctctctgtgtttgtgtgtgtgtgtgtgtgtgcgtgtgatgaaatcatgaaagcaaagctacttgcacagttgcatgcatcatgtgtggcaaaaaagaacatccatcacaggtgtacaacctgaatcagaacttgctacaataattactggaactgaaatcaaccgagcaggcataaatcgagagaaaaaaaaggaattaatttgtgacttttgtgtgcatatggatggatcttggctgtaattttgcttgcaaagttgcaagcttcttttctctttttttttatgcttcatacatagagatgtgaaggatgtgaaggagggactgtaccttgaaggatttgctgccggatttggagaggcgaagtccggcggaggtcggcgtcggggtggtcggcatgagcgcgccggcgcccttgaccctctgctccgccgtgggcgtggtgttggcgctggtcgccgccgacgacgaggacgccaccggcgacaccagcgccgccgtggacgacccggtggacggcgagtcgccgtcgtccagcgtcctgggcacgtagacgcagaggttgagccccagcgacatcttggccttcctccatctgctctccatcctcactctctctctcaactactgctactacctctaccacccctctccgatctgagctgagcttgagcttaagctacttgtaggtaggtgggtcgctggcaaccgccgccatggatgggaggaagcagcagagcacagagctagtaggagcttagtagattgggaaatcaagaaagagacgatgtaaagaaagaaatgaagagagaaaagaaagaggagtgtgtatcgatggctatttgacctcaactcccaagctccaccaaccaaccaagcaagctgaagagtgatgatgatgagtgacaagagagagagaagaagaacaagaagaggtgaggagagagagagagagagagagagagagagagagagagggagttgtgagtgagggagcagccttttaagaaagagaaaagcagcgagcgagcaaagcacagggcgcctatggcgagggggaaaaaagaaagaagaagggcttggaaagaaggagatgatggcgagcagtgaagaagtaagtggagacctcagctcagctcggctcaaagcccaacctgccaagctgtggcctgtggcctgtgggtggtggcgctgtacactggccactggcacagtatgtgtaagggaaaaaacacacaaaaaaactgtaattaagccaaaaaaaaagagaaagaagagtttcttgtgatttttcttgctcgattttttatttctttatttcttttttttttgtgagagaggctctactacttctttccgacaagcggagctagatctctggcttgctttgtctgcctatctgctgctgtctgcctcctctgcctctcaacttattttcgggtgtgttccgttttgtttccttctttttattctcccgatgattaaaggggaaaaaaagaggagtgtgtcaatttcttttgtttttttttgcctttcctgtttaattgctggtgcttttttttctcgtcactgatttcctcgtgtcgccgttgatgggcacaagcatttactgatataattggcgagttgctgtagtgtattcttaccactagttcattccaatgtcatttgttgggtatactagttacttacttccttggtctaaacaaacgaatataaaactgaatatgacatatcttagtataatgaatctgaacagacatatgtccgaatttattatattaggatgtgtcacattcattactaaattggttttttatgggacggatgaagtacaaatgatgcttttaatttatctaaaaaatcataaaggaaaaaaacctgtggtttaagtttgtattgcccttgcaggtgttaaacgaatgtttgatacatccagtccagggaagcagaatgacacctttatagagctgaaccttaaaacatgtcccaaaatagtatcccaagtccggaagtcccaaaccaggagcaaaaaagcaagggccagagagagagaagagatgaaggggagaaaaaaaaagaataagtgagcaaatagtcatagaaaagcaggctgtgactttatataaaggagggaatgagagcaaatgcatggagtatcagtagtaggagtaatctattgtggtgtgggcggtcacttttgcttgccctgctgtgatgtctgtgagtctgtccttgagcactgatgaggtcaactgcaactttgctggtactactcgtaaaagaatagtctactccatatttgagagcttaagatgctaattacaatttgcatgcattaaccagaagaaagcatgtgccattggtgttgtcatgaaaatgaggagcaacagtactggtgatttggattgtacaggcgaaacagtaacagcaaggctaatagtatagcccgctgtgggctaatagtccagggctaaagccaactactagtacaatagattgtctattgactgactgtatctcataatcaaacaattaattatgacatgcacatatcaatatatatgatcaagagtgaattgtattattgtagctatttgtgttgtgagataaactttgttcaccaaacaccaggatcatagcacagatcatactaaccaatttctctggagtactaaaagtacaaagcacgtgtttgttggcaagaagagctcgtgaggaaggagtggatttcctgtgctgattttcgtcaaacgatgtggcatcagagtttttcacggcacagttttcgctcacgatcgcgtggatggaagacgaagcacgcagaaggtgatgagatcgcgcacgaacggcggagatggatttgcacaccgctgggggaaggggatcgtgcgccgcggggtagccagttctcacgggatcgtctgaggacgtgcaggccccacaaacagcgtttttagcgccagggtcggctgcacacgaccgatactgcgtggagaaaaatgctaacgccggacgacaatttagtcgtccgcttcgttctctctcatctacataggaaattgatgatgtggtactattttgtagcccgcttagtcagctgttgtacctgcctgtaatggtatagtacatctccatgtactgtagagactggagagtacgtataggctgcaaagacgcagtaattaaatctgcttgcaatacgtaggggggtaggaccagagcagtgcattgcatgtctgcatctgcagctggcagcgtggaaacggacaaggccggaatatttagtttgttgccaaattttgggaactatataagaaatcctgccaaaattttgataagttgtcaaaattttaacaactatattaaaattttagtattaacaaaatttagtaaggtttttttcgcatgaaagtaaacgtaccctatgtatctcgacgcagcagcccagccgtgttgtgtttatgttaatcgtgttgtcaattcgacccctgatcaagccatggacccccgcccgctgcgtccgtgccgcatcgcaccgcacggtttacgatggataccgcaactgtagcggcgttgcgttgtcagagcggttacaaataatgaacggtaggagattcaacaggattaatttttcctgagctgaaggagagaagggaagagagatagaatgggcgggtgactaattagagcaagtttaatagtgtagtctattactagcttcaaatcatatatagctaatataatagtcaatttatataatagttgcttactatgctattaatacctggtcccacctgttatacacatattacattttggagtctgtgctgcagctggctacagatctgtagcccgctgctcttatctctcttcatttatctttttaaaatatatttatagctagcttatagcctgctattgtacctgctcttagccgtccagctatatgctcgacccgaggttgtggggcccgcagtaactagcgatggcagtgaataaccgaataagagctatcatcctcgcgcgtacgtcccatcgccctcactcgtagccaccgtcatcgcccacagctgtcctgtcgtcgtcgcccacctccgccacagccgacgtactcgtcctccgcggcatctagcgtcgcacgcatccctcctgccgtcctcgtccttcgcggatgtcgtcgtcatccacttccatccccccgtcctcgcccacatccgctcgtgttcgtcgtccttgtcctctgtgactaccgccatagcttgtgtccactagattgtgttgttgcccttcgcctacatcctctatggacgccgtcaccaccttcacatgcgtcttccgtggacgctgccgttgtcgcccggtgtccgctgcaacggtcgccatctcactcgccctcacccacgtctatgttgccccgtcctcactggcaagaaacgagaagaacgagaactccgagaaagaaagagaactctgaaaagagggaaaagatggtgggtccataaaacaataaaatatttatgatatagtaagtctatataatatatcttaactataatgctttaattcagatgatgtgtacacccattgcagccgatagtgggctttgttattgaccttgctctgagagagcaaaacaggcaggggcagcgcagcgcggtgacaatgtagtgcatgcagcgggcgtcctgtggatttttgcacatggtgggtggtgatggcctgggagtagggtttaacttatcgattttaaagtaaaaaactgttcctcaccggttggctaaaaaccggtaacttttaatcaatgtcatgaaaaaaaaacctattaatatagaccggttttcacaaaccaagagctaacggtttcacgaaagccgactaattctgtgcgaccgtacatcataaaaattggatataaacttatagctaatttattatacatgttaactcttaagttgacttagaacaactactccccccgttccataatataagggattctggagagatgcaacatattattatgtctagattcgttgtactgtgatatgttctgaaatcctttagttttacaattaaatttgctctaatatttaagggcaagagcatttaaatcccggtgggccaacactccatgcgatgttttcgggtgctttcacgacaccgtctatatattaacgcatgttagagcgtggaatctgccacagataattgaaaaaagcgccgtcgatcgtttcattggatctgaattagcgcacgcccccatctaccatatcatatcccaccgcattctttgaccttggcactgaacgaacgaatggaaggatggatgaaaccattaaagaagaagagaaaacgttgctttacgagcactgtactctatatatatgcgtgttgtgccgattaatctgttgcgccggtgcagcatgatcgatcacccaccggcacggcacagcatggcagccggcaaatctgatgattcctggatgtgcacgcaccaaaccagctaaaaaacaaacgcatacgtacgccacagatcgatgccgcggccgggtgtcggcagtgagcgagtgagtgaccagtagactagtgggtggcaatggcatgcatgtgacctgacctgagctgaatcaatcaaagtgagctcatactagtaccagctcataaactttgggtctgtttgcaaaacttctgacacgcagaactttttctcagaattataagcttcctccgacaatttaggtttttttcagattttaaaaaattgtaatggtgaaatttaaaaaatgaactgaaagtcagaaactaagaaatccagtgattcttataagctggctatcaaccagctgcttattagaatctaaaactcccccaacaaacactttgacaacggaggcggctggttatgtttattatggtgaaatctatttacatgagtgcaagctctatatttgatttgagtgtttgtgtgtatggttaactacttttatagtgatatggtaagcacccatcgataataacacatctattatgatttcgttcatcgataataaaatgcctatgataactttacaatttagacattatctcaggccttgtttttagttcctaattttttccaaaaacatcagatcgaatctttggacatatgcatagaacattaaatatagataaaatgaaaaactaattgcacagtttgcacgaaaatcgcgagacgaatctgttgagcctagttagtctataattagccataagtgctaagtaacttacatgtgctaatgacaaattaattaggcttaataaattcatctcgtggttttcaggtaagttataaaattagtttttttatttgtgttaaaaacctctttcaatatccagtcaaatgttcgatatgaaactaaaatattttttttcaggaactaaataaggaactaaataaggcctaaagttttgagaggtgccatgaggagggaggaggaaccccacacccacacatgtcaatccatgcaacagtggcgagattgtttgggcctggtttggtttgttgctcggtggctccactgcccaagctgagatgctgcctgtgcctcctgcctcttgcctgcctgacccatccattccatgcgcttttctttgaccctcgccatcaatccatgatgcctgcgcccacccactccatcaccctgcacatgtccaccatccatccatgcacctcactcactcatcgtcaacatgttcttccatcattttgtgcactaatcacctgcactttcagtactaccagtggttagtattttacatataatgcattggcaataatatgcaagaacaacaacttcttcagagatggagtagacaagaagcagcagatgctgcagtgcagtgtcctagatatgtcatgctggattgagccaagaggcgaataatctgggagagacgggtcaaagtgttgtagcatccatatgtagactgttcaaccagccacatgcagaggaggctggttggcttgagctgaatctggctcactttcttttactactgcttttgcctttggagtttggaacctgctgcaaaaactactacactcactggtctcgactggctctattcgaaaaagattggtctacggctctctcatgacttttgcttgatgatcagattttgctgtgcttaaactaagcagattctctgtgcttccgaagaccaaagtggtagcgactagcaacgaacgcagaagtgtaatgtaatgtaatgaaatgagaaaatgagcatgtgaaagtcttgttttgtttttgtccctaccacggcgatggagatcgcaatcgcaacggcaaattggcgaaatgtcccttaaaaggcgcaaggttttcttctgacggtggattggatgatccgtctctttcacagcgccaatcgagctgcccatttccagcacttgaccctaatttaagcaggcccagtgcggcaatagcaacagcaagaaatccatggatagattaattttaactcatcttaatcgtcacgtcatgtattctacgaaatcgttacaaaacagtcactgacatgtgagcctcgttagctgatacgactcgtccgaacccatatgtcagtgactgttcgcaacgatctctcttcgttgtcgattttaatttgcacccggtgtccctttcatcgttcagatataggatgttcttcttgttttttcatgtgcctatgtgcactagattagtgcaagagaacaaaagaggagtccagatggtggcatcctattcaacgattggccaccatgctaagcaagcaatagaggggttgggttggggtcgctattgaatcccgtgaaaggaggcggctctcgcttttgtgcgcttcttcttcttcttattcctccgtcgctcttttctcttttggagtctacgggttgcggtcagcgacggaaaccctgcacgccaccatctccaatttggcatcacgtactctctacaatactagtagtaattttactgctattaaatttgtatggtgaaatttcggtatagatcaatcagaaaaaaatttgttgtggaaacatgtttacatgtggcatctcataatttgcatggttttgaatatcggactgtaactatttgagaaggattttagctacgtgcttttatgtataaattagccgttatagctcaatttaaccgttacagttatttaaaaaggttaaccgttaaatgtctgaacccgctatttaaaaccatgataatttgccatcttgatctacatcatttagtgacttggagctacctcacttgttagtaagagagggaattataccttgtgtattgctaaaagttccgtttacatcagataaacatatgattttatcggaaaaaactaaacatctggctgtgtgtaatttgtactttctgtgacgttgtttggtccatccgttttagaaggttttctctcatccttggagagagaggtacattatatccccactacttgagaggtagaaaatttaaattggttaaattaattagaataaaaatatacagtcaataatattaatgtaaagaggtgtatatatattaccttatagtactatataggagttatctctttaagtaacaagaatgtatatacctccccaaatatagtagagaaaaatatgaaagctacttttatattccagcgacattatcctttttattatttagtactccctctgtttcaaaatgtttgacatcgttgatttttttagtacatgtttgactattcgtcttattcaaaaaatttaagtaattatttattcttttcatatcatttgatttattgttaaatatactttcatgtacatatgtagttttacatatttcaccaacttttttgaataagacgaacggtcaaatatatgctaaaaagttaacggtgtcaaacattttgaatcggaggaagtagtaactataaaaaaaacggggatattaaatacggagtataatgtacaggggaatgcaatcgttgtctgtctcaactctcaactctcaaccaagtaaaattggaatggttgtacagtgctagtcctcaagatgctcttaattcttgcctcccacatgcgccactagctagtgattgacttggatgtttttacctgatgcgcacgctacgaatatgcttaggtttattgcattattaggagggttaacagtaagttcaaagctcagactgtcgcccatttatcaaagagaataacactgctttattgctgggagtcactctctagaaaagaaaacggattaaaaattacctttcaaattcaggctccttttttactgaaaaaaaaacttctttcaaatcaccttgtcttttatgtttatcctaagtcaaaatatgcatatctttgactattaatcatttgaaatccatgtagtttaacaacatataaattatatacttaacaaaatacgaaagtatttctaatgatgaataaaaatataaatgttcaaatattaaaactataccattttataaaaattgatgatccaaaattaaaatgtttgaactagcacaaacctagaacgacagctaatttgaaacagagaaagaatgatgagtctgtctcaaccagggttcactttctcgtcggtaaccgcgcggtaaccgcggttaccgggcttaccgtggggggtcggtaacaaaaaccggcggtagggtttgggcaaattttgctcaaattcaaaaatttgaaaaataatccaaaaaaatcaaaaaaaatcatggatgtaaagcttgttttgtatgttgttatggtgaaaaaatttcatcaaaaagatgcaggtaaattcaaatttgagcgcaaaacctattgtgaattataaaaaagaaaaaagattaaatggaatgggccaagtatgcactgttcacgaggcccaataaggcccacaatgggaggaaaatatctttggaagcctctgcttcgtttctctggcgaatcctactgtttttcccctctctcgcgtagctgcgctcaggacccgaaggggcgacggcgtgcgcccgcgccagatccgccgcctccgcgccggcgaggccggttcccgcgcggtaagcggcggtaaccacgcggtacgcgacggtaaccgcctgggtcgacgggcaagaggtaatccctccgttttgaaggttttcgcgcggttaggagcggtaaccgtgcggttttgtatggttaccgtcggcttcgtaatctatgagacgatatacgtatgtgcggtaatcgtgtgaaaaccgtggtaaccgtccaccctaccgtggttaccgtggcttgaaccgtggtatggtattttttactgtgatatgcatggacatatttggggatttaggtcaatagaacatatttttaccaatatgcatgtgaaatacattgggaatatgagtttatttcggcatttggttgcccgtgcttggctaaaaccatgcatgtgaagtatatttgattgctttggtctatgtacatataggttaaattaaatacgtcatagtatggaagaatttggatgcatgcttaccagtgtacatataattacgtcgtattattgcataatgggaggtatgtttataattagcagtgataatttctcatgcatttgatacagggtggagatgttagatagtagggaccctgtgtgggagcacggggagaatatcccacctggatggcgctgtaagtattgccatacaaagaggggcggtggtggggcaacaagactaaagcaacacttggctgcaagagggaatggggttacatattgcaattcagtgcctccgaatgtccgtgagttcttctgccgtgagttggacaggataaaagatgcaggtgaccagcgtaagagtgatagcggaagaagggttgaagcagcaagggtcaactattatgacctaacaggtgatgccgacgaggaggaacaaatggaagcagccattgcagcctcacgacaagacgaaaactttaggagggatgttgaggagcgtggtggcacttatgagcatggcggtgggagtggatccgctcagccggaggcacggaaaggtagaagtaacccaattaccaatatgctacgaagggctacgtctcatagggagtcacctgctgtgagagattacaacctagcatctgccaaggcccctgtgcagccacgcattgacacaggattcttcacaaagaaggggaagcaagctaggcaagccattggtgagtcatgggcaaggttcttctttaccgccggcattcctggtagaaacgccgataatccatactttgtgagcgccgttcgggagacacaaaagtggggtacgtatgcatctattaaggaacttctttttttctaactcattgcgcactacttatttcatacgtcaattgtaggtgaaagtgtaccttctccaactggtaacgagatagatggaaaatatcttgattctacagagaaggatgtgaagaagcaatttgataggttcaagaaggattgggatgagtacggtgttactataatgtgtgattcttggacaggtccgacgagtatgtcggtcatcaattttctgatatactgcaatggaataatgtttttccacaagtccattgatgcgaccgggcaaagccaggatgctaactttgtgctgaaggtatgtatggttcatgcaacaaattacttcatcacctgttatcgtcagtgttaggggcatggactaatttttattatgttatctaccaatgcaggagataaggaaggtggtacgcgaaataggctcggagcatgttgttcaaattatcactgacaatggctctaactacaagaaggcgtgcagactactacggcaagaatacaagacaattgtgtggcaaccttgtgtggcacacacagttaacttgatgcttaaggaggttgggaaaatgccagaccacgaaatggtgattgagagtgctaggaaaatttgcagatggctatacaatcataacaagttgcatgctatgatggtcttagctataggtggtgaactggttaagtggaatgctacaaggttcggaacaaactacatgtttctccagagtttccttaggaagcgagatcttttcatgcaatggatggcttcctctgtcttcatgcaaagcaaatttagtgggactttggaaggtagatatgcacatgcatgtctatctagtctgtcttggtgggagaacttagaggcagtagtgagttctgtccaacctatgtactcattccttcggtttgctgacgaggacaagaaccccaatttgggtgaggtacttttgagatatcagttgctcaaaatggagtacgacagtctttttgcgaatcaaagggacaagtttgaagcatacatggagatcgtgaacagaaggatgcacgacctaaccaatgagactctcatcaatgccggtaaatattggtcataacataattcacatggcatattatgtaactcttacttaacctgtgccatgttttgtagctgccgcattgaaccctaggacgcactacgcgtattctccaagtgctactgtcttccaagacctccgacaggcattcgagtggatgacggatatcgatacggctgccgccgctttgttgaaggttgagatgtaccgacgtaagacgggtgaatttgggagggcactagcaagaaggatggccatagatgggaaaacttcacctggtatgtttctaatcatggaactatgatatatctaattgatcttgatgtattcagaattatgaaatgacatgttacttggcttttgcagcacaatggtggtctatgttcgcctcagacacgccgaatttgaagaagcttgcgttgcgtttggttggtcaatgttgctcctccagtggatgtgaaaggaattggagcacattcgcattcgtacatacgaaggtccgtaatagacttacccacaagaagctcaacaagctagtgtacgtgaactacaaccttcgccttcgaattcagcaagcaaatgcccaaattagggtggaggacgatgatccccttcaaagattagcggacctctcattctatgaaactaacaatcatatcagtgcctggatggactagtgttgatagcgatgaagagacccaaggaagcccagagtaccaagagtccaatgatagtagctcaagaactgaaacagatgacggcgacgacgatggtcaaggaggccaaggcactactaatgtgccctcctaggggtcacacccaacaatcagatcaccacagccccgttcaattcactggtgtgatataattcagttgcaatttcaaccttcatcttccaattcagtactggataattttcttgcaattttttgatttgcaggtgagggcgacttcactcatgctactcaggaccaggatcatggtgctccaagctctcaacgaactaccattgcaccgggagtccgacaacagcaacaattcagtgacatacaacaggatagctctagctcattcagtgcctctaactttgaaagtggctatccaacgtatgtgtacaaccatccccaagcttctgattatcctgttactacatgggtgtatgaatggcaagagcctcagtggtatgctcaattgtacgctcagtggcaaacaacatcatcatggacaggtcaaagttgggaggaatacaaggcggggttgctacattcacatggcttgatgctcatgtccacagaggagtacaatatggcatataatcaatggaatgcgtagctatgcatgtccttgtttatttcctttcattcgaactagaattgtaatcgtggacattatactgtggactctattgttattgtggactatattgttattctggactgtattgttattctggacctacatgtggatatcgttatgctttgaaatgtgagattgatgattgttattgttgttataatgttatgaattattgtattgatttgaactccacaatatagagtaggtcatgccgaatttttctgttgtataaccacatcttaattaactaaaatactcacattttagtttttttctattatttttttcatttttcttatttcagttccaacatatcgcggttaccgtcctcttatcgcggttaccgtaccaaaccgtgcggttaccgtgtctataccgtggattttgaattcaaaaatttggaaacgaaatttgtgcggtttttcgcggtaaccgcacggttaccgcggtaaccaccataccgcggggggtcggtaaccccccaaaacggtaaggtgaaccctggtctcaaccagatatatttatcaaagaattcagactagtatttatcaaagaaaacaatccaggtttattatttggagtcactatctagaaatgaagactggtacataagtttaggctgcgtattttgactggattaaattgaattagcttgttgtctcaaaccgatgcatgtattcatcaaagaatccacactagtatttattaaagaaaacaatcatggtttattacttggagtcactctctagaaatgaagactagcacttcatccatcccaaaatataaacatttaaaatattattttaaatagtgtcaagtcaaatatttttaattttaactattaatagaaaaaaataaaaaaattaatcatttaaaattgatgttactagatttatcattacaaattatcataatatgcaattttttatttaaaacatcttatttttatagatattgttagtcaaagtagcccctcgaagactgtgtcgaagtctaaaaatgcttatattttagaacagggagagtacttgtgttttgtttgactgaattaaattgaattagctagttaattgtctcacccgatgaatttgctccatctgtcaatgagttaattatctctttctacatcttctctctcaccgatagtcatatcctatgttggttttttcttctcaaggtgtggtctccatcctcttatctgcacactgtgtgcaggttttagcagtgtagctatcgctgtgtgtcgattccatctcgagctacagttgaagccataactttttttgatgcttgcatttactaagacgaattattgatcgatatggcgattaataacctggttaaacttcgttccagctagctcaatcctgaccacgacagggtgcctctcgatcaggcaagttcagctagctgccgactgatgtcgttttgataggattacaagtcgatcgcttgactcgttcagatcgacctgacgaccacacagtaattcgactagtcatgtggtcgtgtagtatttagggcggttggttttggctgattagctatacgcaaatagatttatttgattttctcaaaatcatgttctatacagaaagttttcatacgaatgtaccctttagcactttaaaaagtatattaacggtaaacgagaagtaaccaagatcaattaactctctacactattcacttgatcgtcgaaacggattatttgctatatgattcaaaacatacatttcttaaagaaaaaactttatgcctacctattaagtttgttttaaaatatttaatttatccctataatcactcaataatccgtttcaaactgagcctaagctcagctgagatcgaaagcagcaaggagaatcaccgccaagaacgccattgccatcagaagagcacgagattttagccctttctgagatggaatatatatatacaccaccggctctcgtggtaggggctcacccagtagtcgtcttcctcgatcttggacgatcgtagcgatccgtagagtagcttgtacgcaaacatattcggtctggaatttgtcatttgtacaagacaagcatgtgattatgaactccttgtatgcatgtgtgttgtattgtattgtctttaagaagaaaaaaaaatacatgtgccattctgatccataatcacttgcagcagaatacaatgctggtccattctgaaatattcagatatctgacgaacaactcactctttgccagaagaagaggttattgatgaagattgcgatcttctctagcacattctgatttactactaaagattgcaatctttttttacatagcagaccgtgatagattgatagtagtccgatactcagtggcggatctagaaaaaaatagtagtgggggctgaataaactacatcagcataaatcgaaccttcagtccccacatcctatggatctatggaaaaaaaaatttagtgggggcttaggggggtctccactgtcccggggtggtagtggggtctcgagacccctccgcccccattgtgaatccgccctgctgatacttactaattaatcctattactacctgcttaaaaatgggtagtgaaaagggaattgcagaaatgcagtgatccactggattggcgccggcaccagcgaagactaaagcttgaatgattgcaggcaagaacacacatcataaaaatggccagcaggttgccaaattgttgcatccgattcccaatttccaatggacgcatacatcacatcttcttttttctgtgcacttctttccttctgttcttgccttgatccatcctgggagagaataattctcatatgccaacaaatatcatgagagaatcctatggatgtccactgttcgattgtgccagtgctttatgtggtatctgactggcgtatgcttttcaggtggggtgttggtgatgttgcatttgcagttggagaatatatgtagtgtttttttttcatcataaagtgcatttctaacatacaaaatactataaacatataatctcctttcaaatatattagttcgaagccattgttctattagatgatagatacataaacctatgcctaatgatgatgtgcagctcatctccttgctttttgaagagttctgaatcatgtttaattcctttttaccagaagaatatagaattagtaccccactttatcagctaagtatgcttctctttttaacaagtgcatcctggacttcattaaaaaaaccagtcattgagtgagttaattggggccagaaccaaagataagatgccattacccgtgtgatgatgcagcatgtgcttgtcaggagaagagcttagccatgactcaactttgtagcgaccactaaataaaaattaggtattggtctggttagagactaatcagtgtgatgtgtaaagcaatatagtttgtcggacagtagcaaaatccctgacgttttctatttcaccaaacaactgtagaacggaagccaaagcagataaaaagttctgtttgatatactcagaatatatgccattagacatgggaacaatttcaaatatgcaactttgaccattatttttgaacatgaacatgcttgtaagaaatagataagtagtaaatcctccccgtttttaaattgccgtcactggtgactatcattgttttagctttgaccactaatttactcttaaaagataaaagtagtacgacagatacatgatttatgattatatttaagatgctttaattacaattcggtgacaaggtataattttttagcatttcagactttcttaaaataattttaaattcaaagtttgaaaattaataaatagtgcctaatgtcagttatttaaaaaataaaattttttaaactagttttcaagctaatttatgagcttatataatttttctgactgatctaattagttttcgagctagaacattgttgtcacaactcgcaaggtttgtaaaatttcacttcaaacagtttagaaaagttttccgagaattttacatgaaacatatagtttaggagcttggaaatcgtgaaatgaaaaatccaagataagaaaagaagagggctatagtactatattattattattattattggacagagaatgggtgaatggctagtcaaattatggatgaactgtcgtcgccttacagtaattacatgagctattggagttggggagcaaccacatactctgaatggagtcggcggtcaggacacaattagcagagtcagacagacagctaagagagaatatgagagataatgatgcattgatgctttgtccttttgcggtctggttactcaaagtgtgattaggtcgtgcattaacctctaagtggtgacataattaatggatggattatcaaaatgcaaaaactccaatcttatttttgacgactgcataaaagtaaaaaaagagatagaaccagtcagacaaaagtataactgagagatagtggcctggaaaactttggggaaatgagatggcgaggcccatatcatgtaagctcaaggtctggcctgccattcaggaggtaaggcctaatatagcccattgcatccatgccaatgcgagccgaggtcgtccttttttttgtttggggggggggggggggggggggcattcaggaagctttattaactcacagaaatagggttacaatcacgagctaagagctcggtaacaccctcaggcgcctggaagcgcaaacctacagactctttcgaacgtaacgcatagtgtatgagaccatgatcgagccactttattttcaaccctatctctccgacttaaaaaaattttcaatcctaactatatgtgtctaggttcgtagttacgagttgattttttatggaaagtagtactaattagagcagatcgaggaccatgaataacatgcagccctgctctagctttctgaattacgaagtatatgccagacctgagatttatcacacccagccgatcttagggctgcttctacgttagcacaatcggctccaaggatgaaaggccccttaactcactcatttaccaggcggatcccaccacggcaagccacctgcttctgcttcttcagccgatgcacagcctctgatcagcttccaagatgaaagcagtaactttccctcctgattgcgaaccacaatgcccacactcccttccttggtttgttgcacaaaagcaccatctacatttacctttacccatcctgggccacacatgacatgtcggagagaagggagagagagaggggggcaggaagaagaaagagatagaggatgacatgtgggtctcataattttttttagtgataaataggacccacatatatgtttttaactctaatgtcaccaaagtgccacatccgcagaccaagtcaacactgctacgtgaacaccacatcattgaacttgtcctccgaaaccatcgagggagtcaaattacaccggtattaatagttggagggtctagatatccggtcctgcggttcaaggatacgaatcagattccgtcactagttaagggactaacagtgaacttattcctttcctttttctgttagggccgtagtctaccagcctggtccggcccacctccaccctgggccgtgcctgggcttaggccacggcaacatagccgtcctacgttgaacccatgcaaactgacaaatctattctattttactttatttttttatttttcataaaaaaaaagatagccaaagctgaccatgagctccgccgcgccgccgatgcggaatcgcggatgcggtccacccgcagatctccgaccatcagcccaacccacggtttccccgccctccacaccccaacctcgtccgctccgtcgccgacgacgactgcctcctaccccatgtatataacccccgccactcctctcgatgttgaggtaaatcgagtgagtccgcaagtcgttcgcgattcttgatcgagatctgtcagggtgataaaggtaacggtctttcggctgtgtcttaggattagatccaactgtttctgtgcttggaacagttgcagagaaactgtagtttcttggatcagtttgtcgagtttgttttggtggatttagcatctcgttcttttgtttttttgtacaggtttagaacggtgctgagtttgttaatcttgggagaaaagggaaactgctctcgagtatggagatggtgttgccagtcgcgaacgcgactgctgcagcacttgcgcgggtttctgctatgttcaatgccccgcttgctcgtgctgttgtctttgggattcatatcgatggtaaatgatatttattttctccagcagctaagaaattctggagttgtatcgtgtttcatttaaattatgcgctatgcgctgattctgtgattttcagggcacttggtcgtcgaagggcttctcattgccgcaatactcttccagctctccaggaagagctacaagcctccaaagaagccactcactgagagggtgagctacactttgctcaataatttggaattagtagttttttctgttcctttccatttcttaatgcttcatcaattgtgttaatcaggtgttttttttttggctcaacaggaggttgatgagctctgtgatgagtggcaaccagagcctctctgcccacccatcaaggagggagctcggattgaggctcctacattagaaaggttcgtctcaattctcaagccccatcccctcccaacaaagtagacatttctaattagtccttcatgtcaccagtaaagtgttttatgtgcttcaccaaaggctctatgttgcaatgtacttctttctttcttttttttttaaaaaaaaaagattgcatgggttcagtttgtagccatttcatttagtaaggattagggaagtcggtatataagcattgttgtacacttatactatgatactatgacctagtgagcatggaatatgggtgttgatctccagagcttgttagttctagaattacaaccaaactatgatttagagttcacacaattatagctatggttccccactatctttgtaccaagaccgagaggattgaatactgatattctattgtttgatcagtgctgctggaccgcatacaattgttgatggaaaagaagttgtaaactttgcgtcagcaaactaccttggtttgattggcaatgaaaagatactcgtaagaacctcatgcttttgctaatattctttagtactcttttagaacatttgagtgatgtaaggaaattgcaggattcctgtattggttcggtggagaaatatggcgttggatcatgcggacctcgtggcttttatggaacgattggttcgtaatgttctgttacaacttatattcaatactttgtatcttgtggccaaaagcctaatgcaaattcaggggaggaacttagccattttgttgttttcagatgttcaccttgactgtgagactaaaattgcaaagttcctgggaacgcaagattcaatcttgtactcctatgggatatcaaccatcttcagtgtgattcctgccttttgtaagaaaggagatataattgtagcgtaagtgaacctttttcctcctgtttacaacaatttagtaacatattattcaacattttctaatgaattgagtcgtgccataccatctgatgtaaaatgaacatagatattttattgtagttctggaaattcgtagaattggtaatatggtatcatggacctcgctaatccttctgtgttattgacaaacctacttgaccttctagccatcatgcatttttgaaactcataatttcgaaatggtgaattctttttttttatgcgtgctttcagtccttatatatctcttttcattgttcatatttaaaattattagctagtttttgcatccagaaaaaaaataattcagtatggccacgttcttcataaaaataaatcttgatattcatatgcaatgcagtgatgagggtgttcattgggcagtacaaaatggtttgcagctttcaagaagcactgttgtttatttcaagcacaatgacatggcttcacttgcgagcactctggaaaaactaactcatggaaacaaacgtacagaaaagattaggcgctatattgttgtggaagctatttaccaggtttgtagcttactcatgaattcttttttgctgagaaatacattgactgaatttgtttctaaagtctgtctactgttctggatacagaattctggccaaattgcacccttggatgagatagttcgattgaaggagaaataccggtttcgtgttattttggaggagagtcattcttttggcgttcttggcaagtctggacgtggccttgctgaacattatggagttcctgtgagtgctccctctcatttcttttcatatatttccacaacagcgaatctgaaacaacaaataaagaactgggcaggcataatcagtggctcagtagacaaagtgcaatttgtattaagaaaatcttccttgttgactagcttagtttgctgcacaattgagttctactagttttctaagtattctttaccgattgcagattgaaaaaatagacattatcactgctggaatgggaaatgcattagctactgatggtggtttctgtacaggaagtatcagagtggttgatcatcaggtaggtgccacatcagatcgatagcatattgatgatggtatagaaatacctgcatcttcagtatttttaactggctgtactgttgtcatcttgcagcgtctaagcagctccggttatgttttctctgcctcgttaccaccatatcttgctagtgcagcaatttctgctgtggaccacctggaggagaacccatcggttcttgccaatctaagatcaaacatcactcttctgcataaaggtcactaattctcttggcacctttatttcttgcttccattaatttaccgaacatagtgcactggtaatatgttactaacctagtttataaaactgtgatgtacttactatgggctatagtcaaagtaccgaaaatacacaatgtttagcatccttacaagtattttgatgtacttgtgatatcaaaattttaggaaacgtctggcatatttcgctgtatatttgtccatccactcatcttttcatttgcatttgatgcgcagagttgtcagatgtacaggggcttgaaattgctagtaatatattgtcacctattgtcttcctcaaattgaagacatcaacaggttctgctgttgctgacctggagctccttgaggttatttcagagaaggtatttagtggtggattcaacaaattcgtgaaaagcacttgagatttgatttttggagttaagccaataatgtattttacgtaattgtaatttcacaggtattgaaggaagattcagtcttcattgcagcgacgaaacgatcgagtttggacaagtgtcgtcttccggttggaatccgcctattcgtatcagctggtcacactgaatctgatatcctcaaagtatctgaatccctgaaaagggttgcagcatcagtgctctagtgacaaactgacaaccttgcatctggcatgatgtgttctacagttacgtacaaatctgtatgctcgttgatctggctcaatttgctgtcgtgtctagcagaattacaaataaaattttgtaaaacagtttgaattaaaatatctggtagttttgttcttctatagtctctgtacatcggctgattcttcaacagtctgtcagttctggcattgttagcacattggtcaacaactcaacatatgcaattcattaattaatagaacaaggaaaaaaaagttcagcccagtaattcccgtgccatacaaagcccgtgaaatctctctgggagcggccatgcggatttgggccgatgcgtgtatgggattttcacacggagcatttcaattcccacaggaaaggtgaaattttcctccatttcgaagttcacacggagactcagatttgtctttttagtcatggctatttgcactgaacataacttactcctatctatcatgcggaaaacaatgatcaaatttaagaaccaagcagctttaaaaagccagagcccacatattagtagtaagaatgaagctagccgatttttttaaaatattcttttttttcttctcaattttacagaaaccgaggggaaaagaatatttcgaaaaaaccgaggggggtaataaataaatcaaagttgaactgttcaagccaacaagggcaaggcaggggggagtggggggactgtacctggacaccatgacgctgagcaagtgaggcaggtagtcaggttgtccgtcgtgtgtggttagcagatgttaaagttgacatttcgacaataatgttgtgcacgaaatgacgactgtgacaaagcattcctccatccaagtcgccatccaagggcagcagctgcatgggcctgggcgccgcgcccgccccaactcggtgctttaatctccttcctcctttctaggagtactccttcgtaaaaaaaaatctaaataagaatatgatatcttttaagacaataaatttgaatatgagataatatgaaattatccacgtagattcatcatcatccacatataaattaaaggatgtacattagtccggattttcatcctttaacaaatttagcagaatccctaattaatactcctagttatgctccctttcagcagcaatcaatcccaaatactactttctttagttagttgcaagagcagttgcaactttgcaagtgtaggtgatcatgaaacaaaagcagtttttttccaaaggcgtcacggggaagcaaatcttccgctgctttttctgcttgctgctctgctgctgcacggtgccgccagtcgtgcaggacggaggagggggggagagcggttgctttgcgagcagggtgcagaacgtgattggagccagaggctgcggttgggcttcgctttgctttcacccggttttaccggcagaaatgggcatcgatcaccggtacgacacgcgacgggatcctctgacgtactgccctctaactttgagaggatgacatgtgggacccacagctagcggacccacatgtcggccacccatgttagagggcagtacgttagaggagcagcttccgtaggacaccgggtgcggctacttgcgccaacagacggcccagaatccccaccacgccaccactcacagatctgccagccggtcaggcactcaggctgcttctgttcttcagttttaattcaacgcccaagattatgatactagtagtatctgaatctaaccactaccactaccaacagaacagccgcctcaatttttccaaatccatgagcaccactgcgccagtcaccattgaccatcacagcacatacattggatcatgggaagcatcgaaaaaaatgacaagtgaatcacactccagatggaaatatgcataggtgaactgcagcaattcacagaaattttctcatgtttttggattcaattttcatctgaacaagcctgctacgcactaagagagactaccctcttcttcagttcagccaaaaggtgatcaactgatcactgtatgtacatcggacaaactcgggtagaaagatatagctagctcccaaattccagccaattcaccagagctcgtcatggtcctaactcctactggacacaaacactaataatacgctactaccactgaaccctgccactaatccaagccaaaattcacagctagcagacgagtccttcgcctgaagaaaagctatctacacatggatggagttcatcatcatcctcgatcgaacgaactagcccatcaccgcggctcccccacggctcacgatccaaggatgccctgcaacacgaacaccgaacgatccaatcgttagcaaaaacacctcacattttctggggaatcatgaactgaaattacaaagtggagcaaaatttaaacgaaggaagagggttagtgcgtactcaggacttggtcggcggagaaccttctggagacgtccttgcagagcatgcggcgcatcaggtccttggcctccggcgagacggaggcgaacgcgcgcggcgggaagcggaggttgccgcggagcacgcactggaagacctccgcggcggtggcgccgtagaagggcagggtcccggagagcatcatgtagagcaccaccccggcgctccacacgtccaccttctcgccgtactccctcccggccaccacctccggcgccacgtagtagggcgtcccgaccagccccgtcatcggcctcccgtccccgaaccaccccgccgacccgaagtcgccgagcttgagcacgccgccgccgtcgaacaggaggttgtcgggcttcacgtcgcggtgcgctaccccgcggcggtggcaggacgcgagcgcggaggccagttgcgccacgaggtccgcggcctcgtgctccgggaggcggccgcgggaggagacgagggagaggaggtccccgcccgcgcagaggtcgaccacgaggtgcaccgcggcgtcgtcctcgaaggcggcgtggagcgcgacgacgtgcgggctggccccgggccccggcgccgacgcgacgaggtgcaccttgggctcctgctccgcgagcgcgaggtcgagcgcgtccgccgcctccgcctcccgcagcggcgccttgggcgtggacttgaccgcgaacgcctcccccgtggcgacggcgtagcagcggcggacggtgccgaagcggccgcgcccgatctcgtcgccgatgacgtactcctgcctcagcgcgagctcgccgccgctgctcatgctatctccgcgattctcttctccccccttcttctgtctccgctggtctccgacgccgcggccgcctcgcctataaatgcagccgggaaacgcagcggccaaggagacgaaatggaatatccgcctcgccttttttttctttggctcctagcgaacccttttcttttcttagagaatggtatttttaaaccgatctctaaacttaaccgggatataagtaatcattttaaattgagaacttagccacttaacaattcaatatgaaattagctcttataaaaatttaaactcaggattttggaaggctactcagggcattataatcactaggctacatactctttcgcacctagcggacctacctggtgatgtgtatcgtctcgtattttttccttctctattttccatttaattacgcattagcatagggattaataagctttattagttattactaccgactcatgatttaacaaggaaataaatttgagcaaaataaaaatgagatacgcatctccccagatggatattatctactaaaaaaaatctccccaagatggatgaagtgtattatgttgtcttactcctaataatgtctttcttttaaagtttggagatttgtatttatttgttgaggggattataaaacgggagcagtggacgggttgggtttggttgtttgggcaggccaatggatgttttttgttctaattttttgggataaacaagtgcagaaaccgatgtaagcacgggacaagtgtctgtatggtcggtggggcccaaagaacagcgaattattggggcccatgaaacgtggcctccttggagcgtgatgacgaggatactgtgccactacagtgtccgcatgttatacacatctgcagcgttggacctggccatctttccattctgcccatgattatattgctttttgaaagggaaaaaggtaaagaggagaggaaatggactaccgtctcttctttgtttaagctcaattaatcccccttggttttacaaactgtgatcaaacacaaagttcactattttttatttttattttttgcgaaacagtgaacaaatggtagcactgtctcgttgttggctcgtttaattttcagataggatcgttttgatcgcatcgagctcgagcgatccgatggcctcgtcgacgaatatatatggaattaatgccgccattttgttgttttgtggtgcggtgttgtcgtgattacgattaaacagcttatccatatttggtttttatgacgaacgaggagaggatatgtagggattatatatctgcatcttcatgcattccttgtgcgatcgacacctgatctgcatgcgtaatgaaaacctgccacgattggtacccgtctcgttcgttcttatcaactggactagccaacaaggcccacgacgaatgcatgcgtgcctaagcaggatttacgcatgcatgcaggcatgttgtataaatctttttaccgtagagagattgtctcgattaattacctggtctagatatttacgcggaaaaaaaaggcatcgaaatgtgttcagtggtgaaatgggccattggtattttttttttcttttggcacgagggagaaattaatatacggtcgatcgatcgcctgaagtcctgaactgtagcgtactccctccgaaaaaaaaataaattatgggtttccgtgtccaacgtttgaccgtgtgtcttatttaaaaaaaattatgaaaaaaattaaaaagacaagtcacgcataaagtattaatcatgttttatcatttaacaacaatgaaaatactaattataaaaaaattcatataagacggacagtcaaacgttagatacgaaaacacaaggttcgtcttttttttttatttggaacggagggagtacgcagataccagctgcagaaactcgatcgagaacttacgtcgctgcttcggaatcgccgtagaattccacctacggacgcgctcgatctactgtcagtatcaactgcgcatgcgacgtttcatcgttgatcgttcacgacgcaatgtgtacagtggcttaaaccaacgacaagtggatcgcgaacgctgctgctagcgaacagcccccgacagtgaagccgcgagcaagtcccaccaccgatcgatcgtttcatcgttcgttgcgtttccgccgttgaattgaccgcgcgcgcgggcgctgccgccgctgccgctgcttgacaagaatccgcgcgcgtgctgcactgcagccgcgcgcccacttggacgacgcggtgaatccggctgcgacttcttcccaattcccaactcccaagccggcaaaccgcgcgtttcgaacggacggcgacgacgacgaagctaagctagctccacgttttccaaactggacgcgccggcttcgcaaccggcaactcgatcgtatcgcgcttacttttctcgcattcgcagcctagctaccaacctaaaccgtatattctgcttcaattcagacgtcaacgaacacacagttccggaatctcatcgctcgatccatcgatcggctgcgcttgaacgatagtgagttagtgacagaaagctactactatatgataacaaaagcggaaagtgtgtatatatagatgtacatgcatgatgaatcaaacgaatcatgatcaccaacttgataacaaacgattattatcaaatttatcatgttaacaacgaaaaggcaggcaacggaaatggaccagctttttcatcagcagttgaggccaggaagaaaagaaatggaatatgggttggactctgcatttagaattgctctgcaaacctggctgtgggggctgaccaggcaagtggattaattgaaaaatattaattatttctatagttgcatctccatctccaatctcctcctctcgatcaaaggaccaaatacaaatgctcgtggttggttggtcactgactttagcttagatccaatgaccgcagtcttaattagctggcttgatatatcatttgtgctgtttttttttatctgggtgatagacacctcgcacctaattggaattgtttttacaccactaactaagggaggttatatatatctcatctcaacgtttattttatactggccatataggttagctagcgccatatctaatctaaattcattggctttagtttatatcaatgaatgaatgattctgacaaaaacaaatggtcgtgttcagtgtttgcgcatgatgcaagctgactccgatgaaatgtttgtttctgtacgcatgttgccgaagctagcaggctaggatcaaatctatatgtttgtttctgtacaagttgccaactactgtacgcattctacctcttgtaaattaactactttgtgcacataaacaagtgctccatacctccatacatatacgataaaaacatatatcactgtcaatctgtcatctattctgaagaggtaagccacatattttggaagtctagaatcgacgccggctgacactgcatgctgtgtataatattcttggagcatacataatacaatacgtgtacgtggaaagataaacaaaaatacacgtaaatatcgatcacaagttcacaaccaagttgttatccatatttcgacaagtacattatcccatatgtaaaaaaataaataaattaacttgcatgtttaaaatgatttatcacatattaatttaccatgttgattttttaaaatatttttataactatttgaatgacacgtaaacaacgaatgaatatacattccaggtagctgtacatcataaccggctattaaacaccaatcagttctggtcgtgctactcgtggttaatcagtcattcatttttcttgaatcgtaccaccgctcataataatgatatctttctaccacatcaacaattaaccggttattaccaatcagttcttggcgtacgtacgcgtggttaatgggttgactacgacattttgaaggtatggaaatgtggtgaaacattaattttttttacgctaactcttacacggacgacgagtcatcacgcgagatgagatgtggacgtgagaggaattgaaccgggcgcggccaggtgcaatcgcacgcatgcatgcacctgtgccgagtcgattggatgaacggcgcggtcgccatgtcatgggtgacgtacgccaccttcgatggacttcgaatgcaagaaatttacggcatgaatggaatgaaccaagaatgcacgcgcgcgtgcatgcttcttgattatgtcatcgacgacacaccacatactctatccggatctttggttattaattcctgcagctatctatctagcaatatatattttctgctatgtgtaccatataaattaagatcatctctctctcttaaaaaaacagtagtacgtgttcctgggctccttgcaaaaacagaagaagtacttcttccgtttcacaatgtaagtcattctagcatttccgacattcatattaatgttaatgaatctatacatatatatccatctagattcattaacatccatatgaatatgggtaatgctagaatgacttacattgtgaaacggaggaagtatattgttaataccggtcagggtcagcgacatatattgcctggtgaaatagtcgtgcaggtccttgggagaaatgaatcctacgagactaaaagtggataaattgatgtgtgttctgttttcataaatttgtcaattcatctgtaattttatactcccttcattctgaaatgtaaggcataaccacccttaacctaaagactaagaaaataattattatcatcttatagtttggatcatcctaacaaatacaatgcatgcatccaatagaattagagaacatgagagtggaggatttaaaaaagtactccctcctttcctaaatgtttgacgttgttgatttttttaacatgtttgaccgttcgtcttattcaaaaacttttgtgaatattattcaaaaacttgagtagtagtagtatatttaaccatgaatcaaatgatagaaaaagaattaataattacttaaattttttaaataagacaaacggtcaaatatatttaaaaaaatcaacggcgttaaatatttagggacggagggagtaataatttaatagagaaggggccatagttaattgtctatatgcatgtatgccttatagtattatggaacatctgaaaaagtggctgtgcaatggatggagtaagtatgttagttatcctaagacctaagcctatcatctactacgtgcatgcacgagaccactggtctggtctcgtatgattattttccgttcttgacagagcggcggcttcacgcaaccaattggagacggcaaaggccgtttgttgggcctcatcgattcgtccaaaatgggccaacacagataatcgtccgaaatgggctggccttcaagctcactggtgggctgggggagatgcacgtgatgggctggctcctcggctcgctcgctcccaccgaaccagtaaaacgccaaaaaaaaaaaaacagaaacggaaaaggctaatacgccattaaccacccggcgcccgcgccgcttaattccaaaaccctcctgataaaccaaacctggcgcggtacgcaccacaccatcgctacctcatcacgctcacgcgtctccctttctccgcactcctcttcgctctctctcgtgatctcgtctgatcagctccgcctccgcctcagaattcagaaatccccaaaccccaatgctgctgctgcctcgcagtcgcacggcgaatcggggataagcaccggaggagggatcggagatggaggcgccggggctcgtcgtcggatcggcgctgcgagccgcgcaaccgccaccgccacctcctctcccgcgctccccgcgtggcgctgcggatcgcctcctcatcttctcgcgggagcctcgacctcgactcgcccctctcacccggtgctactgttccaggtacttgcttgcttgcgaagttgcggttccactgcgctggcgctcacgcacccgcgcgcactcgtaacatgtggatgtgggtattcgtcaccgtggctttgtttgggcgtttgatcctcaaatcggtgtgtattccagggaggggaagggcaatgctcgcagcaaaccccatcgcgagggctccaattccgttcggtgtgtgctccgccgctcgtattatctctagattctttttttcagttttattttcactatttgacgcagcgagtggttaatttttgtgagtttgtctaggctgaacgtgaaagcaaacaatgaccaggtatgcattaaaacttcgaatctgtaacacgtttccccacatattttacctcatgtacctgcattctcttatggtttaagaggatcatgaatttagagctgatgtcgcaggaaacatatttggctgatgaacgacacgaaggggttgacatctgggagctattcagccaggctcagagaagtaataactacttttttttttttttaaatctgagcttaccattgaaccacaccagagcagtatcatttgatatttggcgtggcatgcttatggcacttttcaattagagtgaaccatttgcatcactttgttgtttgctaaaagaaaagcgttatctgttctgatggcttcaatttcacagatatcctacaccttaacaagcagcggcttgtggccatggaagagctcaagaaactgcaggatgaaaataaatcgcttctgcaggacatagaagtactggaaacagaaaggcaaggtgtggcggtgataccatcctaatgccaagatacttttgtgaattaactgtgaagatagaatgcgagatgtgtaacatcgagcaattcaatcctgtgtttgatgtgatacttctattttctctttatcattgttagcttaagagaataagaggtaaacgacagacctaaaatttgacgctgcattctccttttacatatttcaggtttttccatagaaatagcagaatcatcaaggttctctgagttgcttctgcgtatagatacaatgaccatttctggtatggttggcatgacagaagcgtctgatttaagaaagaaagttattgacaaccgatacatgatacatagcgtcttttctgatattcatcataaacaagatactgaactactttcagaattgagactctttctgcgtaaaccagcagagtatgtaccactacctcattacatctctcctccaggttccagctttactattgccatattatattcaaagatcctactgcattatacatacatctttcaatctgaataagcatgaaaaattgaaaatgcactacaattttttcgtatatatgccttctgcttatattttgtgctgtataattctaaaactgcatgttttctatatgatgcacaaactacctgtttaatctgagtttctgccatcataactgctacttacaaattttgcatagctacgttaatttaaattactgttttgcaggaaacctctacacgttgtgcacatctgcagtgaaatggatccaataacatcacgtggatcattagcaacctatgttactggattatcttccgcacttcaaagaaagggtaacttggtggaggtcatactgcccaagtatgcaatttctttgtgacaagcaagtgatcaccagtgaactaataattttgtccattttcaaatgtttgcaataattccaattatatttataaatggactaggcataaaaaagtgaacaatttcttgtgggttttcagcaacgtagagctataatacatactacaatgatcattattctaaaaggagagatgttttgtttttgataaatttgttggatttgggattgagctttgtatgtagtctgattttggttgtgtcatatttatgcctcaagtattgcaagcaaagctattgtgttaattgcactggtataacccaaaaacaggtatgctggcataaatgaagatgtaattcatttcctgaggaaagctgaagcagactatgaatcttattatggtggttgttggcataaaaacagaatatggacagggtaaatatatactcagtataacagaaatttcttactctgttgattatatcaagatcttaatttttaaaagtaattttatagagaatttcttgctgtgcgtgcttgctttagtcatgtttgctggtttctcctcctaatttaccttctttagtgcagtatatcaagtggtgttagtcttacactcatagaaccggtgcagctgtcatatttaccttctttagtgcagtatatcaagtggtgttagtcttacactcatagaaccggtgcagctgtcatattttgatcgcgatatgttacgtggctaccccgatgactttgagcggtatgtttttatgccatatggtatctgcttttgttttgattctattttgaataccgttgatcattagctctagcattttcagaagctcaacttctgatatatttgtgccatgctgtttatctgttgtatgtgacacacaaatgatatgtgcttactgcatgttttaacacatgatcctccattccccctttaagttgattgtatctattagacccttgctttgataccttgtttggtacataacaattcatgtgttgtattgagctagaaacagctgtatgtaatcgacaaaagggttatttaggcctgaaacaaactgatcggttatatagaccataactagcatatttgactacatttaacatctatgaatacattgttacagattttcctatttttcacgtgcatcattggattatattgtaaaatccggaaagcagccagatgttttgcatgtacataactgggaaactgctatagtggggcctctattctgggatatatttgctcaccaggtcagtcatgctatctcccaaagacattgttgtttcagtgtaaatgtttatacttcatacctcacaaattatttcttctgtcagatctcatgtttcttataatatatttttcactggtctcctagtattgccaagggttgattagtacatctcaaagcaaaacagggaacatatgcacactgttctacagacaggaaatcgatgtgaacattattattttctgcgtacagaaaaatacaccttcattccccctgtttatattgaacattgttgcacaaaagattcttcccagtctttagaacgactataaagtattagaaatgcagttgaattttttatatgctgcagaaaatcatctgagcattttgttattcctcatgtgaagtttttccttataagttgtattcaattttcagggacttgggaacactcggatattactgacatgtcaagacttgacttcgcaagtaaatatcatatatgcattatttgagttgctactggttaaccgtatttgatgttcttaattaaacaggctgatcacagttgctaaacataatctgttctaatatcaaatatctgaagaacaaaaaaatgaatccttatgatgcagtaaatcatatcttcaaattatctgtcgatcttttttgttggtgaaattgtttcattagaccttgaaattgagaaatagaagtacacatcaaatgttcactgttggttaccagttaccatatgggaaaggaacctatgccttctctgctatttcctttccttttctggcaatatctattagggacctatctgttattattagcagtattagctaattcatattttcagtgagtaccctattggaatatgtatgcaccattaccatcataagttcattcactctttcaggcatcgtgttgctcaaatttttaccaacaacacagcgaaatttggattgactagagattttcgtctttcaaatatctttaaactttaatggacatattaacaaaaataatcctatatgcagtgcctagaggttccaaatatgctggaattgtgcggacttgatcctcataaacttcatcgacctgatcgtctgcaggataatagcgaaacaaatcttgttaatgttctaaaggtcagccttcttaaaattttaggagttgatgccatgggttgagtactgtgacatatgacaattgaagactatgctattgtttttttctaaatttctttcatctttatatttaatccttcgttcatgacacttccatctttctataagaaactagttcaaagatgtgcttgaagaagatatcaaaatgctaaacagaagtaaattgtttcacacataatcctttgaatgataaatatgtgaagcttaattttgaataaggcaagcaccatggcaactgcaatcacttggcacttgcatatt

SEQ ID NO: 7057 - DNA, 24725 bp, Oryza sativa
gccggcccccgccgctcccactcctgctcctcccctccctcctctccagtccactcgcgccgccgcctccatttgcgtccgccgccgccgccctcagtcagcgccgcatcgggtccttctccgacgccggacccccgccgctccctctcctgcgccgtagtccgtcctcccgccctccactccctactcacacgggtgcaatacagagaatggcacggctgcaatacagagaaggagggaaaaggcagcagacagaggtaggggtagtttggtcataacacaaattggaaatagagcaaaaacattagtattaacccaaaagacccaaaatagtattttagtgaacaccctttagtttaggatagcattttaatgaaccactttgaagggatagtatttcatcgaaaccatccttttacaatagcaaaatcataattttctctccttttaactagtttcaatctcgttcctctccccgtgtcttccttcaaaaagtctagtttgcgaatgtgacgtgccagagttccattttcctcttgacagcatgttgaagggttgagcctgagtgggttgatggaccattatgttttttatgctttccttactcattattacttccatttattttcttaccaattttatgacccaaaagtagcatactagtaacttaaatatttatttttgtacaaattataatttatgataaaatgcttcgtagcataaagtttccgggtataaagtttttattccatcataaggtgtcctagtataaagttgttattccaccatgaaatttccaggtataaagcttttatcccatcataaagtctatgagtagaaagttgtatagctttggtagatatttgtttgtgtataaattgccaaaaatatttagagcactatagaaagtttggagtaaatgtagggagatatatttcatttaaaatgctacaatacgatagaaatatggtttggttaaaaaatacagtaagtatctttacaagtaaatttgtacatatcacaattgtcctaatttcactagcgaaaatggatagaatgtgtggttctcttctaggggcatcgtaagcgaacatttagctggctagtcacactagccatagtaggctacctcacaaccaccagcatactcatttcattaaaaaaaggctacttaggagtagatgtgatacaatctaatgtaacgaatctagacacaatctagtataactaatctggataaagtaataatactagattgtatcacattttctcatatattgatttttttagaaacagggacttagagggagtatagtgtggttccctgatccctagcttcccaacactgatcctccgtgacgcggaggttggtatgactggtggccgcaaaatctgtggtttgttgtgatgcggtcgggcacccactgggtaggatgcggttcttgtagatcctcatttgatgggacattagtcgactaatttaattgtccttcagaagaccctttattaggccaaacgtgtcactttgatggtcgtttgtggaccgatcgaccttgacgctctaatatgccttagtggacccaacaatagtaggcaaaaaagtggcgctctgataggccattagttgattgaggatttttttttggattgcttgaaaacttccgcccgttttttttttttgcctctaaaactttaagatttgtggccatcggattgtattaagatttgtgcataaaggaaaaaaaatgctgaaacagaattttcacataggtcacacgtaagatctcggtactagacaaccaaaccataattgaatacaagttttatataagttatatcatagttatagtgtagttacagtgttgttacagtgcagttgtagtgtagtttcactaaaaaaacttgtaacagttttttagatactccctattatttttaaggaattgaatttcacgttgacaatcccttagaattgaaagcgtcaaataatttaatatcaaaattttctgatcgagaattgaagactcgatcatgggcccaggtaggagagcagacaccatagaccgatagactttctgctcactccacaaacctagctctattttttaaatttaaaatacatttttttccgtcccctgtgtgcataggtagctagacaacggaagaattccatgcaggcttagtcgacttggatctctgatttgtagagagcgttggccttccaattatcggggatgacgtcgttggcgacaagcttctggtcagactcggtggtgacacggagggagaaggggcccttgagtggcttgggagtgtctatcctccagatagcaccccatgactcgttgagtggcttccactcctcagagcctttctccttaagttccaccttcacgacatcaccgtcaccaccgacgtacttgacaagcactgcaaagtagttggggttggagcccttctcaacgtggaaggtgaccttagtctcaccagggtacttgcagcggacgcgacgaaactgcatatcgataattcccgccttgcggagttcctcatccttgccttccttagccatggcaccaaaagcatggccggagaggtcgaagtggtaggcggcgataggctcagtgttcatgtcggtgatgtggatgatgacgggcttgtcggagcaggcctctggcttggaacacttgacctcaaagcaggagccgcagcccttgccatccttgaagatagggtcattgccacatgagttcatgccgaggaagggagccttgtcaatgtccttgtacccacaagcgccgccgttgtcgtcggggccggcaccctttggcttgccgtaccaggtacccctagcttccagccactgtttgccgtaggccgcagtgatgttggggccaggcggcaccttgggcggcccacatgacactgcagacaccatggccgctgccacgacacaggccagaaggagacaagaggatgccattgttgctgatgggtgttagttatttgtgaatgatgtagctcggtgctatggtgggtggtatttatgggcggagacgggaaagccatggatggagcgccttcgggatcgcggaaccacgcgagcgtgaaacgggctcggggatggacgcatggcgagtattagttttgttaggctaagcgccgttttcggatatgatgctctaattatttagatgaaactagaaattgaaagaccaatttttcttatactgcgattagctttggtccctcctttctgttacctagcatgcagctccaggtctccctccctccttaagcatgcacgagtttgcatgctcagccttgcacaacctctctcttctatctaatcactcatttttagttcatacttcatattaaaatgatggagggggcaattagcaaaactttaaattattttttcttctaaattatttatcttatcttttatttgattatgtcattatattttttcaattaaatctttataacaacatcgcacatgattatatttataataaaaaaattgcatgaatatttttttcctaattgaaacatttttatattacatatgaaacatcgagttataactattgaaacattaaaaattatttactaaaacattcgtaaaataccacatgcaacatttatagataaattagtgagacaccacaaaatattgattgaaacatctgaataatacaatgtgcaacattatccctagcaataaaataacttaaaatatgaaacatagtgaaattttagctggaattcgcttcttgtacgtgaaactgtaggggcacctggtttgagctcggtgtaccacgtattcactcatgatcatccaggatttcgatcacgcataaattgataaacatgacaactttcgatgactttttatacaagtttgtatattgtggcgtcctagaataatcttaacaaatgaatggtaaatctcaatatgaaacgaggatgagccacgcaagcaacaaaataatgaccgtctgattcaaacgacgacaatatagggagaaagtatcgtagccataggataagataaatggtaagaaaaaaaacttggggcaaagaagaatctagataagtttagtaaaaagaaaaagaggaccagtccccactgttgggctatcgtcgctgctgcatcatcgatgttgccggctcacctgcacagcaattaacaggacaagaagcgctcaggcgtagagggactgcaggagcacaatgagggaaagatgagtaaactcttcctcagcttccaccccaaccttctgtctggcctagctcgtccattgcagaccagcagctagagaacaagggagagttagagagaactagagaagcctcctcagtaacaaggaaaccggagaaaatgagagagagagagagaggggggggggggagagaaagagggttgtgcagctcacagctccaaagtcccaatgccacctgctcgtgacatcggactcttggaacttttttcattttcatcttagtatattctatcctatgctccactgaaaattaaaagtatttgagcaaatacccccatattattactcacctttttatatcaaagaccttataaatttccaaattacactattgtgtatagcactttacatctgtgattttgtttggcatccttttttaaaaacctacaatgaatactagagcatcgcaagcagcttataattatcttaaactagatcattccacttcttggcgggcacataatttaggaaatttcgtgagacaatgagcaaaattctctaattttggttcacggtaagatttacttattacaagatatatctatttatttataactaaaattcctctttgaacacctattaagcgtgacaaaaaaaataaatttacaaaaatatatgtagcaatagagatggttagaaggacacaactcaagcaacatcgaagagaaggcagttatagttgcaaagatagaaaggagaaatgccagcatataagacaaataaaaaccctaaccatgattcttgcactcatcattttattcagtcaaaatatgtgttgagcatttcaaattacaagcctattgttcaaacactaattttgtatgtacctacggtaaatatatgatattatgataatattgttagtccctttttggaagaatattattaatcccgttaatgctctacaaacacttattcaaacataaggatataaatcaagataaatccataaccataaataacatgtaaacatatttaacaacaagatagtttataatcacgtgaagaggcaacttaataagctagttagagggaaaaaaaagaaaagcaagcaagcagtgagaagagctagctagcttgtatgtgtgctgtagttggccttgggcgaaagctagctaaccgtgcatgcagcgacggatttgaggatgatggcgggtcctctcctttgacactggccaggcatttccctctttgtggacgtcctcccttcttctgtagggagctccataagtagggaggaggcgatggcttgacaacaggggaaggtttggtccaactaagcagtgtggcccaactctgggctcttcatggctggattcaacaaggaggctggtgggtggcggagcgaaggagacgtgagatagtgcgcggaaaagtggttgccgggtagagagcactggcgacagggtagggtcgtctccctagcttgatgtcggccgagctacctcttttctcgtggaaatgttccccttctctatgggatgctctataggtaggtgggggccgcagtacattaacatgggaaggcttcggctgccgaggcgacatcgtccactttcaggctttccttggcaggattctgcgagaagattggtgggcagcggccattggaggcctagcctagcgtgaggggtagtggctgcggggtagagggcgctggcggtgaggcaaagttgtggtcttgatggtggttggactggaagtcggttggcggagggccactgaccagttgcgatggaggccacgtgttacacaagttgagatggtagtattagagttggtgggcaacgtaccatagcgtaaggggtgcatagtgtcccatgcgaagcctagcctagtgattcactgagccaatagcgactacgccttcgggcatggtaactgtcctaggagcattgtcgaggtacccctcttccctcgacaaagatctctaggtgaaaaccatgttcattcctttggacgggtgatgacggcgtcttttggcatcgcaactttcgtgaaggtgtcgttttccgccttggggtgttgttgtagacccggcggtgactgacctcgcatagcggtggccagttcggtgttcgactctcctctctatagcttatgtttgtgcagttggtgtgaggtttcgaggcgtgcgctttgatgcacatccttcctccacaactagttgtcgatgaaaaactttcttgtaactcttttttcctctattttaataacattcggatgacctccttcgatcatcccggcaaaaaaaagtaaaaaaataaatctatagcactcaacgtagattatttctctaattattcagaggtaacactgattttgcatcaaaacactaattagtgtagctgcgtcggaagggcacgcgtgcgctagaagagcgcatgcacgcgtgtaggccggtgcagctgcgcgttgctgctcctgctcgcatgggccggctatggccaattaagtatacaactttttatttgtattttggctatacccttgtaaggctctatgcttcccttatataggttgagggcaaggttatagttaggcatacacgactttagtttcttcaccaatacaaggaaatacccaatcggggtcctatgtcatgccttcgcatgcaaggtaactccaatgaccgggttatatactactacatatatcacgatcatggcccacttcctatcttcagtcgaatattcagtctgtgtgggtatccggtactcatgtcctccacactgatgattctctcaagaagatatcaacacataggaggtgaggtttagaactcgacatctttggtaggttttgatatattagattatatccacgtacttctcccttacttttgaagttcactttgaaatttgatgcatccgatgcagagaatttagctatgttaaaagttgacgtatgagctagatgtacttatggtaaagatgccatatgagcaaaattttgtagacaatattttgcaatgatggctcgcgttcgttcatggatgattagatttggtaatactacttaaggttctaaataaatggtatatatgtaatacgagacattataaatctaattgatatagatggaatagacggatgggggctagtttttgaagtaggtaatttcgtctcgtgttattcacgccacctcttgtaagtagtgcttttaaatatagtatgacaaggccgtctggctgggagagcatacaccattatattgttggcatgtatgtgctctactatccaagctcggctagttatttcattctttcattataaattaaaaaaatccactcgatctcgtgtgtgccatatatatacatacatacatacatatatatatatacacacacatatatatatatatatacatacatacatacatatatatatacatatatacatacacatatatatacatacatacatacatatatatatatatacatatatacatatatatatacatatatacatatatacatatatacatatatatatacatatatatatacatatatacatctatacatatatacatatatatatatacatatatatatatacatatatatatatatatgtgtgtgtgtgtgtgtgtgggcgcgcgcgcgcgcttgctgcatgcagcaacacaaatatatataggcagccgcaccggatcgtacgtacgttggtttcttccttgcttaaaatgctcacttggcttggacgttggacttgtacacgctgtcggccttccagccatcagggatggcgtcctcggcgatgatcttctcgccaccctcggtggtgacgcggacggagaaggggcccttgagcggcttgggggtgtctatcctccagatggcaccccatgactccttgagcgccttccactcctcggagcccttctccttgatttccacctccacgacgtcaccatcaccagcgacgtacttgactagcagtgcaaggtagttggggttggaggccttctcgatgtggaaggtgatcttggtgtcggcagggtacttgcacttgaagcggcggaactacgtgtcgatgatgccggccttacggagctcctcatccttgccatccttagccatggcgccgaaggcaaggccgaagaggtcgaagtggtaggcagcgatgggctcgtcgttcatgtcggtgacgtggataaggacgggcttgtcggagcatgcctttggcttggagcacttgatctcgaagcatgagccgcagcccttgccgtccttgaagatggggtcgttgccgcaggagttcatgccgaggaagggagccttgtcgacatccttgtacccgcaggcgccgctgttgtccttgcggccggcacccttggccgcaccgtaccaggtggccctggcttctagccacttgtcgccgtagcttgccgtgatgttggggcccggtggcaccttgggtggcccgcaggagacagcggacaccatggccgccaccacgacagaggcgagtaggagggaggaggatgccattgctgatgatgagtattagttgtcgttggtgaatgatgttatgtagttgggtgccatggagggtggtatttatgggcgatggaggggacagccacagccatggatggcaggccacaggcatagggatcgctcacatgcgcagcgtcgagcgcatgacttgggtcgatgtcgagtcgagctagcgcatgtccagctaacaagggaaagacatcttcttaattttctttattaagggaatgccattatattagtgattgtgacgccttccatttcataatcctactagtattaattatttttattatgaggaaaagtggctaatcaccgtcattggcatcggcgtgggcgtggggcctggttcaattggcaccggttttgggcgagatttatttttaggttcgctctagggtatctgttggaggcctttttttttgtcacactaccaaaatttatcttctgggaatccatttggccttctcttggagatgctcttagcgcagcttcgccaactaacaccccttgatttttcaagccaatcaccaatgaatcgatcgtgttggcctttgttttatggcttattacatctcacagttgggtcgggtctccatccaaactattccctccttccgttgatatatgacgacggttagttgaaaaataaactaaccaacatcatacattaatggaaggagagagtacaaattaacataggccgggtcttcagaacgacttttttctatgtcatgcctaatcatggattgcagatgattgagatagtatgtacatctcttcttagtaaaatcattgcatctccacgacatctaattactattctttttaacgaaacatacacagaggacaatcactcctatgaatggacacacaaagactacgatctatctctataaatacctctgaagacatgcacacaactatagaaatggttttcacacgcgatctcccaaccaaattcgcatgcaagcactactacaggaccccctattggtaccggttggataccaccatagatgctggtttcccaaccgataccaatttgacaacacctttacccgtccacataggtgtcagtcctaaaatggacacctaactgacacctatgcaggttatggttaccggttcttacctcataaccgttacctataatccctacaatcggcacctataatatttgaataaaaaaaagatgcaaactcacacacacacacacatatcggattttccctggcggccactaaagagcaccgccaatgaaaaacattgccatattaaaaaaaaccccgtcagactaaaaaaaaatccaccgccaccttcttctccttctcctctcatcatcctccccctcctctagatccactagcagcctccagatccaccggcggcatcctccttctgtgctcctccctcactggcagcaactccctctcctctccgcctcctcccttctccctctccaagaaccgcctccgcctcagtaagcagtggcgctccggggaggcacagtgatgggcggcctatgggtggcggcggctctcctcctctctgcccctcgcctcctctccctctcccctggcctcccaccggtggcgcatggtctcctcctctctgcggaggcggggcgcaacctcctctccgttgtggccacgagcggcctcctcctcttcgccgctggccgccgcgagcccggggctggatctggctgccgcgatgatgggggtgtctggatcggccgccgtgacaacgggggaggccggcgaggaggcagcgacgacttctccacggtggcgggagggtaggagcgaatctggtggcgggcggtgcttgggcggtcatccacggcgttgaggaggtggatccgatggctgctgccacgacgacgacaacggctgggctcctccaacccccttccctctaccacttggcgaccacggcgtgggattcggtaggcggcggccacggcaaggtgttgtgacggtgggctatgcttgtggccgtggcggccagcggtgtttgcggctgtggcggccagcagcaccgattttgaattttcttttatcccaataattgttatcaccggcggttctctttagcttgattttcactagcggccaggcggccgccagtgaaaatgcattatttccacttgcatttggtcgctggcagcacctctggctgccagcgaaaactatttttgtagtagtgatggtgcatggttctcatccggatgagattaggtaaacttagggtgtgtttgaggagaaggagattgagaagattaggaagatacgcaaaacgaggtaagctattagctcatgattaattgagtattgactattttaaattttaaaaatggattaatatgattttttaaagcaacttttttatagaaaaattttacaaaaaacgcactgtttaatagtttgggaaacgtgcgcgcagaaaacgaaacaaacaaactcactctctcaccctctcgaatgctgccttaaggctctgaatagaagttatatatatactctccccttcctagaaaaatccagcttttgagaattaatctggataagcgtttatgatgatttttttttatgttctagatctagttgatatgtagagaaattgatagataggggccaatatttttatgtaggtaattttgtctcgtgttatttatgccattcgtcttgcttttaaatacagcctgacatagccggctagctgggagagaatacaccattaaagcccaaaccgaacagggtcctcttacaactggaggttgaagcaaacccgatgaacaaaagaagattcagtctaactttaaaaaaactctgccagagacaaggaagggcactaataggcagcaaaaatcttgctggagatgacacctcgtcgttgtggaggaagaagacctcccaccatagagcaaatatgttgcactttttgactcaaacaccagagaaaaaccaaattgcatccttccaaatggcgcaaggcagagcaagctctgattttgagctcaagccagccatggaaggagacagctaggacaaaaaggatgcgtgttggcatctccatcgagctatacaacaaaggagaagaaaaagacctagtatgagataaactcgatttaaaacgggatgaacctgacggcttcccggaaccccccccccccccccccccacatcacaaaccccctcgccgatgaccagcagccaccgaagacggagaagaaaggggatctagtggaggaaaagaggggctgctctttttcactcactgacagagggagaggataaggtcgagcctccgcattggagagcaatatatactccctaggtctaagcagttgtgtccaataggcttggctattagcccaaaattaacgttgccagtgcactggtccattgatccccggcccattttatgggcatacaaaacaattcacaattaagcgtaaaataaatagcgcagtgcaatttgacgtgaagaaaaggatacacaacatggttactgcttctcatgataatctcacgcaaaatcagagaatgaatttagcagaaaatattgtgggcaaaaacaaatgaccccattgtcacagggccagttcgatgggagagcagacgccattatagtgctggcgtgtatatgctccacaatcctagctcagaaatttatagattatttcgtttaaaaaatatttctctggatatatatgtgcatgcatgcaagcatgcagcaacacatatatagtatataatatatatatatatatatatatatatatatatatataggcagccgcgccggatcgtacgtacgctggtttcttccttgcttaaaatgctcacttggcctggacgttggacttgtacacgctgtcggccttccagccatcagggatggcgtcctcggcgatgatcttctcgccaccctcggtggtgacgcggacggagaaggggcccttgagcggcttgggggtgtctatcctccaaatggcaccccatgactccttgagcgccttccactcctcggagcccttctccttgatttccacctccacgacgtcaccatcaccagcgacgtacttgactagcagcgcaaggtagttggggttggaggccttctcgatgtggaaggtgatcttggtgtcggcaggatacttgcacttgacgcggcggaactgcgtgtcgatgatgccggccttacggagctcttcgtccttgccatccttagccatggcgccgaaggcaaggccggagaggtcaaagtggtaggcagcgatgggctcgtcgttcatgtcggtgacgtggataagggcgggcttgtcggagcaggcctccggcttggagcacttgatctcgaagcatgagccgcagcccttgccgtccttgaagatggggtcgttgccgcaggagttcatgccgaggaagggagccttgtcgacatccttgtacccgcaggcgccgccgttgtccttggggccagcacccttgggcgcaccataccaggtggccttggcttccagccacttgtcgccgtagcttgtcgtgatgttggggcccggtggcaccttgggtggcccgcaggagacggcggacaccatagccgccaccacaacacaggcgagtagaagggaggaggatgccattgctgcaatataatgttattgctggtggatgatacagctgaacgccaatgcgggtggtatttatgggcggaggcaagagagctatggacggagcaccgccgggatcgcgggacaaaggaaggcgtcgggggatcgatggacgcatggcggccgctacctactttgtcgggctgaccgctactagtttcggatggtgggcctgggcttcatcccaaacttcttcttttctagtagtaactttctcaattaaccacactgaacctggaattattattaattaatggtttaatcacgacaaacattaactctcactctttctgcagcagatgatccagatatatatagtgtaggtacatgcatgtcttctcagtaaaaaatcgtatattgttcatccctatttactgtacatttaatcgcaatatatactagcatcacatttgtattattatagagtatatatatctcaagcacatgtaaacaacgccagcccaaaattaaaggaaggaaacgtatcctttgccgtagcatttatcggtagtagattatacgtacacgtactaactccgtccccaatataagtacatttgcgagtttccgtgtacaacgtttgaccatccattttatttgaaaaaaaattatgattagtatttttgttgtttttagatgataaaacatgaataaaacttttagtgtgattttttttatttttttataatttttttaaataagacggacggtcaaatgttgaacacagaaaatcacaattgcatttatattgggacggaggtagtactatttgcatccaatagacttgcattaattgtgatgtatccttactaacagtacctctatgacatcgccataaaataatgcgataattcaataaataccattgacaagcgtttaaatccaagaaatgatatcaacaagcgttaattccaagaattaccatcatacaaacgattttgtctcaaaaatgccatcgcggttaggattccttctacccccacgctgttaagtacactgttcatcatatatagtatttaatggcgcgggatagaaagaactctaacggcgatagcatttttaggacaaaaccgtttctacgatggcaatttttgaatttagacgcttgtcaatggatttcttgtattatctctaaaataattatacaaatttgactagagtagtgtccggttattcaaaccaaatccaaacatattatattgtaacttttttaaccgcattagtccattaaacatttgtcatcaattagctaaaacccattaagcgtcctagatacacttccatgatggatcttggacctagtcaactagtacaatatttatattggaacaaggaggtttgcaaacaaggctttactctgtgttcttattttttaaaaaattttctatataaaagttgctttaaaaatcatattaatctattttttaaattttttagctaatacttaattaatgtaatgctaatccttgctttgtttttcttgttaggaggcaagcaggttcccaacgtagataagatagaaaataagatatggctttcacactagggccctgtctgattcttctacaagcagtggataaaattttagatacttgtgacacgcaggtgaattttagatacaagttagatatctaggtggtgtttaaatttactgaagatgaagatgaagataaagatctaagtatttcacgcaaaacgaggtggtaataatgtgtgattaattaagttttaattattacaaacttgaaaaatggattaatctcatattttagaacaactttcatagagaaagttttcgaacgaaacacaccgtttaatagtttgaaaagcgtgccacttttatctagaagtttatccggttttcgttggagaaaagaatagtgcctatatatccaaacgtagacacctgccacacaagcatgaggtgattacttctattatacgctatgttcccatttatcacataatttgctaatatcataaaagttctacgaatttaatactattttttttcttttactgcatcgtactgtgaaattaacattttgttcccatatattttccctttgttgtattcttgtatcctcactcttctccatcttaaataacagtaatgctaactccagttaatgcttgttcccatgcttcgacaacaagctcgtgtgctcgagctctctagtcatctaccgtaacatgtattttgtttaacatatgagtctatctattttgtttttgttaataataactattttaacccatgcttgatgtatccatgttgcttaactagtttgttagaagttgatacaaatttgatttctaaaattatccgagaatactcgatagtaattatacatatagataatattcagttatataaataatccaacaaatatctatgattttatggaaaaactaaaaggcaacgtttggaatgaatataatgttcataatgcactgtaaacttatcaacgtgttcaaatacatatatcttagagcaaatttcataaaactatcaaattatcataaaactatgaatttaatactatttttggagtagatatgctattctcccttcagcggccgtagacgtcggaccctaccaggggcggagccacgtgtggggtagcttgggcttgggccccacacgtggcaaaaattttcaagggagaaacactggaatattgaaatttacgtagaatttgcaaaaaaaaaattgatagctatatggttcagccctagtcttgctaaaatgctgcctccgcctactattgcgtcgatgagccggacgaggaagatggacgcccacatcttgttcgaactacacaagaaagaaagagggaaaaaaaaggaacaataacgagatgaacctgaatatgggaccctttgccggctgccagagacgaaaggaaagggaaaggaggtcacaactcacacgagagattgatttggcctttgggtttggggtcgcctctcaggatggttggagaggcccccgaaagattgcgactcaaagtccattccctcgagtgagatgaattttcgcgcaaagtaagctggatggaagttattggtggttgcatcaactgaaatctcacctcattgctagacatgaatgctccctttgctctggtctggtccatcaacaagtacgttaacgtacgtacctttggcatgcctgccttcacccattgaatgcttcatctttgtaaataccctactccatctccatctccatgttgagcttgagaagatgctacttcttggcccagcggccagaatcttttcggccctgtccttgacgttgatggcaggtactagctaggttaggtaatcctcctatccctcgcacgtgacgtgatggcctccatcttcacaagaggagcgaatcgcatataagctcagtttacatcagacatacaattgatcaacggaatttctttcacaacagctcatatcatcatctgttacagtcagttgcaactatcatcaacacactcgctctattcaggaaaattggcaacacagcaaagaaaaaacccgagtcaacagacctccaacgctccaatgaaataacaaacttacttcactgttccttgatctatacctcatcatcccccccccccccccccttcaccgaaaatggccaaggcaaacaaatctacatcgtctgcaagctgggcgccgaggctttttcggcgagcacttactcaagtaaacaggtggccctgttcggtggtctctagctctcttccaagctgcatgtgcacaaatttcctgtgcttctgcttgttgatcctggcgcttaaccttctcacctgtgattgaaccctgcataaatgcaagtacgattaaacaagataagtatggctaaacaagagtgcttacgcccaaaaaaaaaaaaaactgcgcagaaccgctatcgtgcatctttgatgcttgcctaaagacataagatcatattctttgacacttggactggggaatacaaaatttcttcaaaatatagaagtaattaccagaaaatctttgcagagaaccattgccaccaatcatatgtgactcaatccttctttcttggcctaaatgcattctttcaggccaaacagaattcaacctccttgcgaagtcctccacttctctgcatgttaaaagtaaaacttgtcaggtatgtcagtagtaaatgatgttgaatactctctgcaactttctcaacaggcttaggagagcaatgaacttgaccagatgcaactgcgattattaagcaaaacttctatgaacttgaccagaagcaactgaattatatcatgctgtttttcagctgtgaattttgaactaaccaacttatatatcagcacaaatactaagaagaattgtttttaggggcaaaacatgtaatttgctaaagcataatagcatatgcaaaatagggcgctatagagttttgatgcattggaaagaaaagaacggcgcagaaaaaacagaactgaatgcttgagatgtcatatcctcacctgtcaagctcttcctgcattgcaggatcaagtccatcatcaaggtcagcatcttcaaaggggtactcaacatcatcttgcacatctgagctttggcaaggtgttctagaaatattaccagtacccgcattgaatggaactccacgagtagcttcctcctataagtcaacagataagtaagaacttgactgttctccacacaactactcaacaaaaaacagtgaggacacctaaccttgtttacaggttcaggattagcttttggggggttcttagaatggtcctttcttctcttgttctttttcttattcttagaagctttcccacctccagaacctataaaatggataaacctttatatgaaattgctaagttttttctatatagaaatactctttgagcaagctctttggttgcatgtttgcatctttgcctaaatattgtaaccagattagttaaaatcgactatagaatttgaccctggatgacaacttagtagtttactgattgctcagcgttattcagcagaacaggataatcatggttgaatgagacaagggaaacaacgaagttatatagtcaatataactcactgtaattatacctccatccccatttataaaacatagtatctcatccagtgaccgctcatctttttgctcttcttgtacttgaacatcctgaaacaaaattagcataagattcttaatacatgacattcaaacatgaactacactgctgaatggacaggataaatatcatttcacatggcctacaggcctaatatcagaaagcatactctgatgataatacaacagtttggattttatcatatttaccttcagtttctggcgctcctgtagttctttccgcttctttgcatataatcgattcaacaaacggatcctgggatcatcatttatatttttcaggggttccaatttctcttcctgaatgaatgcaagttccacagtaagcatcaatacatgctgataactataagcagacatgcgatttgtacctctgttaagtcatctggcaaatggaaaatatcacgaatttcctcaggtgtctttccttcaattattcgagcaagtgctcgactggtaagatcaaccaatggctttaattggagactatcagccgccgatgtcagctcacatagtctttctgtatctattctgacaaacttttcatcaaatgattttcgctcctgcacaataaatgtgaccatgatatgataactggagaaatgtaaattcatcaaatgattatttcctcttataacataaagtaaatgcctaagtggctaaaagaattagcatcctctccagaaagtttcccgaagttcataagctgaatcatgccatgatccttatcgataaaaataggagtattaaaagaagcagaattacccttgagactattacttgtaacaaaacaactacgggaataacatggctgttacaggaagcaaaattacataatggtctatacttgcaacaggtggacgcctgaaacaagcagaagagagaaagcagtaaaaagggagttgccagaagacaaaacttaaatcacgacataccttgtttgagcgccctgggacttgatgaaaccgacaatagtcaagaatcaaactcaaacttgtagggttaactctttctgggagagcaattgcatgattttttgatgatcctgttccattttttactatctctcgacatatcatagggcaaaacatggcaacctcctcctccacttgttgtatggaaccatcaaagcactgaagccaaatataactcttcaacgcctgtgagttcacaatgaaattaaattggaaccaaatgaatagctgataaggctggagaacaattgtttcccctccaataaacagaaaaaatagttatgatctagaaatgcataggggtcatacctctggctttattactgccaactcactttctgacattattgccaattccagagaaacaacaaagccgccaatacaatacaccagaaaatttacaagaaactcctttcggggtataacacctgccagtactccaatggccggaaattatgtcgacaaacttttatcctgtacaacaaatcacagtaccctgtttttggtcttcaattggatagtgaccttatttctcttttgattcaacaatggtctttatttatgactaatggaatgaatgatcttgtttagcctacagtacagagagaaacccgagatgcataagttatggcattttggagtacacagggggtaaatagtcacatagaaatgcaatatgacacatgaagcaaaacttttttttaaaaaaaaaaagaagaaagatagagcatccagcttcaaatagagaaataaaatatgcagcctttctacagttgtactctcaaggtagtagcaactaaatggcatcaccaaatgacataaagctcactattgccctttcaaaagtaccgataggttcctaggttaattctggttacactacatagacacctcgacccaataggtacaaacagattcacgctgggtaccatttggcggtatgactaactgatccatatttgaggtccacaggttgagttcattgaaagaattaatcctcataaatgcagaggagaaggcactagtctatgcacttaatcctggtaccgaacatgcatgggcatccagcaaccaaatatgaaatcagatatgcatgtgtaatcaaagcaatgaaatggaaactaggtaatcaaagatacagcaatttgcatccggcgacacgttccccctgtctaatcggcaaaaaatggcctccatttggtcctcgtaaaacacatagctatacaacctaacaaggccgcggctacggcaagaaacttatccattccccggcaagagacaaggtaagaaagacgtgaatcgcaaccaccggagcagcgaaatggggttaaaccctaaacgaggattggcgccgcggagggaggcaaacggaaggcgtgtcgcaaaagcaagcaatccacgaagcccactcgacggcgacggtgtcggctgtcgccccggccaaaaccctaacccgggaaccgaccctacgcacgaacgcaaacgaaggaaaggattgggcgcgggcgcgggcgcgggggcgggggcgtacctcgtggcggagagaaggagaggctggagagggagaaggcggcggtgacggcggcggcggcggcgccggcggcgaggagaggagaggagagggggaggttgtggttttttggttggtgggggtgcgcctgcggtttgggggaagcgaagcgaaatgggggaacccggccggtggagtccttatctatcccgcaacccatcttgggcttgggcctggaattccagcccactgggccgtgggcctcccttccttcctttttcttttttttatatatgtaatatttattatctcacaaaaatatttttcatagtattaatgaccaaattaccacaaaattacatatttaactcggcgtatcacaaatgacacatttcacaccaaatttatcacggaaattacacgtttaagatgaagtatcacaaaactatatgtttattaactaaagtatcacaaaactataagtttagaaccaatttagtcacaaaagcaataatgcttatagctccaacataacaatggtgctagggatctaaactctaaaagttgtagttttgtgataacttaaatattaaacatgtatttttgtgatacttgacctttactagtttcatgataaattttgtgctaaatctgtagttttgtgatacaacgcattaaatctatggttttatgataatttggtcaaaatacctatagttttgtgaaatgtactcacagggaaataataagagggagaagtgccaaactgaggatctccaaacgctgctgcacaggctgcaattgctgtatgtatatcctattcttcatcattttaatctcaagaatagcaatatttatataccgaattgtcccatgatctcaacaacctaccacaaggacaaggatcacaactcacaaaagtggtagccatgatttcagtttgatctcatcaacaggagacactgagacagtagcagctgttgggggaaaaaacgaaaaggaaatagtgagtgacagcgtgatacaaatatggactcgctggtcgtaccgagggtcgtaagtcactagagtatgaagtagcagctcagagggggcaaaaggtacaagatcttcatcttcacattctgagcaaaaggtacacggtatcctttctgcgacaaaaaacctaggaagaaactcaatcaacatcttggagctgaccctgaacgacgcagggcgctcctctcttaccaccggccttatcttgcatgcatggggcatccaaatcatagtaggagtaccttttttttaaattcatgtcctgaactgaacatgaaggcagaacgtcaatgagagatgttgagcagatactaactgctaagggccggggaatgcagttcgttttcgcctgaacattactaccagcagcccatttcagttgcattgaactcttcaaattaaatagcctcatcaggggatttaccatagaacaaaggcatgctcagatcagcgatcgtcggagcttagacgtgtatctggtgacagtggagaggtggcggcgaacgtcgagaggggaggcaccccaccgagaagagcgtagcgacggcgaggacagccatggcgaatcgacaagctttacgtcttgtgtggaagaaagcggaaaactatccagtcgttttcttttccttttctttattttattttttattaaatactgtaaaaaataataacaatataataataatataatagtactgccaagaagcggagcgagggcacgggaacgggagacgggtgggagggattcgtatggcgtcgccggaggagagcgcaatggcggagctgttgagggtcgccgatttctcaccggcgattgcctggtccggtcgatgatgcgcgctgtgtttggcaggagacggtggaggaggaggaggtgctgcggcggctcggcacgggggagaaaggaggcggcgcgacgcctccgcctgcacgggcccaaccccaacgtcgtcatcctctcccaccaccaagtgcctccctccccctgttgataactgattcagtgctccggtatctgctaggaaggagtagttgtttcactctatccacattgttgaatactctcaatgaatgaatattgttggcgcaggccgctcttgtgcggattgttgtcttggcatttttgttttattttataaattttggaatcaaattggtcgcgctgctctttttgtttctgcattctggattatctgaatggagtctctacactgtacaccacacttcagcattattcagtaactgcgcgcgcgcgcgcacgcgcgcgcacacacacacacatacatacatacatacatacatacatacatacatacatacatatatatatatatatatatatatatatatatatatatatatataaacacacaaagctgcctccaatgcaaaagggacagtgtcatttccctgctacaaatgtcctaatttccctttggtgtgatttttgttgaaaacacttgtgtcgcaacagtggattcatcaaaatgtctgcgatgcctgttaactctacttaatttcttttctataaaagcaggtgtccctctataaacacacacacgctacttggcttgctcttgtaaatgcaactgcttgttctctcctgtgtaaaatgacaattggcaaatagcaattactcatgcttcttgacaacttggggtagtaccaccgtagaactagaaaataaactacactgaggattagcctcatgtgaaaatatcttacaattattgctgcagctcaaagagtgtctgagagattccctcttggatagtactactacagggctcatgcctcccccctcattgtgttcaaagcaacggttttctattatttcttctggacatgagacacagatatgagcaatatgagcacagatttggattttactagtgctagtttttttttaatatgtgacgccgttcactttagcgtgacatttgactgttcatcttattcaaaaaaaaaatatatatatgtcatatattttgttgtgacttgttttatcatcagagaaactctaaccttaacttatattttgacatatttgcactaaatttttgaataaaacgaatggtcaaacgttatgtgaaaagtcaatgctgtcatacatgaaaaaacagaggtagtactagtttttttaatgtactgttcatttattaaaataattcttcccaatgtgtgagtttcaatgttcacctgttttaatttttacagttggtttctagtaaaaaaaaattacactatcttgattatctaggtcccatataccgattacttttctaactaaaattgatctgtgtaagatcattttatttaaataaaatagcttcataaggtcaaatttatggttgctgcaggaggacagcatgcttcgaaaattcctgatgaagctcttctcactctgggaatggaacaatatcttccccaagtacaggaacatgatctgtgtcatacttaactccatgtcatgggttacagtatcatctacagttgtgtccctcaccattgcttcagctggccagagatcttccatgatgtccatcgctatatatttactagcta

SEQ ID NO: 7058 - DNA, 1431 bp, Oryza sativa
atccacgtcaccggacatgaacgacgagcccatcgctgcctaccactttgacctctccggccttggccttcggcgccatggctaaggatggcaaggacgaagagctccgtaaggccggcatcatcgacacgcagttccgccgcgtcaagtgcaagtatcctgccgacaccaagatcaccttccacatcgagaaggcctccaaccccaactaccttgcgctgctagtcaagtacgtcgctggtgatggtgacgtcgtggaggtggaaatcaaggagaagggctccgaggagtggaaggcgctcaaggagtcatggggtgccatttggaggatagacacccccaagccgctcaagggccccttctccgtccgcgtcaccaccgagggtggcgagaagatcatcgccgaggacgccatccctgatggctggaaggccgacagcgtgtacaagtccaacgtccaggccaagtgagcattttaagcaaggaagaaaccagcgtacgtacgatccggcgcggctgcctatatatatatatatatatatatattatatactatatatgtgttgctgcatgcttgcatgcatgcacatatatatccagagaaatattttttaaacgaaataatctataaatttctgagctaggattgtggagcatatacacgccagcactataatggcgtctgctctcccatcgaactggccctgtgacaatggggtcatttgtttttgcccacaatattttctgctaaattcattctctgattttgcgtgagattatcatgagaagcagtaaccatgttgtgtatccttttcttcacgtcaaattgcactgcgctatttatttacgctgatttgtgaatgttttgtatggccatcatatcggaccgggaatgcaatggaccagtgcactggcaacgttaattttgggctaatagccaagcctattggacacaactgcttagacctagggagtatatattgctctccaatgcggaggctcgaccttatcctctccctctgtcagtgagtgaaaaagagcagcccctcttttcctccactagatcccctttcttctccgtcttcagtccttttaactatttctaatcaggactccaattggactatattctggcatggtccttgtgattttgctatcgtaaaaggatagtttcgctgaaaggttaattaaaatgctatcctaaactaaggggtgttcactaaaatgctattttaggtcttttgggttaatactaatgtttttgctctatttccaatttgtgttgtgaccaaactacccttgccttaggttaatcagatcgaatcgatcgaatccagtcggcttcggcgcattgcgttgactgaggactgaggagcagcggcgacaccgtcgcgcatccggcatcgggtccggccccggcgccggcgccgg

SEQ ID NO: 7059 - DNA, 99892 bp, Oryza sativa
acggtggtgtacgacctgcgcaccgacgtcgagcagccatcgctcccgaacccctcctccctcgagcggaggcgggatgcgctcctcgcctatgcctgcgccctctccctcgtcgagccccgtttccccatccgcctccgcctccgcctccgccgctgtcgtctcctctcccatctatcggccccggcagctagagcggatcaacgacgatgacaccgacgtcgtggtcggcctaccgcactgcctcctcctctgtcgacgacggcaagataagggacctcccaccatccacctccccagatccgacgacgacgacaaccgccgcgtccagttcctccccaggcggctgccggccgcgcccatctccgccctcgctggtcgctccccactcctcccccgccggtttagggatgagagaggaagagaggtggagagagagaaggggaagaagaggctgacatgtgggacccacgctgagtcagctgccacatcggacaaaaccggagtcaaaaccgccgagggacctagtctacactggttttgcaagttgagggacgcgttgtatccgttttgtggtttaaggatgattttgtaattcaatgacaagtcgagggaccttcggtgtactctttccttcggcttgttatgcctaacgagcaataatttttaggccatgttagattcagattattcaacgggttattgcgaaggattatctatttaactattgagataaattaaatattttcataaaacagatttaaataatactagcttaaaacaagcggtataagcaaaacattgttttcaagggtagagcaaataatgaggtgataatatgagaagaacagggcctaagctcaactcgtttaccattcccagtgagccgacactaaaaaacacaatttttcacacttttcttttattttttcaaatggactaaaaataataccgtgagtaaaaatcacatttatttttacttgcagaagatataagcgcgcttaagacatctatgagagaacacattatctttactgacggacgatataaacagtgaggatcgattttagaaaaatatgtatttgtacctaactttttcataaaaagtctgctaattaaatttataccaaacttgtactaactccgtccaaaaaaaaatgtcaacctatacatagatgggacattacatagaacaatgaatctgagcatctccagagatttgttgtcctatgtaatgtcccatccatgtctatgattgttttttttacagagggagtatatctcaatgagaactaaaactttttaagctgaataattttctatttgagatcatttagggtttaaaatatttgttataagatttaagatctatttcacagaatttcatatatacgattcaaataacctccgatggacacatgatatgtgtcaaagttgtagagctagatctacaactttgtaattcatgattttttttatttaaaatcatttaggctgtgttcgccacgcctagtccccaacatgaatagtgcgcacgaaaaacgaagcgatccattagcacgtgattaattaagtattagctatttttttaaaaaaatagattaatttgattttttaaacaactttcgtatacaaactttaaaaaaaaacaccatttagcagtttgaaaagcgtgcgcgtggaaaacgagggagaagggttgggaataaggggtgcccaacacgtcttagagaggcaaataagtattttaagtttcgacaatggaaatcaaaacgatagcattttaaatattgacattaagtgcttcatactaagatggtaatgtaatacatgtgtggagagaaacgtattgcgttcaaatcccacaaatcacatacttctggatttaggccctgtttagatcccatgataaaattttacaccctaccacatcatagatgaaaaaataactcaaatgtttgaacacatgtatgaagaaataactaattacacagattacgtgtaaattgcgagacgaatcttttaagcctaattgcaccatgatttgacaatatggtgctacgataaattcatctcggcgtttacaagtggattatgtaatttgttttattattagactacgtttaatactttaaatgcttattcgtatattcgatgtgacacgccaaaactttacaccccggtatctaaacatagaaagacacaagttaggttttcgtctattccaaacagtgctatatgaatgttgagacccccctgaagcgtccaaaatattgaccaatggattggaaaaatatcatgcaactaaccaatagtgaaaccttgtggtcccccttagaaaaaacaaaatcatgcaactaaccaaaatctagcaggaaagtgagtgctccctcttcgagatttagctaggggacaagtttcatgttcgggacctaattcgtgttctttaaatcttcctccaaaatcttctaatcaggtgggaaatctcattggttacatatagagggtgtttagatctaagggtgtgaagttttggcgtgtcatatcgggtattatataggtatcgcatggggtgttcggatactaataaaaaaactaagggtcaattgcatctatgcccccgctttcaaacccaattgttgttttagtcccactttttagggtttgcagttttaccccactttttaaaattgaagcagcgtctacctctacttctaacagccgtttggtgggtcctgcattttgtgttaaagaaatacaaaagaaaataaaaaaaaggttttaggaaatatgaatttaccttagtatccctgagtgaatggatagggtctggtcctcacctcccaacccgtgctagtgtgaattggaatcagcgagagcgtgctggcgacggtagcgagggtgggcacgcggcgaccgcggtgagggtgtggggacacccgataaagtcatggtgcccccacgaatacgtaactgtccaagatgttcagttacgcatgaaatgatataaaagcataagcttcggttatacattacttaagtcacttagttcacaacacaacataaatacaaaccattacataaatgacctataaagccttattaactgctagactccaccacaggaattgcttgggcatagaatgacctagaaaccataattgtcccactctaacgggtcaacaggatctccacaatcatcttcctcctcatgatctgaacccatttatgagtacaacaggtactcagcaagacatgcctatgatagcaaatacaataattgcaatataaaacatgcattattaagagccggaaggtttaaactctaaccttaacatttatttcatagagcctatcttaataaacatttgatataaacaacactattgaatatttaatttaaacgataataacgagcataaaattaatataaatgtcacttataaataacttgaataaaacatcaagcaataaataaattaaccatattaattaataaccatttagtttaacttgtgcccataatctggaatcatccatagacacatcaccattaattgggagcacggcgtattcgaatactctacgactctgcagcgtctgcctagctttacccacacgatactcacagctagccgggctgaaaagtaacaaggcgtaatattgctccatatctctcccttctgcctagtaagttaaaggatgctcgggtcattgctcggagtgatccggtccgaggtgtgtaccaacctacctccgcatccacttaccattgttcgttactcgatgggtagcccagaacttgatgggcccatagggcagttctgaactctcgggcccatcgagcccacatatataaatcacataaacataaaccatgtcactttgcttcacacacttgaaagctaatggccaatacatcgaaaggcctgcataagttcaatcaattggagcaatatacggccaggttcgacaaatcgatcgtgtggatgggcgaaactatgtcattcttattggcacaagagggttgattattatatcaattttaaataagaaataaccataaatatatccatatatccattacgaccataaacaggtccataaaaccaaacacatgaactccatcatgtgtaccacccgctcacaagcggttgttaacgaccaaatttggtaatgccatgggccggattcaaagttagagtcgaagccgatttggagaaattccgttcgagaaagcagaatacgcatcagttacaagtagcatcggctaccacatgaatcggctataggcggtatcggctgccacatatcggctaagcgctagatctgacggagtcaagccgatgcaaccaatctcgggaaagatggtcccatgtccatcattgggattggtcgaagcacttcatagccattgccacgcaatgattggagtcctaaaacggagcaattgtatctattaattaggacaattttcagtttccttagagatatgttggtaagagtccacctgaagggactcattcgtattttaaatttcgttagagataagagtcatgtccagcaaggacatattatgtacttcgaatataaatatgacccacaccatgtaatcaagggacgacggttcaataatactttggcgcatcgtcacccttttttattttcattgtttcgacaagttattgctttcgagttgggctgcatcgggttcgatctccaatgaagaggtaaagcttgttatggaggtttgcgttctcgggattagtgcttgcatcttcatgacactctaatcctgtctatgtaaaccgccgagttatcatatataccgcatagtctagattggtttcgtcatctaaacttcatcggctagcctctatcatcgagaggcaggtttaggcttcgatatcaagctagactatgcggtgtatctaccatcttgaatgagttttcatcgatttgattagatcttatgtttcttctcacgcttaatgctgcatcggttaggttcgatctattaagtactatctttaatcgttttatctagctctttctttgattgctaacagagatagcatcggagttttagccgatcttacttgatttagtcgtcttgtttccttatttggttctggatcatctaaatctgccccttatatcaagatctcatccgtttaaagtatattaagcttcctatcaatctgctagttcacattgctcgtttgaatagtttcaattttatatatttcatctatgctgatatctcggtataaggtggtatggaatactagccgatactagctgggtttgccctatcggctatgcttagggatggcaatttccctcgtggggccggggacctgcccctacgggggtgggggtgggtactgatttcgacccgcggggagtcggagtcggggccccggccatgggcgggaacggtggctggggaggacatccacccgcgggtgacctgcctggccccgaagatgtatattagactattaatactaccatattgtaagcccaaaaagcccatataacctatctttaagtgtttctcaaatactatcaaagcctgttagaatctaaggctctttaaggtgtccataacagcaacagaatatataatacaataatagcaatataattaatttaaaaaagtcgtgcagtctatcgtactccaaaggacaagtacgctaccaaaataactctctaactactggttgttcaaagaagggtgcatgtcttgcaaccttcaggctcgatgtagtcgtacaaaccgtctcctcctggcgcggacatttcactcgctccgactaccgggccaacgccaacgttttctatttacgcaacaatcatcacaacaataaataacataaaaaaaaagataaccaaaacaaatagtatcacaaagtgaaacaatgggtggaaaggattttaaagaaataattttagggatttttgaaatttcggtgtacggcgaaccatagggctaaaattagggtcgcgacagcgggtgctcggattgcaacgaaactgacatggatggatttggaataattctaggagtttggaataggtctcggattttgattgtgaggtcaaacggatggtcaacctgatagaataagaaaaaagatttttctgatttatttttcaacaggaaaataggatttcctgttcttctcgttatgtgcacaggaactggccgtaatcccatgacgccggttgcagaggaggccggttttgagtggggaggcgccggttttgcgatctaggggtcgaggcgattcctttttgtggtcggcggcgaggctggcggtggcgggcagaaacaggaggcggaggcggccatggcggcagcgactccggcgaactccgggaagggcggtggcctgatgaggttcactgaggcgagaggagtcctagggtggcgacggcagaagctaggcggtctggagcgacggcgcgccgtgcagccggcggcggccgaacagagcagtgacggcaggaggcggccccggcgacgttctggggacggattggatggggaaagagaggggaaagggagtacttggcatgaagaatccatttttaccttaaatttcagaggattagcgacgtatacgacgaattttggagctcctgtgaatggcgccggactagggtttcggggattttttcctccggtgacgacgattgagtcagcgggagttgggggcggatttgaggaggtgaaagaggtcgaaattgcggtccttttgcctccggtgttgagccttctagtggaagaacgaaggagttatggaggcgggaagctggaggtgtcgtccgggcattcgtcggtcgatcggcctcgtgcgtgcgcatgcgagcgtgtggcatgcgtgggctggcacgagctgggcgcaaggcggcacgggtttggtgcgaggcagcacaagctgggctcggcctagccgagaagagaagaagaaggaaaagaagagagagagaaaagaaaaaaaaagaaataatagaaaagaaagaaaaaaatatatggaaaaagagaattaaggttaaaatagagaaaaagaaaatattggggaaattaaaataaataggatttgaattggtgtggaatttagatggcccgacatttgggatagaatttaatttggattcaaaggaattatttgaaaggtaagatgcactttgcaacaaaattaaaccagaaaagaaacatcaaaaataaacatgggaaaataatattttaaataaatgtctaactcgacagttatatttttagtgaaccaaagcaagctaaatcaattttaaaaagttgtcaatttctaaatcaattttaaaaagttgtcaattttagggctgttacagagggactgcggacggctgctggcggcagccgtggcaagggcgtgcacgcggcggcggcagccgtggcaagggcgggcatgcggcggtggtggccgcggtgagggcgtgcgggtggccgcggctagggtgtgcaggcggctgcggcgagggtttgctgacagcggccgcgagagcgtgtgcgcggcagcagtgacgaccacgaggcttccacgcggcggtgagggcgggtgggctggcagacgcgccgctccgatggtagccaggcggcggctgctcccaggcaggcgacgaggcaagcgaaaatagaggcaaaatcacacaaactgaaaaaaaaaaggggtaaaaatgcgggcaaaaatgcaataaccaccaagggtataagtgtccctttactttacaactaacaccatcaaactggctgttaggactggggtagccggctggttcaatttcaaaacatagaggtaaaactgcaaatcctaaaaaaaatatgggtaaaacaacaattggatttaaaagtgggggcatggatacaattgccccaaaaactaattacaaaatctgtcacttaacatatttactataacactacattgtcaattcatgaagcaattagtcaaagattcatctcgtaaattagtcgcaatctgtgtaattagttaattttttagcttatatttaatactttaggtatgtgttcaaacgttcgatgtggcagtgtgtaaatttttttgtgggaactaaacaggccataatacattttcgatgaagatattgtaccaaacaaatggtaacagaacatgacaacagttaagactgatccccaggctaaatgacaagcacggatccaaaacatagatcatatcaaagttatgaacaaatcaaggagttaattttaagctcagcttgaattgaagtttagagtaagctcataacttcataagccagacgccaaaacaagaaagatcattagcattagcacataattaattaagtattagctattgcaaacacaaaaagatgaaaatgagatctatttgattatttaaagaaatttctaaatataaagttttcttaaaaaatagatcgcttaacagtttacgatgctgcttaatgtaaacaaggagtagctctccaaataagcccaagagaaggcgacataacttcggatacaacactacactacatattagacgaagacgctgagttacctcctacactgccaacgaccaaaattatatatttttcagacccagaagtaacaaccaaaattatagcaataaaacagggagttttcaaaatagtgcgtcaaaaatgttcagaacacagcatcgatggtagtgtgattagacttgtgaaataatgatttgtgtgggatcatttggagttccactttcccactgccgccattggcatcctggaaacatggcttcacctccacaccggtaaagacagcaacattctggtcaacatcaccccgagagtcactgttgtgactcctagagtggaagaaccttgtgatgcagaacctgccagagccgaggttgacaagttgagggtttttgcattccttcaaatcctctggcaggtaaagctcctcccaacgacccactaactgtggctgggagtccatggcagagaggttacaagcagccaagtagtgcggtgactcatcggagctgaagccaaaccagaggttgaactcaggcacatactcaaccctgccatggaagggtagggtccaattaccgacttttatccatgtgtggcttgccgtgttcaggcagtaggtgccaacaccatcgatggagatgcaaatgtgggggtcaccattgacggtgagcgatgtgtaggagctgatctctgggcggctgcagctgtgccagtacttaggttcacgaacgtacggcggcggcgggaggagttgccactgccaggtcttggagaagttggtcgatgtccgcttgtgcttgcagtagacaaaggcctcaaactgatcgctccactgtgtgcttgagttgacctctggcttgggaatcctctccataacaaaaagactgctgccagggcggtggtgttcatagtcattgtcagcatcggcgttgggtacaaacacagaaaagggcatcgacttgggcttgtggagacagggcaacatgtccatcagccgtgtctctgcttcaaagaggaaagggcgccccaagtgatccacccagaacatcttgtgatccacaaaagggaagcaatcaatcctacatgcctcgtttagagcaggtcggaacttgaggatgggtctgggaagccgaatcctctccatctttaagcctgctgccttcttcttgggattacaggagtcggacaccagtgtctgagaggtgtagtcttcttgcacagctgctgactctgatccatgtgcgattgttgttggtggtggtggtgtagcggtgttaccgaacagctggcctgccagatcgacgcagcgtagccatttggcgccttggaaggggacgtcgacgatgagattcttagcccgacgcgacaggcccatcttcagagtcgatcagcaactcccaagttccagctgaagcgaccgggccgtcaaaggatgaaaaagagaatgggaaattagttgcagataagaggtagtacaagaaagggtgtattgtttgcaggagttaggatgaaggaaggaagagtacctccaataagcagcagcagcaaacagaagatgtagccagccgagccgagataaagcttcctaatgaataacgcagatagcaaatgtaagcagaagaaaaggaaactgactttcgatcatacaggatgaagtcgaagcacaagtaaacaagcgattaaccttgaggcgcgcggtcggagcaggaagtcagactgggatggagtctcgacgcctaaaagtttgggtctgccatgccagggagggagggggagaaaatcaaggggtaaattagaaacagagaagaaaggggaatcttagtttttagttaaaagacaaagacaaaaaaaactagcgaccctaaatctagcagatacgagcaaggaaggaagagtacctccagcaaacagatgcgaccgcagtggattgcgcgtcctgccctgccctgcgatggatctatcaaagagtgttcagaccttcaaatgcaaagatgaaatcacgaaaacctaacaaacatcaccgagaaaacaatatatatgcaaagattaaacgaaataaaaggaatcggctttcgatcaaacatgatatcaaggtgcagcagatgcacagctgctgacctgaggagcgcggtccggtcggagaaggggaaaggggccagcggcggccggcggggatgggagtggcgaatcgagattgggatgggggctccggcttccccttccttttagggttcccgcatttctgcttctgtccgtgggcctctcttagaatgagcttggcccacactggtaaattatgggccggcctacgacggcgtcaaatgtcccgccgaacgagaaggtacacttgacctccctcagtcaaatgacatgtagatccaatctatcttctgccctataattcacccactacagtcctactagtaatatgcccatgctaaacactacggtacaactctatttgtctttaattttttttaaaaaatatttcatgttagccaccgccgcccgtctcccctcctcctactcgccccccaaccctgtccctctcctgccgccgctgacgggccccgcctccgcctcgcgtcgtccccgtcacctcgcaccgcctctgccttcccctcgcgtcgccgcctacacctccgccgccggtgctgccgctgtcgccttgccgtctccacctccctcttgcgccgtcgccctcgccgagcgcgggtttcgccggcggacgcggagaaagtgaggaggcgagcgctcctctccttttccccggctgcgaccaccggcatggaagaagaagaacgcggcggcaatgatctcaaccattgtggcggcggcgatgactggtggcaacgatgacctcgaccacggcggtggcaacaacgacgacctcgaccaccacagcgacgatggtaatgacctcgacctcacccgcttcaactggttgctgaccggatttggacgagaatgagatttcggtcatcggatcggttgatggcgagctcctggttaagagttaagagtaattaatcagaaattttaatcaacactgaacagcacacccatgctgtacaggcccaaccatcctgaacaaccatacccggctgtacagatctaactccaaaccaggagctaaacaaattattaccagttatagcatccataattattgtgagaggtgtgagactaatcacgaaaaacattgctcaacccgcccataaccgcgggcacggctattcgaatagttttactctggccagaggtgtaccactgtacccacaagacacagcctcaacatcatgtctaccatgcgtcgcgatactggaaagtacccgaatagaggctgtaacaataccctctgcacaacacaactcaccacagtgcaccattcctggatcataatcacccccttataaaacaaggcatggactccccagcgacccccgtgggcttatctccgccacttctcagtctggtgctccgcaatgaatcatgttatacaaaaggtaaagccgttgcccacgctggcttgtggttggcacggttaatgtttcacaacagtagctcgcgaaccggtccttaattgccatgagcacgactctcaaaaccatgtgctcacaacccaccattatcaagttttagttggcaagtaattaattaaccaatcacgattgaccatcgtgaactatcattaagccatcattaaataatagtgagtcataagttatcccaatagtgtgctaatgtttctaagcatggctaagcaatcatatctaatatctagctgaaccaatatataaagctcaactagtcaagttataataacccaaggtatcaagaaataaagtaatcaatgcaaattggccataacaaaggaataagttcacaccacccggtgacattctaaaataaatgcatagttgaaataaatagagaattttaaatataggatcaacatgctcaaaggattgtgtttaggatctgtgtgacttgccttgcaataatcggtcttcaattaatcttcttgaatacttccggcgcactcgcgaaccttcgcaacgacgaaaacgacaagctaacacgcaaaacgaagaaaaagactaataaaaaccaaataaacaatacataaaaagtaaacaaacatgtagatcataattttagatgaattatgagacttgaacggcctcattctgacttcaaaagaatttattatgaattttataagattaaatctaattaaagcccatttaaaaagaattaaataaatttaattcaattcatggacaattttaatatgtagatctttattttatacaatttttgcaacttgaaccacattaaactgagttacaatgaattagttatgaatttttaaagattaaatcggattaaaacacttatatggattttaattgaattatgacgcaataatgaattatttttgaaaaggaaaagagaattattgcgtcagcggctagggtttgcggtgtaccgggcgcacggcaacggttcacgggaacggacggccgagatcgatcatatccaaaacggacggccgagatcgaacggatccaccgcggctcacggatgaacgacgacgatgacgtcagcggtgacgtcagcgatgacgtcagcaccggcggcggcttggcggctcggcagctcgggcggcgcatgctcgccggcgaacgacggcacgacgacgcaaacggaaggcaccaacgggtagaaggcgacgcgacgaactcaccggtgaccaaaaccacggcggaaaagcaacggacggcgccggcgacgaggaagaagcggcggcgaagatcgggtcgacggcggcgacggtgctctggcggtcttcggcgacggcgaaggggtggacggggacggcggcgacttggcgaccacgatggcgacctccccgagcgacgacgacgaccggaacggcggcggcgcacggctggagcggcggcgacgacggcggcgctaggtcacacggcgctagggcgcttccgacggcgagagacgaaggcgagggaggcggcgggtagaggagacaccgggggtccttttaaaggggttggaaggcggcggcaaaggcccacggcgaccggcggcgggatggaaagcttggggttcggaggaaagaaaccgatccgattcgacctcgaatccatgaacttccaaagcgattaagacgatgattccaaaagagaaaaggaagaggagatcgagaagatcatttcccctcaaaagatttcaccggagaaggaaagaatcgaccggatttggaaggagacggcggcggctcggacgcggctcggctagggtttcgggcggcggcggctggaggttgacgacaaccctgacaggtggggcccacctgtcagcgacatcgagagagagagaggagagcggcggctcggactgggctgactgggccggggagagagagaaagagaggggttttgggccgactttcggcccaaagccaaaagaagacatttaaaaacctttttcaatttaaattattcatgaaatgcaattccatttattaaaaatacttccttagctcaaataaatcccagaaaaatctaggaattatagaattaagcaaagtatttaacaaaattttatctagcccaattttatattgagatttaacaaattaaaattagatcttctcttttaagcttttaagatcatttctaattattccttttaaacaacaatttataatttaaggatttttaaacaaaaaaaaactcttaacaaatataattagatcattattgatcaaataattactgaactgttctttgtatcatttaaggaattgagctctgaaaaatccgagaaaatctcagagagttgacttaatcatggggaatttaataaaaattaaatccatccatgctttatatttaggaaattttatttcccacatttaacttcacttgtaaattaaagatcatttgatataaattcaaataataatttattaaataatttataaatcctgaaacaaaaatcaggatgtgacagccgccggtgctgccactgtcgccttgccgtctccacctccctctcgcgccttcgccctcgccgagcgcgggcttcgccggtggacgcggagaaagtgaggaggcgagcgctcctctccttttccccggctgcgaccaccggcatggaagaagaagaatgcggcggcaatgatctcaactattgtggcggcggcgatgactggtggcaacgatgacctcgaccacggcggtggcaacaacgacgacctcgaccaccacagcgacgatggtaatgacctcgacctcgcccgcttcaactggttgctgaccggatttggacgagaatgagatttcggtcatcggatcggttgatggcgagctcctggtcgcttgatttagtggcactgggctcggcggtgacagattgggtggcgctgaggaggatgaagtttcatgcaccggtatgcttcctccagtcaccgttgtttctagcgattctctttccatccccactccctattgatctgtattgcctcgtcaaatagtgaccgcgagccgatgcttgctgaggagcccgtactttaggccttccaatcttcaatcaaccgctcaagggctcaaggtgtttacacctaaatttggcacctaggatcgaaataggaaaaattgccaaagtttgaagttctgccggtttcctccagagtgggctggtctgaccgccgtttgtcggccagtcagaccgggcggtatgtggctggtctgaccggcggtatgtagccagtctgaccggcagagtccgagtccgggtctgtttcgccgggtctcgaagtttccttgctcgggaagacatgtttcgggtttcctttggattctatcccgaattggacatggaggagagcctgttgagggcaagaccaacccctatataagggagtaaggccggttcattgtaaagatcaatctacaatcaatcaatcgaatcgtttttcatattgcttttagtttactcttagtttgtctatctttgtcgatttgcgccgtaaatcgtccgccgccgctgcgagagtgcggcacctctttgtaggtttgtcctgaataccttccgttttgcccacgagacgggtagctatatagaatcggctccgctagccgatttagttatcaaaacccatcttagtctagtttttgctagattgaggtggttggcgactctaggatcaccgcaaggcatttaggtgctgcgatcgtgcttggtaatttgtcacaaaaagttgccaatacaaggtaatgcgtgtgtgtgtgtgtgtgtgagttctaaacccagccaagcacccaatcccagtcccgaactgtctagcgaggcacggtggtgtcacgcttgacggtgggccagttaagcatggggctgctggtaaagataatgctggtggttgcattgaacctgtgtttatatgttctggttttgtttatttatagtggtcatatgattgctgtgctatgcaggatgaatcaggttcgctgacttcgcatgacccatccatcaggtgtttgttggagatcttgcatttggtgttgctcgctttgtatacatgcgtggttcttttattagctactggatggcatgagaggtacagggtttcttataacttatttaggcttctcaaagggaaatagtcattttcattggttaattgatttttctggtctttacaaatatcatgtcagaacggattttcgttgtgctgctgtaggtccctctatcgcttcatcctacgattaattaatatgtttagaggcatttcctgtgtgggtcatggtttataggtgcccttatgaatgatatcgtcttctatggctgctatttctctatatcatgggcatatttattacagcttgtcaggcactgagattagattttgtttttagccatggcataggctttattgttatattcttcttactttatatattacagctttttatgttgctgagtatgtacgatgattaaggctaggtcttgaatttatagtagttttgtatggtactccaaatcaacttgggccttcgatgcttgtgaagtgaagtgaccttagtagttttggctctttctggagtaaattatgccattttatgatccttttgctcccatgcctaacaagtttttcagatgtaaatgtacgtacctttcaaaagttctttttttccccttgagacagttgcattccaggggattcagtttgccatgtacagttaaataaagatagtttcatgttcaggaaatgtagtaaggattcagccgtagtctaggtggttcttggaggaaatgcagttctgtagggttcccacgtcattcaggagatggtgcatgtgaggacactgatgttcagggttttttaaaaagatcttgaaagaatatagcttgcatattttgctggtggttttttttttaacgactcgcataagacagtgtgaagttcatattgatagagcagaaaaaaatacaaggatacaaccctgggaggccgtaaccatgaaaagaaaaggtataccacctcccacacaccgacaacaccaagcactcacccaggagaaggcctgcaccggaccggccaccgctaagcgtgaccgcccaccgcaaggccaacaaaggagctacaactgggatcgcccaaaacaatctatacaaccgacacaaaaccccgctctatccacatctcagggattcagggagagagggtgagagagaagatggaaccgctctcccccctaggccccccgacgtggccaacttgtacaaactaggacgctgatacaagaggaagagactctagaacgaacttgtagcagttgattgggaggtttcgacaagggtgctgccaagccaacgtctctagggagagaagcaacgaaagaaccgccgccgccgaccgtcgaggtcagaagaacctcgactgggctttcgcccggcaacaccactagaggaggtgagacggcacgacaacgccctcaagaggggaatgacgctcgcgcgccaccgttgccggcccagcgaggtcgggctgggttttcacccgccatccaccgcctgcctatccaccgttgacaccccaatactccaccgccagctaaacctctgccgacacgtgggcatcactgcacccgcccccctgccgaccagtctccgcaagccgccaccggtcacgccttgtcacctcacgcagcgtcgtcctctacctccatcgaccgcgtcgcaacggcaacctcgccggcctaccaccagtaccgcgcctcctcgcgccacggccaccttgcccggtcaccaccactgtcggccgcaactcccgccactgatgtcgtcggccacctgccgacgccaccagccagctgccgacgtactgcaaccaccaaccgccgtcgggcacttgctgccgccgcccgggccgtgggctccgcgctgccatcgccgtgaggtccgcgccgccgtcccgcaagctccgaactgccgccgcgacagtcctcgctcgatctggccgccggggggccagatccgcctccggtcgccggaaccacctccggcgctgctggatccgccaccctgacaccaatccatcgccgttgccaggggatttagatttgtcctgaaaaccttccgttttgcccacgagacgggtagctatatagaatcggctccgctagccgatttagttatcaaaacccatcttagtctagtttttactagattgaggtggttggcgactctaggatcaccgcaaggcatttaggtgctgcgatcgtgcttggcaatttgtcacaaaaagttgccaacacaaggtaatacgtgtgtgtgtgtgtgagttctaaacccagccaagcacccaatcccagtcccgaactgtctagcgaggcacggtggtgacacgcttgacggtgggccagttaagcattgggctgctggtaaagataactagaacttacggcgcgcttcgcggcgccctagcgttcgctttgaaagaagaaaataactaaggagaatggtgggagcatattttagttgagctgatagtgtagggtttgtttcagaagacaggttgacaataaaatgcatattggagctataacaggcagagaaacattaatcaattgttcacatattcggtaagcattgaaagaatatagttggaaagactaagtgtcacaacatttacatcatttacaccgtttatattacatatagttcttctgaaggtcttcgttccaacataggctaatacaacttgaattctgaagtttgtgaccatcacataacctgaaatcttacatctatgtgacgataaaaaaaaaagtggttgaattctgcgagataaaatcagctaagtgtaaatccagaagccatgagaacttattatgcttcatagagcaattaacagcatatatatatagaaagaaactaaatgatcagccaagatacaggtgtagagaaagaaacatccctgctatttgcccggctaccatatagaagttcaattctttgatgaactataaaatgtcattgaaattggtaaaccacctgtgatttcttcctcctgtcaattaatttatagggaaagcctgacaataaacaaaataaaaggatgagataatctaattcgtgcaccaagttcttatgtcagttgatttgttattatgttggcaactatgtagcgatacccgcgctatatttacaaacatgcatttgtcatggaattcaaagaaaacttaaagctaactggcaattctcacatttccaaagattgattaaactcacttgtcaacgcacaacactaaagcattacttcatatcaaccaactccatgctctccttcttgctagaatagttcatatgaaatcacatataatttagctaggttactgtagacgtgtttgttaggactgtacttcatatcaataagttagatggagaaaggagtaagtttctttcaaccatcacacataaaacataatctcattttatgttgattcaattggataagcatacttcgccattatctaggtcacaaagatttgaatctgggaaacatacacctatatttatatagactgaatcgctaccctgatttagtttgcaggtggtgcgatggcagcatcattttttcactaaataagaacatgattagatagtattggagtaatcaccaacaaacagtggaaaatgaaactttgccaaacacagatccaacagtgatagaaaattagaataggagtttccatcatttgacaaaattatagaagggcacaaattttaattgctagctagataacctaacaaaatagcaaggaataaatggtagaatgattgaggacagaaaacctgaagagatcaaatagtgttgcttgggcaacgaagtgaattcgtcaacccaaaatccaatatctcctattctctgcacaaacagagttgcaaaatttcccttatgcagaacttagcacgccacaaccagtgtctaactctcaaagctgctcaaccaggctagcaccttgtgaggtgggttttcaagcacaacctagtactcaatgcagccatttattcatgagattgaatgaaatgaccagcataattccaaagcacttagcaagatagcagttcagtagtgtccaaaattcagggatgaaatgattcactaaatgaagtggcgattaatccaaagcaccttacagtccagtaaggtccaagaagtcctaataccagttctgaaagatagcttttagataatgagttctgaaacatagttgatcgctttaataatgcagatactgcaacttcaaatgttgtctatcataaaatggtcggtaccaaaaaataaattcagttgtgcacctcctgcggcacagccgtggtgcagtctttggtcgaattagaatgaattatcaggttagtcaaatcaattcaagaacatttattctagaaaggttcatccagaaaatgggcttagataagcggtaaaattttctattccaaaattgcgtcagaaaagttggaagattaacagacagatatatgagtagggaaaaccaaatcgaagagaaggaaaggtaaatacctgcacgactgcacaatggacaccatacgctcgcatccatcgatcactcttatcgatcatggcacgactgctcgggaagtggctccttcgcagccgctgtggcggtcatcccaagcctcctcgcattgcaggcagaacatgcatgacagcgtaggaatacaggggaaaaggagatctagcagcttaggctcaagaactgatggcttacatgggattcttcgtaatcagcattggagcttagcactgatggctcatgcccttccaatggaagcgtcggcggtccatgggtaccagagctcgacggtcgtaggcgtcgccgccgcaggtccatgaaccatctcccgcctccatcgccactccagctaggctatcaccaccaactacggcggcgcaatggtagagtcacctccccaggtagagagaaataggggaaaaagagaaaacaataagaacggaggcggcgactggttcgtgagtctaggaggcgtgggttctctctcctttgcttgactcggaagagggtgaaggggagaggggtgggcaggagatgggggacggcggggagaccgcgaggggaagccgtcggcggcgaggagaagtaggggaagggaagacgatgtggcgccgtcgctcaagggaggggagagagcgagagaacggtggggaacagtggcggctagggtttctgggaagggaggggataatagtggtttctttttcataaaacccccttactttctctttttcagagcgcgatcctatatttagaatttcgcctccttcacatagaatatatcaggatgtcgagggcctttacgtaagaatacacaacacacaacctctattaccaaataaatagaggatttttttgcaaaaacgccacttccagctccaggcgacgtggacatcacgggaagcgaacacgccagccaaaaaaccagaatcgaaaacgccacttccagcgccgggtgacatggacatcatgggaagcgaacacgccagccaaaaaaccgcagaatcgctgtggtgcgagcattctacggtcctctttaatctctccgatgctggtggttgcattgagcctgtgtttatatgttctggttttgtttatttatagtggtcatatgattgctgtgctatgcaggatgaatcaggttcgctgacttcgcatgacccatccatcaggtgtttattggagatcttgcatttggtgttgctcgctttgtatacatgcaagtgttacaatgtaggctttattgtaaaatagcattggtggcacctactgtattctgaaaggagaagaatagtcaggctttcagcattgatcacctccatacaaaagaatttcacatttgcgatcattagctatttagctgtgccattccagagcctgaatgatgcaaatgttagaatcagctggcaaaaacttggcaagtaacaacaggatttattattttgagcagttatttcgaaacccagcctgcaccttgtctgcaaattcttttgctcccattggcattttagaattagatcacttcgtacaaaatcttaaactattatgtaacacttgcacattgtgagtatcctaagaagatgagtctttgcacattgtgatgcatcgtagcagaggaatgcattttaccttcatcatcatgattccaactggtgctccgagttctccagccttagcgaataatgacctcccaacctcatttgtcatccataattttaaggcattttgtgttctgacttgtgaagtctaaatcatttacgataatcaacattcaagagcacatgaagtttatatagcacagctacccctacaaaccttttaacttgacggccataagctggggttgaaccggacagacgatacttttcctagtgagaaacaaaggaatcatacatcagaatgtaggttgaaccagtttttaggtttgggatagttccaaggtatgtacctatataattagatgttcaagctgtttaatgccgcttccatcatctgcaggattagcaagacagcagccaatgaatttggatgggcatttcttcaacacactacaacaaaaacaaaatcaacaaatatttgtttacttaaacaccgtgggaatgctggaaagttaggggtgccaccttagatgtcacttttgcaaaaaggcccctgcatttctgttaattacgcattggtccccgctgatatccaccataaaccgttggatctcgatatagggtagatctggccgtacacgtgtccaactgtgccgacccttccgcaaccgtgaaatcgttggatctggaacggacggtgtggatttcgccggcctgcaccaaaccctagccccgtcgccccccaccctcgcacgcgcactcgccctcctccctctgcgcgccgccacgctctcctcctcggctcctcccctcacatgcgctgtcgccgccgccgccttgctgtcctcctgccctcacgcgcctctcctcgccatcctcctccacttgcacgcatcgttgccatcgcagactcgccatcttcctccactcgcgcacgtcgtcgtcatcgcaatctcgccctcctccagccatcgtcgccgacccaccgctgcctctccctcccagtgaggtctagaggtcaggtccgccagatccgccgcgccgccgctcgcgtgttctctgtccgctggcgtttgacatgttggttttgcatcatcgatctgctgcagctgtgaaaggtcgacgccatcagtcaaggtgtcgctcccctccctcctgttctaattcctgtccttgcgccgaccagccgaccattagcacagaggccgcaatgtaagtccgttctacctcatcattgattatttcccatgcattcacttgaggttttataggatccaccatcttgccttggtcccattgagttactcatgggttaggatgtatagcagattaaggagaggattggcttccattgctgctgtttgcatccgctttcaggttaagccatccattaagttttatcctcgttgttatggctgcttgcaaggctgcaagattcagatgatgtcctcactgttaaggatggccgcagctctgcaatattcaaatggtaacattcttgctaaaattgccacaaatgatgagataaactgaaatccaattatttcctttaattttaattgcattcgctatggtgcaatgtggtaagaaatccatgcactatagcaatgaagcctgttggggtcatgtatgtatggtcttctcagttgtcgtatttaacgattgctgcttattcttgttataaccaaaacctcgagagatagatcatgatcaaatgatgacatcgccacccatcatcgtactaacgcaatgtatagttacgaatttatgggtaaaataatgataaatgggaatatgacagcacccctttgtgcaggatctttgagctatggatgctaaacgataaaggtggctcacattgaactacaactgctaaaggcttaaaggctaaaggtatggatcttttaaatagaaaatgcagaaggagccttcccctgctgttttcgagggaaaaaaaaaggctaaaggtgtgaatagaacataaaaaactgaaccaatcaaatgacaatttctggtctgttgactattcagtattgcatgaggtttctatttgtgaattagacatgttcataatcaaattgaactacaagaaaaaaaactgagataattttattaagtacacatttggtatgcctgaaatttctgatataatcaaatttaatcgtcattaataacaatttatttggttaaatttgacattactttgcattaatacaaatataaaatgatatacataactcaaaataagaaatcaaagaaatgtggggtaaaataagatatatctatatctatactaatataaaaaagagttgcccctctccaatcctaccggccaaatcatccggatcaatctctactgtccatctgccctctcatgtaatctcatccgtccagttattccaccgatttcgcccccatgtggacacggtgactccgccgggcaaaaccccgctgcgatgactccgccgcgcgtgtcctctctcgcttgtcgcgatcgatggaccagcgcaccgccgcaacgccggaccaacgccgaccaccaccgcacccgtgcccaccgacggaccagcgccgccgctgttacgcctctaccgccagaccaccgcacaccaatgcatccctcatccgcaggagccccgcccgggactgcccccgacggcgccgcggtggttccccctactgccggagccgctgcggcgctcaaccagcgccgacggaccaccatagcgccggagctccctcatcctcgcgacggaccagcgttgccgctgctgcgcctccaccgccggaccatcgcgcaccaccgcatcccccttccgccggagcggagccacgcacgggactacccccgacaacgccgcggttgttccccctactgccggagccgctgcggcgctcgactagcgacgccggaccagcgcaccgccggactagcaccgacggaccactgcagcgccaagccaccaccgcggtcccatgttccgctaattcccatctcgggggttttcgtgttcgcctcgccttgccctggctcacttcggggcggaggtggcgtcgctgtccccgatcgaattctgccgatgcgcccctggctttcaagatctaagtgcatgcgcgccctcgccgcatgccgcccggcgctccggcagtccgggtggccggacgcgatcggctccgaggtatgttgcccatgcgcgcgcttgctctcctttgcgatggttttggtttggccaccgtttgattgagaggagttctgggaggtacgcgttgtcgtaatttgggggttccgttgcttgcgatggggaatgctcaatgatctgcttgtgcagtttggtttggtggctgctgttctcatacgaacattatattctacatttagtatctgtttgtgccatcctcttatgatatgagcaggttgtgttgttggcattggagtgtttaggttgataatggtcctatttggaagacatatggattgctgctttattagctgataaaaatgttgttttaaatgatcttttgcgatttatgtgggttgagatgattctacaggtggttttgatcatacacagatttgcctaatattggaacttcatcgaagagtagttgggttttcctggctgaggagtattagttgattggtgaactaaaatgcagaaggaatcattcaggaataaatgttgcatcttatcattggaaactgttataaaaaatagtgtcttcaacaacttaatttgtcatagagagaaagattgtaggcaaattcaggttttccgtcatacctccatctcctcacgattcacgtgattagcgagttgccatggatgagccagcaagacgtgcatgcaatcatcagaaacggcatcgcaacagcacagcaccaagcacatgcctattcgccagaccagatctatcatcgcataaaaccaagcatataaccaacaacacgggataatgtaagctcactaaataaatgattaactgttcaatagatcctaaacccaaaatgaaacagggtaatcaccaaacatataagggtggatcccacaatgatgttatgatgcatcccctcgacgagcgacgccgcacaaataatctctgcctgcaaaagcaactaaagcacaacgctcctgcaggccatcctgagactaaatcaaatacaacaatttatgagcaataataattatcgatatttgatctgagcctttgaacaatgaacaaagacctttactttttcatcctacctaaatgcatattccaattctcatcctaattaaatttaccatttaacactatgggttaactaataaaaatacatgaatttttttctattttcccagtggctataagagccacgacaaaacaatatgaaattataaccaccagcaagagcccctgcgtcgctctcccccagaggcgactcgggtggcgaacctagccgccccctcctccccccgaccaccttcctcctccgcctcgccgccaccacaaggacagcggcggcggggcttcacgcctcttcctacgctggcggccaagggaacctccggtgggtggcgatggcgaccgccagatccgccccgccgtggccggatctggcggggtggcggctgacggcgggggtggagacggcgatggtaggggcgagggggtgtgggcgacggtggtcggaatggcgacgatggaggcggcggcggggatggcgacgacggtggggttggcaacggcgatggattggcgtcagggtggcggatccggcagcgccggaggtggttccggcgaccggaggcggatctggccccccggcggccagatcgagcgaggactgtcgcggcggcagttcggagcttgcgggacggcggcgcggacctcacggcgatggcagcgcggagcccacggcccgggcggcggcagcaagtgcccgacggcggttggtggttgcagtacgtcggcagctggctggtggcgtcggcaggtggccgacgacatcagtggcgggagttgcggccggcagtggtggtgaccgggcaaggtggccgtggcgcgaggaggcgcggtactggtggtaggccggcgaggttgccgttgcgacgcggtcgatggaggtagaggacgacgctgcgtgaggtgacaaggcgtgaccggtggcggcttgcggagactggtcggcaggggggcgggtgcagtgatgcccacgtgtcggcagaggtttagctggcggtggagtattggggtgtcaacggtggataggcaggcggtggatggcgggtgaaaacccagcccgacctcgctgggccggcaacggtggcgcgcgagcgtcattcccctcttgagggcgttgtcgtgccgtctcacctcctctagtggtgttgccgggcgaaagcccagtcgaggttcttctgacctcgacggtcggcggcggcggttctttcgttgcttctctccctagagacgttggcttggcagcacccttgtcgaaacctcccaatcaactgctacaagttcgttctagagtctcttcctcttgtatcagcgtcctagtttgtacaagttggccacgtcggggggcctaggggggagagcggttccatcttctctctcaccctctctccctgaatccctgagatgtggatagagcggggttttgtgtcggttgtatagattgttttgggcgatcccagttgtagctcctttgttggccttgcggtgggcggtcacgcttagcggtggccggtccggtgcaggccttctcctgggtgagtgcttggtgttgtcggtgtgtgggaggtggtataccttttcttttcatggttacggcctcccagggttgtatccttgtatttttttctgctctatcaatatgaacttcacactgtcttatgcgagtcgttaaaaaaaaaaccaccagcaaaatatgcaagctatattctttcaagatctttttaaaaaaccctgaacatcagtgtcctcacatgcaccatctcctgaatgacgtgggaaccctacagaactgcatttcctccaagaaccacctagactacggctgaatccttactacatttcctgaacatgaaactatctttatttaactgtacatggcaaactgaatcccctggaatgcaactgtctcaaggggaaaaaaagaacttttgaaaggtacgtacatttacatctgaaaaacttgttaggcatgggagcaaaaggatcataaaatggcataatttactccagaaagagccaaaactactaaggtcacttcacttcacaagcatcgaaggcccaagttgatttggagtaccatacaaaactactataaattcaagacctagccttaatcatcgtacatactcagcaacataaaaagctgtaatatataaagtaagaagaatataacaataaagcctatgccatggctaaaaacaaaatctaatctcagtgcctgacaagctgtaataaatatgcccatgatatagagaaatagcagccatagaagacgatatcattcataagggcacctataaaccatgacccacacaggaaatgcctctaaacatattaattaatcgtaggatgaagcgatagagggacctacagcagcacaacgaaaatccgttctgacatgatatttgtaaagaccagaaaaatcaattaaccaatgaaaatgactatttccctttgagaagcctaaataagttataagaaaccctgtacctctcatgccatccagtagctaataaaagaaccacgcatgtatacaaagcgagcaacaccaaatgcaagatctccaacaaacacctgatggatgggtcatgcgaagtcagcgaacctgattcatcctgcatagcacagcaatcatatgaccactataaataaacaaaaccagaacatataaacacaggttcaatgcaaccaccagcattatctttaccagcagccccatgcttaactggcccaccgtcaagcgtgacaccaccgtgcctcgctagacagttcgggactgggattgggtgcttggctgggtttagaactcacacacacacacacacacgcattaccttgtattggcaactttttgtgacaaattaccaagcacgatcgcagcacctaaatgccttgcggtgatcctagagtcgccaaccacctcaatctagcaaaaactagactaagatgggttttgataactaaatcggctagcggagccgattctatatagctacccgtctcgtgggcaaaacggaaggtattcaggacaaacctacaaagaggtgccgcactctcgcagcggcggcggacgatttacggcgcaaatcgacaaagatagacaaactaagagtaaactaaaagcaatatgaaaaacgattcgattgattgattgtagattgatctttacaatgaaccggccttactcccttatataggggttggtcttgccctctacaggctctcctccatgtccaattcgggatagaatccaaaggaaacccgaaacatgtcttcccgagcaaggaaacttcgagacccggcgaaacagacccggactcggactctgccggtcagactggctacataccgccggtcagaccagccacataccgcccggtctgactggccgacaaacggcggtcagaccagcccactctggaggaaaccggcagaacttcaaactttggcaatttttcctatttcgatcctaggtgccaaatttaggtgtaaacaccttgagcccttgagcggttgattgaagattggaaggcctaaagtacgggctcctcagcaagcatcggctcgcggtcactatttgacgaggcaatacagatcaatagggagtggggatggaaagagaatcgctagaaacaacggtgactggaggaagcataccggtgcatgaaacttcatcctcctcagcgccacccaatctgtcaccgccgagcccagtgccactaaatcaagcgaccaggagctcgccatcaaccgatccgatgaccgaaatctcattctcgtccaaatccggtcagcaaccagttgaagcgggcgaggtcgaggtcattaccatcgtcgctgtggtggtcgaggtcgtcgttgttgccaccgccgtggtcgaggtcatcgttgccaccagtcatcgccgccgccacaatagttgagatcattgccgccgcattcttcttcttccatgccggtggtcgcagccggggaaaaggagaggagcgctcgcctcctcactttctccgcgtccaccggcgaagcccgcgctcggcgagggcgaaggcgcgagagggaggtggagacggcaaggcgacagtggcagcaccggcggctgtcacatcctgatttttgtttcaggatttataaattatttaataaattattatttgaatttatatcaaatgatctttaatttacaagtgaagttaaatgtgggaaataaaatttcctaaatataaagcatggatggatttaatttttattaaattccccatgattaagtcaactctctgagattttctcggatttttcagagctcaattccttaaatgatacaaagaacagttcagtaattatttgatcaataatgatctaattatatttgttaagagtttttttttgtttaaaaatccttaaattataaattgttgtttaaaaggaataattagaaatgatcttaaaagcttaaaagagaagatctaattttaatttgttaaatctcaacataaaattgggctagataaaattttgttaaatactttgcttaattctataattcctagatttttctgggatttatttgagctaaggaagtatttttaataaatggaattgcatttcatgaataatttaaattgaaaaaggtttttaaatgtcttcttttggctttgggccgaaagtcggcccaaaacccctctctttctctctctccccggcccagtcagcccagtccgagccgccgctctcctctctctctctcgatgtcgctgacaggtgggccccacctgtcagggttgtcgtcaacctccagccgccgccgcccgaaaccctagccgagccgcgtccgagccgccgccgtctccttccaaatccggtcgattctttccttctccggtgaaatcttttgaggggaaatgatcttctcgatctcctcttccttttctcttttggaatcatcgtcttaatcgctttggaagttcatggattcgaggtcgaatcggatcggtttctttcctccgaaccccaagctttccatcccgccgccggtcgccgtgggcctttgccgccgccttccaacccctttaaaaggacccccggtgtctcctctacccgccgcctccctcgccttcgtctctcgccgtcggaagcgccctagcgccgtgtgacctaccgccgccgtcgtcgccgccgctccagccgtgcgccgccgccgttccggtcgtcgtcgtcgctcggggaggtcgccatcgtggtcgccaagtcgccgccgtccccgtccaccccttcgccgtcgccgaagaccgccagagcaccgtcgccgccgtcgacccgatcttcgccgccgcttcttcctcgtcgccggcgccgtccgttgcttttccgccgtggttttggtcaccggtgagttcgtcgcgtcgccttctacccgttggtgccttccgtttgcgtcgtcgtgccgtcgttcgccggcgagcatgcgccgcccgagctgccgagccgccaagccgccgccggtgctgacgtcatcgctgacgtcaccgctgacgtcatcgtcgtcgttcatccgtgagccgcggtggatccgttcgatctcggccgtccgttttggatatgatcgatctcggccgtccgttcccgtgaaccgttgccgtgcgcccggtacaccgcaaaccctagccgctgacgcaataattctcttttccttttcaaaaataattcattattgcgtcataattcaattaaaatccatataagtgttttaatccgatttaatctttaaaaattcataactaattcattgtaactcagtttaatgtggttcaagttgcaaaaattgtataaaataaagatctacatattaaaattgtccatgaattgaattaaatttatttaattctttttaaatgggctttaattagatttaatcttataaaattcataataaattcttttgaagtcagaatgaggccgttcaagtctcataattcatctaaaattatgatctacatgtttgtttactttttatgtattgtttatttggtttttattagtctttttcttcgttttgcgtgttagcttgtcgttttcgtcgttgcgaaggttcgcgagtgcgccggaagtattcaagaagattaattgaagaccgattattgcaaggcaagtcacacagatcctaaacacaatcctttgagcatgttgatcctatatttaaaattctctatttatttcaactatgcatttattttagaatgtcaccgggtggtgtgaacttattcctttgttatggccaatttgcattgattactttatttcttgataccttgggttattataacttgactagttgagctttatatattggttcagctagatattagatatgattgcttagccatgcttagaaacattagcacactattgggataacttatgactcactattatttaatgatggcttaatgatagttcacgatggtcaatcgtgattggttaattaattacttgccaactaaaacttgataatggtgggttgtgagcacatggttttgagagtcgtgctcatggcaattaaggaccggttcgcgagctactgttgtgaaacattaaccgtgccaaccacaagccagcgtgggcaacggctttaccttttgtataacatgattcattgcggagcaccagactgagaagtggcggagataagcccacgggggtcgctggggagtccatgccttgttttataagggggtgattatgatccaggaatggtgcactgtggtgagttgtgttgtgcagagggtattgttacagcctctattcgggtactttccagtatcgcgacgcatggtagacatgatgttgaggctgtgtcttgtgggtacagtggtacacctctggccagagtaaaactattcgaatagccgtgcccgcggttatgggcgggttgagcaatgtttttcgtgattagtctcacacctctcacaataattatggatgctataactggtaataatttgtttagctcctggtttggagttagatctgtacagccgggtatggttgttcaggatggttgggcctgtacagcatgggtgtgctgttcagtgttgattaaaatttctgattaattactcttaactcttaaccaggagctcgccatcaaccgatccgatgaccgaaatctcattctcgtccaaatccggtcagcaaccagttgaagcgggtgaggtcgaggtcattaccatcgtcgctgtggtggtcgaggtcgtcgttgttgccaccgccgtggtcgaggtcatcgttgccaccagtcatcgccgccgccacaatggttgagatcattgccgccgcgttcttcttcttccatgccggtggtcgcagccggggaaaaggagaggagcgctcgcctcctcactttctccgcgtccgccggcgaaacccgcgctcggcgagggcgacggcgcaagagggaggtggagacggcaaggcgacagcggcagcaccggcggcggaggtgtaggcggcgacgcgaggggaaggcagaggcggtgcgaggtgacggggacgacgcgaggcggaggcggggcccgtcagcggcggcaggagagggacagggttggggggcgagtaggaggaggggagacgggcggcggtggctaacatgaaatattttttaaaaaaaattaaagacaaatagagttgtaccgtagtgtttagcatgggcatattactagtaggactgtagtgggtgaattatagggcagaagatagattggatctacatgtcatttgactgagggaggtcaagtgtaccttctcgttcggcgggacatttgacgccgtcgtaggccggcccataatttaccagtgtgggccaagctcattctaagagaggcccacggacagaagcagaaatgcgggaaccctaaaaggaaggggaagccggagcccccatcccaatctcgattcgccactcccatccccgccggccgccgctggcccctttccccttctccgaccggaccgcgctcctcaggtcagcagctgtgcatctgctgcaccttgatatcatgtttgatcgaaagccgattccttttatttcgtttaatctttgcatatatattgttttctcggtgatgtttgttaggttttcgtgatttcatctttgcatttgaaggtctgaacactctttgatagatccatcgcagggcagggcaggacgcgcaatccactgcggtcgcatctgtttgctggaggtactcttccttccttgctcgtatctgctagatttagggtcgctagttttttttgtctttgtcttttaactaaaaactaagattcccctttcttctctgtttctaatttaccccttgattttctccccctccctccctggcatggcagacccaaacttttaggcgtcgagactccatcccagtctgacttcctgctccgaccgcgcgcctcaaggttaatcgcttgtttacttgtgcttcgacttcatcctgtatgatcgaaagtcagtttccttttcttctgcttacatttgctatctgcgttattcattaggaagctttatctcggctcggctggctacatcttctgtttgctgctgctgcttattggaggtactcttccttccttcatcctaactcctgcaaacaatacaccctttcttgtactacctcttatctgcaactaatttcccattctctttttcatcctttgacggcccggtcgcttcagctggaacttgggagttgctgatcgactctgaagatgggcctgtcgcgtcgggctaagaatctcatcgtcgacgtccccttccaaggcgccaaatggctacgctgcgtcgatctggcaggccagctgttcggtaacaccgctacaccaccaccaccaacaacaatcgcacatggatcagagtcagcagctgtgcaagaagactacacctctcagacactggtgtccgactcctgtaatcccaagaagaaggcagcaggcttaaagatggagaggattcggcttcccagacccatcctcaagttccgacctgctctaaacgaggcatgtaggattgattgcttcccttttgtggatcacaagatgttctgggtggatcacttggggcgccctttcctctttgaagcagagacacggctgatggacatgttgccctgtctccacaagcccaagtcgatgcccttttctgtgtttgtacccaacgccgatgctgacaatgactatgaacaccaccgccctggcagcagtctttttgttatggagaggattcccaagccagaggtcaactcaagcacacagtggagcgatcagtttgaggcctttgtctactgcaagcacaagcggacatcgaccaacttctccaagacctggcagtggcaactcctcccgccgccgccgtacgttcgtgaacctaagtactggcacagctgcagccgcccagagatcagctcctacacatcgctcaccgtcaatggtgacccccacatttgcatctccatcgatggtgttggcacctactgcctgaacacggcaagccacacatggataaaagtcggtaattggaccctacccttccatggcagggttgagtatgtgcctgagttcaacctctggtttggcttcagctccgatgagtcaccgcactacttggctgcttctaacctctctgccatggactcccagccacagttagtgggtcgttgggaggagctttacctgccagaggatttgaaggaatgcaaaaaccctcaacttgtcaacctcggctctggcaggttctgcatcacaaggttcttccactctaggagtcacaacagtgactctcggggtgatgttgaccagaatgttgctgtctttaccggtgtggaggtgaagccatgtttccaggatgccaatggcggcagtgggaaagtggaactccaaatgatcccacacaaatcattatttcacaagtctaatcacactaccatcgatgctgtgttctgaacatttttgacgcactattttgaaaactccctgttttattgctataattttggttgttacttctgggtctgaaaaatatataattttggtcgttggcagtgtaggaggtaactcagcgtcttcgtctaatatgtagtgtagtgttgtatccgaagttatgtcgccttctcttgggcttatttggagagctactccttgtttacattaagcagcatcgtaaactgttaagcgatctattttttaagaaaactttatatttagaaatttctttaaataatcaaatagatctcattttcatctttttgtgtttgcaatagctaatacttaattaattatgtgctaatgctaatgatctttcttgttttggcgtctggcttatgaagttatgagcttactctaaacttcaattcaagctgagcttaaaattaactccttgatttgttcataactttgatatgatctatgttttggatccgtgcttgtcatttagcctggggatcagtcttaactgttgtcatgttctgttaccatttgtttggtacaatatcttcatcgaaaatgtattatggcctgtttagttcccacaaaaaaatttacacactgccacatcgaacgtttgaacacatacctaaagtattaaatataagctaaaaaattaactaattacacagattgcgactaatttacgagatgaatctttgactaattgcttcatgaattgacaatgtagtgttatagtaaatatgttaagtgacagattttgtaattagtttttggggcaattgtatccatgcccccacttttaaatccaattgttgttttacccatattttttttaggatttgcagttttacctctatgttttgaaattgaaccagccggctaccccagtcctaacagccagtttgatggtgttagttgtaaagtaaagggacacttatacccttggtggttattgcatttttgcccgcatttttacccctttttttttcagtttgtgtgattttgcctctattttcgcttgcctcgtcgcctgcctgggagcagccgccgcctggctaccatcggagcggcgcgtctgccagcccacccgccctcaccgccgcgtggaagcctcgtggtcgtcactgctgccgcgcacacgctctcgcggccgctgtcagcaaaccctcgccgcagccgcctgcacaccctagccgcggccacccgcacgccctcaccgcggccaccaccgccgcatgcccgcccttgccacggctgccgccgccgcgtgcacgcccttgccacggctgccgccagcagccgtccgcagtccctctgtaacagccctaaaattgacaactttttaaaattgatttagaaattgacaactttttaaaattgatttagcttgctttggttcactaaaaatataactgtcgagttagacatttatttaaaatattattttcccatgtttatttttgatgtttcttttctggtttaattttgttgcaaagtgcatcttacctttcaaataattcctttgaatccaaattaaattctatcccaaatgtcgggccatctaaattccacaccaattcaaatcctatttattttaatttccccaatattttctttttctctatttttaccttaattctctttttccatatatttttttctttcttttctattatttctttttttttcttttctctctctcttcttttccttcttcttctcttctcggctaggccgagcccagcttgtgctgcctcgcaccaaacccgtgccgccttgcgcccagctcgtgccagcccacgcatgccacacgctcgcatgcgcacgcacgaggccgatcgaccgacgaatgcccggacgacacctccagcttcccgcctccataactccttcgttcttccactagaaggctcaacaccggaggcaaaaggaccgcaatttcgacctctttcacctcctcaaatccgcccccaactcccgctgactcaatcgtcgtcaccggaggaaaaaatccccgaaaccctagtccggcgccattcacaggagctccaaaattcgtcgtatacgtcgctaatcctctgaaatttaaggtaaaaatggattcttcatgccaagtactccctttcccctctctttccccatccaatccgtccccagaacgtcgccggggccgcctcctgccgtcactgctctgttcggccgccgccggctgcacggcgcgccgtcgctccagaccgccctagcttctgccgtcgccaccctaggactcctctcgcctcagtgaacctcatcaggccaccgcccttcccggagttcgccggagtcgctgccgccatggccgcctccgcctcctgtttctgcccgccaccgccagcctcgccgccgaccacaaaaaggaatcgcctcgacccctagatcgcaaaaccggcgcctccccactcaaaaccggcctcctctgcaaccggcgtcatgggattacggccagttcctgtgcacataacgagaagaacaggaaatcctattttcctgttgaaaaataaatcagaaaaatcttttttcttattctatcaggttgaccatccgtttgacctcacaatcaaaatccgagacctattccaaactcctagaattattccaaatccatccatgtcagtttcgttgcaatccgagcacccgctgtcgcgaccctaattttagccctatggttcgccgtacaccgaaatttcaaaaatccctaaaattatttctttaaaatcctttccacccattgtttcactttgtgatactatttgttttggttatctttttttttatgttatttattgttgtgatgattgttgcgtaaatagaaaacgttggcgttggcccggtagtcggagcgagtgaaatgtccgcgccaggaggagacggtttgtacgactacatcgagcctgaaggttgcaagacatgcacccttctttgaacaaccagtagttagagagttattttggtagcgtacttgtcctttggagtacgatagactgcacgacttttttaaattaattatattgctattattgtattatatattctgttgctgttatggacaccttaaagagccttagattctaacaagcttaggataaaatttgagaaacacttaaagataggttatatgggctttttgggcttgcaatatggtagtattaatagtctaatatacatcatcggggctccgcaggtcacccgcgggtggatgtcctcccccgcccccgtccccgcccatggccggggccccgaccccgactccccgcgggtcgaaatcagtacccacccccacccccgtaggggcaggtccacggccccacgagggaaattgccatccctaagcatagccgatagggcaaacccagctagtatcggctagtattccataccaccttataccgagatatcagcatagatgaaatatataaaattgaaactaatctaacgagcaatgtgaactagcagattgataggaagcttaatatactttaaacggatgagatcttgatataaggggcagatttagatgatccagaaccaaataaggaaacaagacgactaaatcaagtaagatcggctaaaactccgatgctatctctgttagcaatcaaagaaagagctagataaaacgattaaagatagtacttaatagatcgaacctaaccgatgcagcattaagcgtgagaagaaacataagatctaatcaaatcgatgaaaactcattcaagatggtagatacaccgcatagtctagcttgatatcgaagcctaaacctgcctctcgatgatagaggctagccgatgaagtttagatgacgaaaccaatctagactatgcggtatatatgataactcggcggtttacatagacaggattagagtgtcatgaagatgcaagcactaatcccgagaacgcaaacctccataacaagctttacctcttcattggagatcgaacccgatgcagcccaactcgaaagcaataacttgtcgaaacaatgaaaataaaaaagggtgacgatgcgccaaagtattattgaaccgtcgtcccttgattacatggtgtgggtcatatttatattcgaagtacataatatgtccttgctggacatgactcttatctctaacgaaatttaaaatacgaatgagtcccttcaggtggactcttaccaacatatctctaaggaaactgaaaattgtcctaattaatagatacaattgctccgttttaggactccaatcattgcgtggcaatggctatgaagtgcttcgaccaatcccaatgatggacatgggaccatctttcccgagattggttgcatcggcttgactccgtcagatctagcgcttagccgatatgtggcagccgataccgcctatagccgattcatgtggtagccgatgctacttgtaactgatgcgtattctgctttctcgaacggaatttctccaaatcggcttcgactctaactttgaatccggcccatggcattaccaaatttggtcgttaacaaccgcttgtgagcgggtggtacacatgatggagttcatgtgtttggttttatggacctgtttatggtcgtaatggatatatggatatatttatggttatttcttatttaaaattgatataataatcaaccctcttgtgccaataagaatgacatagtttcgcccatccacacgatcgatttgtcgaacctggccgtatattgctccaattgattgaacttatgcaggcctttcgatgtattggccattagctttcaagtgtgtgaagcaaagtgacatggtttatgtttatgtgatttatatatgtgggctcgatgggcccgagagttcagaactgccctatgggcccatcaagttctgggctacccatcgagtaacgaacaatggtaagtggatgcggaggtaggttggtacacacctcggaccggatcactccgagcaatgacccgagcatcctttaacttactaggcagaagggagagatatggagcaatattacgccttgttacttttcagcccggctagctgtgagtatcgtgtgggtaaagctaggcagacgctgcagagtcgtagagtattcgaatacgccgtgctcccaattaatggtgatgtgtctatggatgattccagattatgggcacaagttaaactaaatggttattaattaatatggttaatttatttattgcttgatgttttattcaagttatttataagtgacatttatattaattttatgctcgttattatcgtttaaattaaatattcaatagtgttgtttatatcaaatgtttattaagataggctctatgaaataaatgttaaggttagagtttaaaccttccggctcttaataatgcatgttttatattgcaattattgtatttgctatcataggcatgtcttgctgagtacctgttgtactcataaatgggttcagatcatgaggaggaagatgattgtggagatcctgttgacccgttagagtgggacaattatggtttctaggtcattctatgcccaagcaattcctgtggtggagtctagcagttaataaggctttataggtcatttatgtaatggtttgtatttatgttgtgttgtgaactaagtgacttaagtaatgtataaccgaagcttatgcttttatatcatttcatgcgtaactgaacatcttggacagttacgtattcgtgggggcaccatgactttatcgggtgtccccacaccctcaccgcggtcgccgcgtgcccaccctcgctaccgtcgccagcacgctctcgctgattccaattcacactagcacgggttgggaggtgaggaccagaccctatccattcactcagggatactaaggtaaattcatatttcctaaaaccttttttttattttcttttgtatttctttaacacaaaatgcaggacccaccaaacggctgttagaagtagaggtagacgctgcttcaattttaaaaagtggggtaaaactgcaaaccctaaaaagtgggactaaaacaacaattgggtttgaaagcgggggcatagatgcaattgacccttagtttttttattagtatccgaacaccccatgcgatacctatataatacccgatatgacacgccaaaacttcacacccttagatctaaacaccctctatatgtaaccaatgagatttcccacctgattagaagattttggaggaagatttaaagaacacgaattaggtcccgaacatgaaacttgtcccctagctaaatctcgaagagggagcactcactttcctgctagattttggttagttgcatgattttgttttttctaagggggaccacaaggtttcactattggttagttgcatgatatttttccaatccattggtcaatattttggacgcttcaggggggtctcaacattcatatagcactgtttggaatagacgaaaacctaacttgtgtctttctatgtttagataccggggtgtaaagttttggcgtgtcacatcgaatatacgaataagcatttaaagtattaaacgtagtctaataataaaacaaattacataatccacttgtaaacgccgagatgaatttatcgtagcaccatattgtcaaatcatggtgcaattaggcttaaaagattcgtctcgcaatttacacgtaatctgtgtaattagttatttcttcatacatgtgttcaaacatttgagttattttttcatctatgatgtggtagggtgtaaaattttatcatgggatctaaacagggcctaaatccagaagtatgtgatttgtgggatttgaacgcaatacgtttctctccacacatgtattacattaccatcttagtatgaagcacttaatgtcaatatttaaaatgctatcgttttgatttccattgtcgaaacttaaaatacttatttgcctctctaagacgtgttgggcaccccttattcccaacccttctccctcgttttccacgcgcacgcttttcaaactgctaaatggtgtttttttttaaagtttgtatacgaaagttgtttaaaaaatcaaattaatctatttttttaaaaaaatagctaatacttaattaatcacgtgctaatggatcgcttcgtttttcgtgcgcactattcatgttggggactaggcgtggcgaacacagcctaaatgattttaaataaaaaaaatcatgaattacaaagttgtagatctagctctacaactttgacacatatcatgtgtccatcggaggttatttgaatcgtatatatgaaattctgtgaaatagatcttaaatcttataacaaatattttaaaccctaaatgatctcaaatagaaaattattcagcttaaaaagttttagttctcattgagatatactccctctgtaaaaaaaacaatcatagacatggatgggacattacataggacaacaaatctctggagatgctcagattcattgttctatgtaatgtcccatctatgtataggttgacatttttttttggacggagttagtacaagtttggtataaatttaattagcagactttttatgaaaaagttaggtacaaatacatatttttctaaaatcgatcctcactgtttatatcgtccgtcagtaaagataatgtgttctctcatagatgtcttaagcgcgcttatatcttctgcaagtaaaaataaatgtgatttttactcacggtattatttttagtccatttgaaaaaataaaagaaaagtgtgaaaaattgtgttttttagtgtcggctcactgggaatggtaaacgagttgagcttaggccctgttcttctcatattatcacctcattatttgctctacccttgaaaacaatgttttgcttataccgcttgttttaagctagtattatttaaatctgttttatgaaaatatttaatttatctcaatagttaaatagataatccttcgcaataacccgttgaataatctgaatctaacatggcctaaaaattattgctcgttaggcataacaagccgaaggaaagagtacaccgaaggtccctcgacttgtcattgaattacaaaatcatccttaaaccacaaaacggatacaacgcgtccctcaacttgcaaaaccagtgtagactaggtccctcggcggttttgactccggttttgtccgatgtggcagctgactcagcgtgggtcccacatgtcagcctcttcttccccttctctctctccacctctcttcctctctcatccctaaaccggcgggggaggagtggggagcgaccagcgagggcggagatgggcgcggccggcagccgcctggggaggaactggacgcggcggttgtcgtcgtcgtcggatctggggaggtggatggtgggaggtcccttatcttgccgtcgtcgacagaggaggaggcagtgcggtaggccgaccacgacgtcggtgtcatcgtcgttgatccgctctagctgccggggccgatagatgggagaggagacgacagcggcggaggcggaggcggaggcggatggggaaacggggctcgacgagggagagggcgcaggcataggcgaggagcgcatcccgcctccgctcgagggaggaggggttcgggagcgatggctgctcgacgtcggtgcgcaggtcgtacaccaccgtgaggtcgtcatcggccgcggctgcctcctgctccgagtaggcggaggtgatgtagaggcggagcggacggcctcgtcgcccgtcgccgccgccgcctcatcgcccgttgtcacggtggccgccttgtcgcccgtcacccgtcgcctcgtctcccatcgccactgccggactcccgcttgccgaactgagcagcaaagagagagaaagaaaagaagagggagaaagagaggggaggggaagaaggggctaacatgtgggacccacctgggtcccacgctgagtcagctgccacgtcggacaaaactggagtcaaaaccaccgagggacctagtctacactggttttgtaagttgggggatgtgttgtatccggttttgctgtttaaggacgattttgtaattcgatgacaagttgagggaccttcggtgtactttttcccaagccgaatgatccagggaaactaggaattttttttatttatacatttttttattaacatatttacaaaaataattttttgtttcgaaaatttacaaatctaattgcctgccgcccttaagaagggcgatttttaaaaatcgccctctcaaagggcggcaagggacctaaatacaaaatttttatttgtgttcaaacccttcccaccggttttaattgcttaaaaactaataatgcttattcgatactccaaatgattttaaatggaaaagtgataaactacaaagttatagatctcatcaagatctacaactttatataaagtttatctccatccaatgtcgtttgaaatgtagatctgagattttttaaaatgtgttttatattttgtaacgaatatttggatatctaaaacatcttaaatgaaaaagttattaactacaaagttgtagatctccttgagctctacaattttgatataaagttttatttcatctgactttatataatataattttaaattgtaaaattatagagctaacaagttatgctggaaaatttacatttaggtcccttgccgccctgtggaagggcgatttttaaaaatcgccctcccaaagggcggcaggcgattagatttgtaaattttcgaaacaacaaattatttttgtaaatattttaataaaaaaagtataaataaaaaaaattcgggaaactagcagcccagcagtccacgactacagcccaacatggcccaactgcttccacttctccccaagaccccaacgccattccattccattcgcatcccacggcacattgccgccacacactcttcttccacctcgcatatacgatagcagactataaatcagctataagctgatattaataagataagagagaaaaaaacagactacagacttatagccagctataacacggactctaaaacgttatgtgtatgagaaatgagaccatatgttaatatgttaatgatgtagtaccaatttagtaactactatataaatgggctattagattgactacatatgatttagagctagtagtttgctacactattaaatttgctctaaataatcgctagtcgtagtggttagatcgttgcacgccaacactcgtcaactcacccctcctcctgttgcgtgtgccatgccaacaccgcctaccgactatggcacacgtatgtgccatagtctacgcgtgtcagtctatcgtccacctttcaaatcgaaagcattggtgaaacctgatcgactcatgaacacacttatctacattataaatgagtccgtgggtcgatccacctgcacccttagcacgggggattgagctactctaccccgttgagctcaaggtccacgacttgctctcttcctatgagtaggtgaccggccaattgtttatcgtgcaaggcacaaccccctctcttccccacaccgctcgtctttgctcgccgcaccactcgtcgttgatcacgagctaaacaagccgaatgaagcaagcaaacaagttgaggtgtgccgtattttttagcttgttaggatgaagatgtgaggtagaataagccagactaagccgatatccctatacactattaataattgtccctcatatcgattctcacttccatcactttgtctcataattattttttttctaatacaatgaatattcaaatgtcatattagagttaaaaacatcgtatatttaaaaatgggggtaacactgtaagaaaatctcacattttcacaagtaagaacaaatatatttgaaacaaaaacaaaagtgcgtggaattatcgaaagccattacttattttaatttccaaatttaataagataaatatggccgtgatcgtcagtgttggctattgcaaccgttcatagttgcgcactccctccttccataaaaaaccaatctacggatgtgacacatcctaatactatgaatttgaatatatataggagttattaaaattcttattactaagatgtgtcacatcatagatttgtttttttatagaggaagtaagcttgtatttattttgaaatgctcattgctggaacaaggtttgttgagcatgtcctagttttggatatctgaactattggtaaactgatgagtatctgctaaagtggagtacttaaaaaacaaaatcacacattttaaaaaaataactggaaatattaatcgaaatgatgcaaagttttgaacttaacattaaatggactgttggcgagaatcttgcctagggttcttccggttaaccgacctgggttcgaaactttattccttttatttaaaaaaaaaatctacttaacggcgtcccgtagcggtgcggtagtcacgggacaaatttaatactccctctgtttcgttttatttgacgctgttgactttttagcatatgtttgaccgttcgtcttattcaaaaaaatttgtgaaatatgtaaaactatatgtatacataaaagtatatttaacaatgaatcaaatgatatgaaaaaaattaataaatatttaaattttttaaataaaacgagcggtcaaacatatgttaaaaagtcaacggtgtcaaataaaacgaaacggagggagtatgtccgaaacgttacgccactttccctttcctccacttatctgtcctcaacctttttcccctctactcacagctcgccagcgtccctccactcacagcttgccggcgtgcgccgccgctcccctcgcttcctccaccttcgcacgccggcgctgctgcgccgccgctcccctccattcctccgcctccccatgccggcgctgctgcgccgtcgctcccctccctccctccgcctcccccatgacgacggtgccgcaccgctgctcccatcccttcctccgattctgtccacaggtaccacttagcagcaaccccctctcatgcagcagactcaaaccataggtatgtgattcatcttaatttctaagtttcatttcctatgtcttctcgcatcccaacttttcaacttggctaattcagcttctatctacatttctgttctagggtctacatcaaagttcagtagattttctgattttttatagacgaggccaagggaagccgtgatgggggtggcaagaaaattatatcccgtgatggggtagtcgtatttgatacttgacctgttaaaattaacaggttggttactcctctcatgaaactttttgtttgtggttggaatctattttgtgacatcgagtagtctatatgaaacagacgagttacttgtttttgtgttattcatgcgtagatgagattgtacactgttaacacacatacatcgtgtttccagcaatttttactaggagtaatatctacttttatttttactaggtatcagctagattacagaaggacaataggttctgatggaattgtcgaaatctgccaccaatgtgttttgatttttctggttgatacaggggagggagatgagatgcataaactgcatcttgtcactgtttactagtactggttcaccaaaatttatctgacacaccaatatttttcccagtttacatggcactggggatactagtgtagtataaacatatattttgcacacaacatatacaactctgaagcattgcacaagaggaagctgttaaaatgaagcgataattgtacattatataactttatgtatcgataaatatatattttctggttgataccatgggaggagtggcatctactgattttttttaactaattttgtaacatgtatcactataatctgacattacagtaacaatgattgaaagcggactaattgtcatgttttcctttttttgtttttcgcacacagagtcgatatggctacatgttcagataattcagattctgtacattttgtgcctagtggtccaaggcgctcaccaagggtcaagaaatccaaccaatgtaatgctgaagagcaaaggaggaaatgtgcctcgaaaccttgtaccaagcttaaattcctaccagataaatcaaatgccatttgtggcaacaagaaaaggaagaagatggaaactgaaacgaaggtatcatatttttcaactgtcttctttctatttaagctttttttttactattcctattttcatctaatagtttgctgacaatactaaagaaaattaaattaggtttcagtgcacaatcagaagcaggtcattaccttcagctgctactcgagccgcatgtgcaaaatagcatctcaactttcacctgttcagactcagtttgtgcataatgcttgttttgagaatttactgtcaatgcaagtttgtagtatgtccaaaagcatgacaccgtggcttgtcaatacaatgagaaccaggccaactatgtagtggtaccatcattttttttgtttttaaccatgtgaatatgtgaacaaatgtcaccatgtaatggctactgccatgtcaccatgtgaaatacatcccagcttacctttcgtttgcagcactcaactttttttatgcatgtttgtgtggtacatttttttaaaaaaaatataccacgttttaaaccatgaaatcgaaatgtctataagtatccaggggctggtaccctaaagtgattttttcctcgcatttgaaaggtatcaagggaaaaccaaggtatcaggtctgaacccaactaccaaacatggtacctcacaacataggggtatcagccacacaaatataggtaccagggtctgaatataggtaccagggtctggtgcctggtagcaatccaggtaccaggtctggtacctggtagtacctggcactaggtaccaaaattggtaccggtatcaattctaaagccaggtaccagacatggtacctcacagtatagaggtatccgcctcacaaatataggtactaggtctggtacctcccagaaaacccaggtaccaggtcttaacccagacaccagaccttatacattacaatacattgtcgctataggtttcatgactggcaccacacagtacaggtattagcctcacagtacatctcacatcaaggtaccatgaccacctcaaaagtataagtatcaaacaaaattcaggtatcaggtacattttttctcggcaagtgcaaccacatttgacattttctgaccatacatcacaactgttcggaagctttcaatttagtatcaagcaacatggttcaccaatcagccaaaaagaggaattattacatgaacaagtctcatttagcaaatgtaaaaaaaaaatgaaatgttgtatttttccctcagtgctatctttctcccacaccccttagtgctatatttcttccacacccctgcaaaatgaatgatgaatcaatgaatttacccctcctcatgccgagctgaaacaaatgagaaaaaaaattataagagaccatcttttcacctcatatcaataggtctgggcgcttggtgacattgctttttttttctagcttgtgcgcttggagtagcaagcaatctcatatatgttgtactccttggtgacattggttttttgcataacgattgtagtaatcttgagcctatttttctgaaaagaactccgtaccaacatcagggactgcaggttgagattggaccccctcatcttcagtttctccatcttcatgtccaaactcatcttgtatttcaaactcatcacctgcatcaatttgatcaatgctcatggcacctgtaaacaacccagtttcaagcagtgcttccctcaacacatcatcatcatgacttgatacttgttccattgctctttcaacacaaacatcatccttgtcactatgttgctctttcatacttctttcactaaggacaacattcccctcatttgctacctcttccatcattcttccagcagatccaaccgaggaattcattctcttttctttcagccataaaaaactttttaactaaaattgcatgaataatccacacatttttctagttagtttttcaccccacacataacaagcagaacacaaaccattataccttgaaaaatagagataagctgatacctaactagagaaaaaaaatgatacctaaaaactagagaagctgataccctaaaaactacttgaatagatacctgagtgaggtacgcaaaaggaaatccggcgatggaggtcggcacctgagatggatttttgctgaggactactgcgactaggtgcacgcgctgttgccagcaaggtatcgcgcgcggaggcactggatttaggggaaggagcactcctgcttgttgtagttgaaggcgccgccggcgatgtatcgcgtgcagaggcgcgcgataccgagccgggttttggttgcgggaaggatccttctcgcgctctgcgccgggttctggctggtagttgctgcggcgctccgcgcccccgccgacgaggtatctacgcggaggcggcgagtaggggaatcgcgtgcacaacgttgggctcgatcagaaaaggaatcggtattaaatctgttgggtgctaattttatcccgtgactatcgtgcagtaacggaattccgtggggtagctgccctcttttatttaggctgtgtttagatccaagggtgtaaagttttggcgtgtcacatcggatatacggacacacatttaaagtattaaacgtagactaataaaaaaactaattacagaatccgacagtaaaccgcgagacgaatttattaagactaattaatctatcattagcaaatgtttattgtaccactacattgtcaaattatggagcaaaaaggctcaaaaaatttgtctcgcaaattagttgcaatctgtgcaattagttattttttaacccatatttaatacttcatatatgtgcttaaacgttcgatgtgacaataaaaaattttgggtgggatttaaacaggcccaacgttaaatgggccgttggttgtaaaagattggaaatagagagcggcgtccaatgcagtgactagccgttagggggaccagtctggcaacacgcaggccgtcccgttccgtttcgtttcccctgcccgagagagagagagagagagagatttcaaaattcgaattccctctgctcggctcgtccaaaaaaagcagacggcgtcagtgtggtcgtcggtcgcccccaccctctatataaagcgtcccaccccaactgccccaaccctaacactccactaacgcctcccgacgccgccgccgcctcctcctcttgtttcgccaccgccgccgccgcctacgaggaagaagaaagaagaggaaggagaagatgagggagatcctccacatccagggtgggcaatgcgggaaccagatcggcgccaagttctgggaggtggtgtgcgcggagcacgggatcgacgccaccgggcgctacgacggcgactccgacctgcagctggagcgcgtcaacgtgtactacaatgaggcctcctgcgggcgcttcgtcccgcgcgccgtgctcatggacctggagccgggcaccatggactccgtccgctccggcccctacggccacatcttccgcccggacaacttcgtcttcggccagtccggcgccggcaacaactgggccaagggacactacaccgagggcgccgagctcatcgacgccgtcctcgacgtcgtacgaaaggaggccgagaactgcgactgcctccaaggtaactagtaccctaactatctcagatctgcctctcctcaaatcaaatctgagttcaaatgctgctgctgctgcagggttccaggtttgccactcgcttggcggcggcacggggtccggcatgggcacgctcctcatctccaagatccgggaggagtaccccgaccggatgatgctcaccttctccgtcttcccctcgcccaaggtctccgacaccgtggtggagccctacaacgccaccctctccgtccaccagctcgtcgagaacgccgacgagtgcatggtgctcgacaacgaggccctctacgacatctgcttccgcaccctcaagctcaccaccccaagcttcggcgacctcaaccacctcatctccgccaccatgagcggcgtcacctgctgcctccgcttccccggccagctcaactccgacctccgcaagctcgccgtcaacctcatccccttccctcgcctccacttcttcatggtcggcttcgccccgctcacctcccgcggctcgcagcagtaccgcgccctcaccgtcccggagctcacccagcagatgtgggacgccaagaacatgatgtgcgccgccgacccccgccacggccgctacctcaccgcctccgccatgttccgcggcaagatgtccaccaaggaggtggacgagcagatgctcaacgtccagaacaagaactcctcctacttcgtcgagtggatccccaacaatgtcaagtccaccgtctgcgacatcccccccaccggcctcaagatggcctccaccttcatcggcaactccacctccatccaggagatgttccgccgcgtcagcgagcagttcaccgccatgttccgcaggaaggccttcttgcactggtacacgggcgagggcatggacgagatggagttcaccgaggctgagagcaacatgaacgacctcgtctccgagtaccagcagtaccaggacgccaccgccgacgacgagggtgaatacgaggatgaggaagaagaggctgatctccaggactaattactactctactgcaatatcaatgtccaatctaatggggttcggttcacttcttgtgttgcttaggctatcttctcaagtgttgtcgttcttaattattactcctagctgctactctactctacttgatgtattattattactcagctttgattgatgataggcacaataccctgttgccttgtactcgtaggagtatgtgctgttactgtctaactgatctgtatgaattatcatcctatttttgttaatctatcttctagtaaaatgcagagttgctgcttagagtactctacttggtgtcaactcaacttgtgtttgtttcattccagtgttgcagaatggctgttcatcagtggagagtgctttgtatgtttctttgatactcacacttctctgccactgaccactgggattgtacaggtgagagaactggcatcagggttgtttaacttgttggtatatgctgcttgttacagtacttgttgcaagtgcaaatgctgcattgaggttgaggtcgcctgttccttgtgtccaagactgcgtgtgtgcaagttagatgatgattccagtctgtgtgatcgatcatacagccacttgatcactagtattgtttacttctagtcaaagtaatttggattggctggatggtctgatcggatcttctattcctctgcaagttgaaacagttgatgatgaaaaaatgtttacacaagaggaggacaagccatgcttgcattgcacaccctgggatgcatatgccttgctcaagatctactactactatactacttttcctttttgtgaagtgaagggcaggcatgagggccagcattgcattagcattactgtcacagcttgccttgccggatcatattcatatgactgcatgtgcagcacagtcgatatgcaagttgcccttgcatttcttgggcctgtggatcaatatattcttgctcctgctcctgcagctgcacagttaaaccgtccatcaagctccagcttggagtcgcacaatacaagctgtcatatatgtttgtttgactggtcttatctcaagggattgagatccagtgcggttgctactatcactgcaactttagcagttgcaaggtagctgatggatcaaaaaccagcggctcagatcatcagaaaatactgttcacgaatcactgtagcaattttctactgtagcgtatactgtacagagggtggcagagcaaatccaagctgttggctgcatcgatccaacggtcataatatgctatcactgctaaagttgcagtagttattacaactgcattagatctcaattctatctggagattctaaagtgacacttgattaccttgttcttctttacggtgagccatgtgctcagcacgatcacttgtacagtagtagttgtgatacctagtcctagtttatgctgcatatttttttgagttgcatactttactagtgttttccttaggttatccaatgcgcctctggttactgtcttcaaggatcatccaggttatcaagattcttcattggtaaatgccattttagttttcctctctgcccacccgcctattaaaacattcatccgaatatgacgcgatttagagctctggaaaatgtgttctcactgatataaccaggtttgaagtcctgctttatggaaacaactagggccgagtttagttctaaaatttttcttcaaacttttaacttttccatcacatcaaaactttcctacatacacaaactttcaacttttccgccatatcgttccaattttaaccaatctttcaattttggcgtgaactaaacacaccctaggttgagtagttgtacgtgagtcacacaattgggtcatatgcaatgtaattttcttgttcgagaggtcccataaatagggaagaagagtactctgctcacctgaaaacctgcctgtcttatggtgatacaccatcagcattcaaccatatttacatgttcggatagtcggatacccacatccatccatcagttggccaaggccaagccaaatcccacacttctgcttcggcttgtatgtactactagtagcttaacttcacctttgcaatcctccactgcttttcacctttccttcctgtgcagttcaatcggcgcaagcgagcatgtttcagttcacaagacaggatagagagttgagaactgttttgatctggctttctagacggttttgcctgccacaagctatacactggcattcactgaaactgcaagatagtattagtatctcttaaccccacaaactagcctgattcttcaatcaatgggctgctcaaagtcgacagcgccggtcactggagcggcccatctatttcctatcaactttgccgttgcctgcgtacatcccgttggatatgtattggccaggttcatcccattttctgaaaaaaaaaagggatcaactttgccgcaatggcatgtgtgtccagaaggtagaaaccagccatatgaagtactacttgcgagcaaacacctggctgcatttgcaacccattatatttctgcgtggagtacaaaaattgcatctctccctgctgattggtagtacaaaattgaacaggctcgaaaataacaacgaatatctcttgttagttgtaactcccatcttacaccatgtaacttcaaaggcacgatgccaccttttgaagcatggatagcatcatgaggttagcaatacatatttacacatgagacatttgcaaaatgtaaaccacatatagaaagccgagcaaattccttctgagatcagtttactgtaaccagctgtaccttgccaatcttattgtgatattttcaagttcccaccaaacctgccagccacatcatgtaaggtcaagattcagctcaagagcacacaccctttggcttcactcaaaattaccagttcatcagagcaccattagcactgaagctatatgcccgccgcccacatgaatttcaacaatgaaaatccaagagtacaatgttccatctataaagaactgcttttcaactaagccacaaagtcacgactacttgatggttcacgaaatctgagctatctgatgcattttctctaaaaatatgtcaaacatctcttccattgagttaaattacctacaaggatgctaagttaagcatcccgagtgagggcttgacatcaacctcacttgattcatgtcgatccaatgatgctaagttaagcatcccgagtgagggcttaacatcaacctcacttgattcatgttgatccactgcagtgtaagatacatatcctggattgacatgctcactagacagagtgctgccattcctgatggtagactgggaattagggtaaggtgcaatgatcttaggtgtcctgtttggccagtatacatcgctgtaaaagcttgcaacaactacctggaagagtataaaaatgtatgtgaattgtggcctgttgttaccatgatatgtggtactaaaaactgattgagcatatccctgtctcaaaaatttgaagatacctggacaggtgttgcagctttgagaggtccagtgataacaccaccaatcacagaactatcgccagaagcaagggttacacgcaagcatccttggtcatttggtgtcaaaatggatccgaacaaacgaattatttccaaaggaccctgcaaaaattgaatgagagttttggtatcaactttgtcacagtaacttagctaaataagcaacaacgttattcgtttgattggttacagattatttaattttaagtttgatgttgtacttatgtaactctgtaactttatctgtttgcttttataaaagtaactgacctggcagtaagtttaataatacaaaaagctcaatttgaggaaaaacatccttctacatttgcggttttttattttagtttggaacacatgccagcaattccacccctgcacatggatgggatcaaattcaaggccgccatctcaaacactggcactcctacattccaccctttgagttaatccaggccaagaactggaatgccccctcaccgcttcgataattatttaaaaatcacttgaacatacacttgacatttatatatttggaatactatgttatctaaatggggggagggggagtgttaaactttgagcagtgtttccctccccatatgccatatggaaataaaagctgaaccttgtgatatgaagtaacaccggatgataggagcagagttgcttcctgaacagctccaagcactgaaagaacacagatcaccctcccatttgactttgacagtgccgtaatcttcggtatgatttcctgcatggtcatttcagaagaataaaatcgcttgccacattttgattagagaaaacatagtaagtagccatacatcatctgcaccaaaagaagcattatgcatacaccactctgccttttttatgatcagttctgcagttgcatatttgagaaaactataaacaaaaaaaaaatctcttcttggagcggcatgaaaaatgttgtgaaagtttgcatatggatcttttagcaaagaatgtggtgggcagaaacactaaaagaagttttctattttctgcttcagtgaattttctacagatatgggtcgatttggtggtggacaaaatccacacttttttgcaggatatgtagagctattcccaatctgttgaaaccatgtttttgtgacatccctatcgaattgcagttaaggtttgaaacaccggttttcactgaaattatcaatcatatctaaatacgaaatcaaatgtaatttagaaggcagtcaccgggtgtatttgtagtacgttgatcctaatcctagtcggtgatccttaattcctaagctgtgggtcgttgagcgagcaaaaagagggggccaaccatgaacagcagcggtagcagaggcacatcacaatctatatagcagagagagagaaatagatacctctcctgcatcaatttggagaaggtggggctggaggccaccgaattgcccctgccctgtccacaccacacaagaagcaaaaaaatcagcacatgcacaagtgaagagttagagttggaaagtacgggattgagcaccgtgaggcgcaggcagcgtggggggttgaggttgcggtggcggtggcggcggcagcggggcgaagaagcccggcggcgcagtgaggcggtcgcagttgcggggacgaccccggcgtcgcttctcgggtggtggtaggaggggcggtaggagcgagggaggaacggcggggaggggaggcggaggcggatcggagagctgcggcggcggggcgaggcgggttttcatggccaacacaaagggcgacgggccccgcaggttgcggtaggcggtcgactcgtccattgccttcgcccttcgcccccccggtcggtcggaaccctagctcactgcggcggcggcggcggcgatggtgaggtgaaaaatgaaatgaaatgtggcagcagatgggaaggaagggctgcgctcatttcctttcccattttgtttgggaactccattttgtactggactgagttagtgactggatcactataattataattatattttaattaattaattaccaccagttgcttgctgctacagcacctaccttttgctactgctgcttcttctgggcaaaaccagcatcatcactagttttagtgcagtaccagtactaagattttattttaacctgacaaatataaaaagaaagaggactactggttacaaagaaagaatgcattcatcacttcacttcactgaggatgaagaggaggagcaactagtgtgaagaccagtccgaagcaaaaaaacgatttattagtacttaattaattaaagtgttcgaaacaacacactatttagaatccggggaacatgctcatagaagagagccctatatgttaatggagcataagcataactagataaaagcgtagataaatgcaaaacaagttgagattcgagtggagcctaagcataacacacaggaatgttccttcaacaactaaagattgtgccagctttggtttaacgccaaattcaattcatgatgaaccagaaataacccctcgcaatgtagaggccaggctttaatttcttttttttaaaaaaaaaaaggaaaaaacacttcactgacggccaaggtccattatctttctcagaatgatgctgcagcatatgcattgagcacccaaaaccacaatctcccaactcctagtctctaccattttctcctgtacgtcctaaatttggaaccagaattacaatacgccattggtatactgtccagttcttcctcaccaaccattcaatcagaacctcctctttccaaaaacaagcatagcctcccccattcatcacaaaatatataaagaaaatggaacatgcactattagcccgataagagtaaaacagaaacatctagtagtacggactagtagtgtctttctacttaaaaagcctaaaatttgcacttgcagtcaacccataggattctgcaatgcaacaaacataaatgaacagccaagatcctgacaaaaagttcagcactgacttaactcgtagctagtgtggcctaatgccctaatccatccatccccaccaccaccatttgatcggagtatccattgatgcaccaagctcaaactcaagaattataatatgttggctacttagtagtacacaaacaaaaccagcactatacataattggcactggcacatcattccacaatgcctaaagagtactccactccactagattactccataaaactgccagttccaacgcgcttcatcagttcaaaacttcaaaatgcaatggcatctgcaacgacaatatagcattcaaaactgcaatgcacaatcacaacaaactccaaagatgaaagcaggctaaaattttcaagtggccagctgtttccctttatttatgtcctctctcatggaacctgccattgccctctactactaactacagaattccttccttctatctggcaattcaacaatgatatattgccttgctactgatctgctaaaagctacaaagagataagaaaaaaccctacacgcaccttccatctttatgaacagcataaaagtgcttcttttatcacaacaaaaaatatggacatgaaacccaaatatgactcataatgttgcacaccatgaccatgagaacacagttgttcacaatacctacactcttcccatgggagagaagggtgggtcgagcacaactggtctgggtggcttctcacttctcttctttgttttcctcttctcttctgccgtgactgcctcgatcagctggctcacttcctcctcgagcagcatcttaagtgaactggagtagagcttgtgcttgcccttctcaatacttacggctgtcgaagcttccgaacagtgcagcagagaaatgcaggttgagaaggcttgcattgctgataaccgcgcgtgaaaatgcaccaataactgtcctttctcgttgcccttaatggaaagggcagggagctcttctttgccaccctgttcgaagaatatgacaacttgttcatttttggactaagatcaatacatggatgaaaacagagatgaatcgtcgatatactgaataagcctagatacgtcactgacaatggttttaagggtcaaatgtctgtcttgtttccttgatcttcaaaataagcctcaaggctatcgattttcttcctataaactcataggcattactaaagcgagccatatggttaacatatatgattttatagctcacaacgaaaacaaaagattactacactaaagaaaaagtgggtctaagggcagttctctaggaggagcaaatctaacacttggaaaatttgatcaatctttcttaaaagaagttctcgatcagccttgggttatctttggagagttagcaggaaggcaaccaagtatcttagaaaccagagcatgcatagcccaaagtgatttcacacaaaaaataaagataggagaagtgaagtgtaccagaacaaagagttccataggattctcgccttcctttgtgacagaattggcccagttattatcatatgcattgccaaggacagcaatgggacaagccatgtcccatccaccgcagtcgcagcctccaccgtacctccatctatccagcaaaggtgatggactggtttcatcatcgtttggtaacccatgcagcccactcggtgtaatcacttttacagtaccaggtgacaaaccactcttaagttctttggacttgcttctattaaatggaacttggatgaccgttgctgcaatctccaaatgaggataaagatcttcttcagaccacggacaagatgttgatacatcagagttatttcttgcactgttttgctggtccatcagattaatcctctggggacagtcaccagaggctgatttctcgacggcacttgacaatgtcgattgagtagtctctgtacattgagttttctcctcagcagaaaagctctgtcttgcatgagcgatatcatacaaaacaaactcagtgatgacagagttagtcagaacaccatcttttccaacttcagagcacaagtacgaagaagcttgcatctggcctacaatcggcggtgaacaccaacgtccatctttggaggcccttccagtagcacttgctcgttttccaccactgtggaaagtgtaaatccagttcaagtcattccctgttttccaactcctagcagaaatggattcttcagggcccttgacacagaactcaaaaactggaataccattcttggtatccaatttaagaaccgcctgaagatgagcaggtgatagagcattagttgtatgctgcctttctccattcagctggcaattaattgattggctttgttcactccttgataaatcactcagcaatgatttgcgggatacacaatttttcctgttaaccggcatagtaacatggttggagtcttccatgagagatggacttctaatagatttggacttcataatagggtccagaatcttcttgaaggggcttgatcgaactttagtgctgttctctatgccatgacgaacactttctgatggacgggtgccatcagagatgctcaccttggccgacatggactcaggcaaactgtttgttgaattcctctctctctgactacaattattctcactgggacatacactgatcttgttttgcaggcagtttgcttctgtacctttacttgactctccacctatcaactgaggagctgcatttctgcagggacctttggtcatctcttcctcaagtgagatctccaagaaaccatcgcctgcatcatttttcaacagggtgcaatccatgcgtggacggtccagcctacaattctcatcaggaagctcacggaatgaaagatccaggaagtccctcgatgctcgatgaattctacgagattccacagaagacttagcttctgagcggcgattctgatgcgagaaaaggtaagctccacttgtgctaggctgggaggatgaatcaacaatctcaaatgacagaaatgcatccccgtcaagtgcagaatctattttcttcctcctgccttcgtggagttttcttatcatgctaatttcactagagctctggtacatagaaccacgctttcccacaatactatcctccgcattggtcttgcggcttcttgtgggcaagctcttgcagtggaaatttgggatgctctctacgcgtagctctcccaggttgccatctgagcatttcaactggtggtgtcttgtgtcccgatagccattttctccgatggtgcggcgaggggatcgcatgatttcaggagctgctcctgaccgagaacggctgtcgcatttggaggcaacatcttgcctcattgctgaaacctaacatgtggacacaaggtgaaagattaagctccacaatttgtactagtcgaacagaataaatggaacgaaatgcactgcaactagatgaacaaaaggacgcaaatggtgttaaatcctctaaaatcctgacctcacaagaagaaacataagtcaggtatgtgcatcttaagtcaaaaagaagaggagaatgggaaaaagaaaaagaaaaggcgatctgaattggggaaaaaaatagatgagaagcacatgtcacatcgctttgttctcgtgggaggcaaaagagaataccataccaacaaagggaaaggaaaagcgaactaagaagatgatgagcccctaccaactctagatgcttccattctatatgctccagataggaaatttttatatctccgttcagaataacaaacgaggcaaatggataacagatctcaagaaacaaacaagagaaatagttggcaacctaaaatggtgaaaattgaacaagacacctaaaagcaaggggttttggttgttgaggcaaactggagaaattattcagccggaaatgaagaatcttttgtttctgcaacaagcgaagattcttcgccgtagacgaactagccacattcattcagcccgaaaaaatcgcatcttaagataccgaaacagtagcattaccgcatcagccgccaacccaaggtgaatccaaaggtaggatcaagaagatgaacttacctttacctgcagggcggaagtcggctggaagcggagagggtgagagagagtgggagatcaagaggctttttcccaggaagtggaaggggagcaagaggaggaggaggaggacattgaattgggggagcaggaggttccctcacactcaatactcctccactaaaatgctcttggcggctacttgtatcatcactaatctaatgtatgcatgcttgtctctcactctttcttgcttgtgttgtgtgcgcttttggtcgaggaggaagccaaagcgaaatgagggagaactggagaagggacaggcaactaaagaggaaaagactagtactagtaggagtaaattataataacaatagtagtaaataataataaacagtaaaaaagtagtcgtaggtggcggtaggggttaattaggtcctaatcccctactgtctcgagggatctctacctcccgctgctaatctattagtactaatcatcattaatcaaatgcgttctctgttcttggccttgccactcgcagcacgtatttaccctgttttttttgagtgattgtgaggatgagagtaaggtaattggggtgatttaccatgtaattctccattacaagatacaaaaacttttagattttgaatatacagtactaattcttaccaatttttttatatctctattcataatcacatatgttgaaggctaaaatttattatattttagagtaggtataatagcaggttataagccagctgcaaacatattttaagaagataaataaggagagagaagagcagcgagttatagatttgtagccagctgtagcacggactccaaggcgcggtatgtgtatgactggcgggaccaggtattaatagtgtagtatgtaactattgtatggataagctattagattggctatagatgaattagagctagtagttggctatactattaaacttgctcttaggggctcatcttttcgcttatacttatcagccaaaatataatttttcaacattaaatttggagctgattctgaggtttttcatcgaaatttatttttcaatctttgtttttaaatcaataagaacatgtatataaaagttctttttataaattatttttcgtttgtaaatatgccatttcgcaaataagggaagcgatggctctgttagaatgaagcgacggagggagtagtgtttgaatggtcatttgaagcaatctgaatcatttactgcctccgtccccaaatataacaacttgtagccattaggatttgttccaaaatataacaacttctccaccaacattcttttcccaaccaatcacaaccctccaccattcactttttccacctaccttcactattcatcccatcacaaccctccaccacttacttctacctactatcttaataaccgtgtccaactctaaaacttcttatattttgggacggagggagtaccattttaccccgcatgccctgttggagtaatgggttgccgacgcgacaacgagggagaagatgaaggaagggaccgctactgagggtgtgttcgctgctgatggatgggaacctatcacccaagcacggaaaaaggagtagttcattagcgcgtgattaattaattattatctaattttttttcaaaaatggatcaatatgattttttaagcaactttcatatagtaactttttataaaaacgcaccgtttagcagtttcaaaaacatacgcgcgaaatacgatggagaagggttggaaacccttggtaccgaacacaccctcgttgttggttgccttcccttcattcatcttctccttgttggtcgctacagtgcggtgccgggccccgggtcgaaatgaatggggttgccatatgacatattgacatgcatgctttgtgtagtcctgttggttgcaacttcaaacttgatggctcacgtacccatcaccaacaataataataatgctgggcctaactaaggttagttataagtactactactactactccagttcagatggaaatgaggaaatctccatctcttttgtcaataataatactgggcctaactaagctcaccagcaaggttctgtctgtcagactctgtttgccaacacaacatcagcaccagcatagtactacaagtactagtacttaattaaactgaacagggtaagggtaatggcatggcaggtgtcctatacttctaatactcctgctggcttctatactttcttctgctcatctgtctcttgctgatgtactcctactacgagtccaatcttttcactactggagtagtagctgcatcaaacaaacaaaggaacgccgtgaccaccccgacagcgatgatcgattcacattcagggcgccactgcttacgtttcgttacctaaattttggtcactacaccacgtcgggttgccaatcatttctctccccttttcccctgcatcaccacacatctctaattattaggcctgcctgcctgcctgcccgcctaatcttcttgttactaggagtaagtaatgaaaaccatcttgtccatcagtgattatagtattattatcagaagatctgtcatgttgttgtcgttgtttagcgttggcaacctgctctctttcatgaaaaagatgcagtgctataagcatcgagagcctagggcagtagcagtacgctaccaaattttgccaaacctcatataccacctagataaaaaaaaagagtaaatttcactttggtctagttcttttgatccaagtttcacaaagaaccagggctaacacaaagttttcacttaacaccatatgtttttgcatttgattgcactttggactaggctagcaatttgaactggcccatctacacaagcaggcagaactgcagctgctagccatcttcttgccttggttgtgcgctgtcgtcgcctccgccaaagccaagccacagccatcgccaaggctacggtacctcaacccagccaccacatcacgtccttgttggatcaatgacccagctaccaccatcaacatctctttgtctggatccaacgtctccacgtccgcgacccattcaagaccgtcgccgatctctctgttctgtgaccggtgaccccaacaatctccaagcacattcttgtcgtccgagatcattgcttctcccacttgccgcaccttctcggctgtgatgcacgtgcagagctcacccacatccttgttacttggcggtggccggatcagcaatgctggtgcccaagaagagaggttgttgcctgctaacgtggatgggccacagccaacatcctatcccaaatcaccaacccctagtccaaagtgcaatctagtgcaaaattatatggtgttaagtgaaaacctaatgttaggcctggtccattgtgaaactctggtaaaaagaactggtccaaagcgaaatttactcttaaaaaaatggtgttagatacatgctctattggagatcctaccaatctctctcctccactctctctcatctctatgttttccctgatagaggaagcgaggcaactcgttcggcgagcccgagcggagcggtgatggtgccagcgtcgggaagggctccacctctcctcctccaaccggcggccttcatcccttggcaggttcggtggctagtgggagcagggcatagcacaaacaggagctcggcgacatgcgaacggggggcggatttggtggtgcggccctctccatcaagctgccgctgctatggtctgaggtggaatggaacaacgatgaaaacaaggttagttgccagatctattgcgccctatgccaccatcgcttcctcgtcgagctcgctagatctggcctcgggtttgtcggatctggcgaacgacatcgctttgggggcaacaaagatgctcagggtggtagcttcattaacgaccgccaggccttgcacggggtgtgggggtgtcgcacggggccataccctctcccaacgcgccactcacatcgcgccttaccccacacctaccaaattctgacaaagaatgcttagcttagtttggctctgtggtctttagttggaaaacagcagacgtgtgcgtggcgacagatctacgacattgatggtcaaggctgaatgccacctccgcgcactgtgaacacccttacactatctccatcaatttgtacaaccatgtccaaaatataactacctcttatagatgttttggattttaaatagatttatgcatatatatggtttatatatgtgtgttcatatttatatatacggtagtacggtggggtaaaaagaccaaaacatcttataatatgaaatgaagatcttataatataaaatggagagagtacctaataaataatatctcatcatgtatgagatagctaatccctccgtttcaggttataagatgtcttgactttgatcaaagtcaaactgctttaactttgatcaagtttatagaaaaaagtagtaacattatcagcccaagacaaatttattatgaaaatatattcaattattgaattgatggcactaatttagtattataaatattactatattttcctataaacttagtcaaacttaaaacagtttgactttaaccaaagtcaaaatgtcttataacctaaatcggagggagtatattttaggaccataaaagaggaaggactaaacgacaactctcttcatgtcaaagcccttccaccagctactgtattctgtttggcaataacaacataacagtacgtaatgtcaaatctttacatacgggctgatacggctcgtcaaaatcttttctacatatatacacacatctaggaactattcaccatatctctctacatccgtaacacgcatgcttcctccagcaaactaggctacgtaaggtcaccgcatctgatcgcttaatcaattttacattggatgatgaaatcctagctctcgtactggagtacatccatgtaccaaaatggacctgcgaatgggatggcaaatatgcagccagggtacatatgcacaccatcgatttataccttgcttgatattgaaccaacaaggcctttattgctttgcaatgacatgtactagtatagccttcataattccgcacctttgctcaatcaatttttgcttgttcgcttttggagctaggccacccgttgtctgaacatcgcatgctgccactgtcttggtcctttgtcttggcggctagtcgattgtgaaccaaattttgcaccgacatcacatcctgcgtgctgtcatggagctgcttgcacagctcgtctagagctagcatggggaatggctcctcaataagaacaccaacctgaaatgtgagtatgtgctactgggttagtggtagtacaatacaggtagggaatggggaaatgggaacagctgctgaagcaagattatcaagtttctggtgaaacacaatgaagaaaaacagactacattctttaagaatcctctcctctcaagcatcaaagctaaacaagtaccctaaacattttgacacaataaagtagtaagaaacatattcactaagatctcgtgtggttgaagacaagcagaggttggctaattgctgagcaatatacactgagtttcccaaaattaggacaacccgattctcaaccacctgcagctgcctttccatgttactccaaagacaaaccacatatgtgtagttatgactaattttagactgataaaaagacgagcataagcaaaaccaggcaagactatattgataaatgcatcctaaaaccacactaaaactaatcctgtaaccaggttctagaaggggcagccatcactgttttgaaatgcaccaatgtcttcaaaaccatggccaattgctgcctgcagctggtagctaccaaggcacaattttgaacagttttaaatggaagcacaacttggggttgaaaaataagttgagacttacttcctcaatgcagaatagagaggcagcactgataaaagtagctggaacgactatccatttacattcatcccagagtatcactggaagcgtgagatgccacagaacaagaaatctggaagtgagtctagtgtatgagagaggaataggaatcccaatgagctgctcacaaacactaattccttcaagaaaacaagatagtttagactcctacaatcaagaaaagtaaacagcattagattgtaccattatggattactagacttgaagtaagtctagcgtttgcagatcaacgggtggtaactctcacaagacaatgaagataacaataagtaaatacacctaaagtaagattgaacattggatcaatgcacaatggatggtatcagtggcccaagacaaaaaaaaaatgatgttgagttatgttacaggtaattggcaagacaagaaatctgcaggtagagatagaagagttaccaacttaccatgatattccgcttattttcatcgaaatccaacatatagaggctctgtgaaatgaactcaataatacagcgaggacgatgttttgatctgagaacaacattcaagtcatcttctgagagcaaaccctgaaggtccctttttatgtccgaatggcagattatatgacactgaggcaagaacacgaatgatatcatcagttgccgcgctagtgagtgaaagctaactaaatcaggcataattgcatgaaaacaaacgctggtctatgttttcagagactagtgaaaggtaactgcatgaaatataatttcagagagtgaagttaccaaattgaatcactggtagtatacagtagaaaaataaataaataaatacagaattaaatatataaaaaaaaaacatatgcaagagcaaaaccttgagcgcgagcgggaaggcgagaatgtagttgaggagggcgcgcgtggcaggggggttgtggtggcgcatggccatcccggcgaggtcggcggcggcggcgatgacgcgcatccatgccttgcgtccctcgtcgaagcgggcgtaggaggcctcggtgcggaagacgaggaggagggcgagggcgggggcggtgagctggtaggggagggaggaggcggtgagggcgtaggcggggaggagggtgttgtaggtggcaatggcggcggcgaaggcggtgaaggcggaaacggggggcgcgagggagaggatgacgcgggaggtgagggaggagaggaggtggcgcaggtggcggcgggagctgcggtgctcccgccagtcggcgtgggtgtagagcgggcggcggtcgcggatgcggcgctcggagacggcgtcggcccagtcgggcacggcggagaggagggagaggagcgggttggtgttgctgttggtgtcgggggctttgggcgggtcgcggaagcagcgggcgacgtgggtggtggttggcttgggcggttgccggtggatggagggtatgggcctgggcggcgccgccatggccggcctcctcggcgtcggcgaaagacggcggcgcgcgcggtggttggtcaagccattaattggcgtttggtttgtggcggaggaacggatggggctttcgccaatttgccttcctttttcttcttttaccggagccatctggatgactgacacgtggaggcactttccagggcacatgtaacaagcgattgtttcgcttttttagacccaacaaaaaattaaagacgtaatacaagtttaaaaagaaaacactattatttctttttttggtctagttttggtacattagtaatacagaaaattcgagatcccatcccacactagctgatttttatatattcttcgttcattcgtcccttttctggcaatcatatactcccaaatcatattttctatcttttcaaataaattggatataaagaaaagcttcaactcaaggattttccgacgtgccagagaagatataacattacaaatatctcaagtactgtccttccgttgataattttagtatcagtttttgcacgagtttgtttcatacaaaagtttgaacaaaatatggctgaaatagccatcacaaatgcatatgaatcatagcataggcgcatacatataagtctataccagagaaagtctcatgaaatccataagatgcaacttaacgtatgactatatacatgttccttcaacaatttagacctacctatatgtatgtaggtctttttatcctcagattactgacaaaacgtgagatattttttttaagaaaaattagtttcaggtttggggaattccaaatcaccctttttgaggctttttttttaggaaagtaagtttaagattttccgcagctacagctacaacagttgcgtgatttggaaaatggggaattccacagggtttctgagacattcgtcgccgccgcgcgcattggcgaggcggagagagagtgagagtgaggaggagtttgggtgatctctcccccgtcgctagggcattcgcttcctccctccttaagcacgcacggtgagtcgatcgctcctcttctactcgcagtccgatttccgtttgatatttcgattcgatgcgacagttatctgggcgtctaaactaatcgaacgaccccaacgcgtgggagattccaagcagcttgatttgtttggtccctccctgtggatcttgttgtatcgcactgcccaataaacattatctgtcacggttttacatcatgcgattagctgtgttgccatcctttcatgtgtctattttcaggtatatgtatttttctgctccacatatacttcaggatttgttttttaattacccttgtttttatacatcaggagttcaggactatgtagtaccagtggtaatactagtaatcataactcaagaaccctgtaggccatgttcggttaatccccatgagaaaaggattggaggggatttgttccacacctattgtagaatggaattattcactctcaatcccctccaatcctcttcaatcccttccgaaccgaacaaggccttagtgtcagaatcttctcttctttgccaactcctatttacatcttctttgccaactcctatttacatgatcatttcagccaagctgtccattatctaatatttagtcagcaaaatcaaaacaagttaggaacagagtatagaacatttatcagcacaccaattggggtagtcagctcaacagttcaactgacatcactttgatgcgtaagatcatatgctgaatattgatgaactttatgttggtcagataaacaagcaataaatttttggcacctaactatcttcaagaacaccactttgtttattttgtctgtagtgcagtagtcttttaaaaggataaaaataaagtctaagcttaaactcttagcaccagtgttttctggggcacatttctgggacaatcagtaactcgaattacaaagatatcctagtggatcaggatgattcaaagaccagaagtaaaattgtatacctgcattcgccatatgtcaatctatcactatggttgctcaagcaggaaaaaaaaactaagttccatctgaaatatcacattctttcattctttgattagttatatatgctaagaggacacatgcgcgcctttctgaaaacgtatccttcgatttttcacacacaactgtacactgttacacacttatacacacaataacaagaattcacacaaggattggaaggacaacataagattctttagtcagctgcataatattgtacagaactatcaccttccaactctgttaaatctatctgcagtgcatggatgaggagtctgtggcattatgcatttatgctgcactggcatctttcagtgtcaggaagatcctactgttcttaggctcccaagatgtatcaatcaaactaacaagcagtaaaatcacacaatacttgtctggtccactggtcctcttgattctgtcatgcggacagcttactgtcatcaacataacttctacttatgagtcatgactctacccattctatatccattctacaaatagcagagaaaaataccagcagtgactaaattgaagcttcaaatcaacaaatcattagcgacctcttctaatagttcatctagtatgaactcccatgtatcaacaataatctcttcactttccaattgaagattcatccaagtgccatcttccagatctatgttaactagctggttcaatgttcttggaaattgattatggagatgtctctcgatatgcttatttatttcttggatgaggttctctcccattggaggtggctgtatcttgtgcatgagaaaagataagcaaggagggtttctaaaatatgtctcctggattattgttatagcttcacagatacaatcaaaagggagctttagatcatctgtttgattgccttggtgtagttcttcaatcatgcaagggctgatcaattcatcttctagataccacacctctagattttggtatgtgcatagttctgatagctccagcattgcctttatgtaacttagcctggcatcctcgtcctcccagaagacccattggtctgatatagcatctggtatgtggggcctcatcatatcttgatgcatctcacctgtggataattgcaagaccaaaatacatcacctttagattagaacacatattttcttaaggtcaaaaggaaatgtaattttgatatgtttagatgagaagatacattttatcatagtttcatggtcaggactgtcaacatcttcacagaagaatggatcaaggacagatacagggctgggttgctcttgcttttcgtggttcccttcgggtgaaatttgtgatataagttcaagtgatgcacttgatctgggagtttttggctcttggtgttctaggctctcaaccacattctcaggatagctcagcaacatccctgcatgctctctgccaggttcggctccttcaatcagttcctgcagtgtagataaacacattataactcaaaacaacaatggagaccagatggaatatcactaagtattggtgtgaacatactagtgatgaggtacatgtacactgctcttttagggtgatcccttcactgcaaatcgtttcggagcaagccggcttgtcgatttcttcaatatgcataatgtcacctgcaaatattcctttgtgcttagagaagagccacgtaatatttgataattttaatgactatggtattatgtactcaccatcttgtgcagtttcttgtttcatggagtgtctatcctgatcagccttaccatctagtacttcactattaccacatgcaacactccctgaatcttcgtcagacagatctctttcttttgcatattctgtcctctcatcctgttgaatggcagaaatatttatctcttcgggtgaaaggtcaatgcggccttttaacctggggctactcctaggtgatgatgcgttgcgttgagggagggaaagcattcctatcaaggactttgaggtatgaactgttggatgcttggttgtatgactgttatactctagaatgtctgtcagatgtttcttcgcctcttcatagaagatggatgtatcctttgatgtaattatgtctccgttaatttcacctagtccatcattcctttgcttttgcttaccactggtcaaaggtctcaaattgtccttatctgactgtttagaatcctttctgactttaaagactgaatcattgatcctttgtgaatctctttgtaaatcatcttcatacactgatggtcttcctcttctagtatcaccagtcacaattttgaatctcctcctgacttccttaattgaaaatttagaactctctgttgcagggtattttggagattgaattgtgcatgattgctgatctaaacatgtagaggctgtagctacagtagtatcgatccctcttggatttggctttagtataactattttgttaaccatcttactactattagttccttctgatgtacccttcataattgatttatctttcctccagaaaaagatattcctgccctctttactatgtgttttgatggctacctcgtgctgttttgaattcttagtattttcacctttttcaagaattttccttggctctaacttggtcactacctgtctgttttgattattttgggtgttctccttctccaaagtatgcggactcggtttctgaagtgtcttcaagaaaagttccttctctgggcttagcatatctggtgcatctactagtttgttagattgataagatctgctgttacaaatatatttttcatagaaatgctccctttgcccccagtctggagattcctcataagcacgttgacagggcacactcttcaactcactaagctttgtatggatatgtgacttcaattctggacacagttcactcttatttttgcaatcatcatggtacccatagagttctcccacaaaatctgctaaagaaagttcaagatcatcttcttctgcctgtttcatggatttggaaccacttggatccagcaaaccagacggagaagccatggctgtgcttgtgctgtgacttttggctctgttttgtttggtgctctgcattgaacttttttccagacagacatcatgtcccaggtcagctaatattctttgaacctcttccttgggaatctttttcacctgttttaccttacccagctcgtcctccatgagtcttttgacggtttgtttccttgtgtcgcattcctctatgttctgagaaatataagaacaatacacttattccaagaagtaatctttaacatgcatcaaaagaaataggtagtactgtctacatgataaacataagcttgatggaaagctatatcagttaaaactatttgatgtttaccatgccaacatacacttgaagcaaatctggttttagaactcacccaacagattacaatgtaaagattgctagtactgtctactcaaattttttcttctctgctggttaatgcagaatgcttgaatcaagtccctttcatcaaagaaggaataatggttgctaaatccaagcctacacatgataagtaggcaaaaagaagtatatgtgggatcattttgtcatgcttttttttttaagtttattgttccacaacttgcattaagctaaactttcccgtgcatgttttcgaagcagtaccaagttcatatgttgcatttggattttggacgacttcttttctccatacttgctctagatatgttctggctctgaagaaaacacttagcatgaaggaattgactgccattaacatcaatatggcactttcagttccattcatcaaaattattttgttacacaagtaactgaatagtcaagtatggttaggatcactagacttctgttgcatattcgtggtgttaacaaaagcagacaacagcaaccaccagcatgagcatctatgctttttaccattaaaattacatacttactaaaataacttacatcctccccatattcatctgtttcttcaaagtccctggatttctttcttgagtgcctcctacctgcgaccatgcagagttgtaagaagatatacaaattatgataactaaatatttttcttgaatgccttcatatttgccagatgattccgaaatgtagattagagggatttattgacagtctatgacatcagaaaaatgtttactgaaggtcaaatatcatagattgattgtattgccatgcaggtgctgcattacttatattgctgcacatagttgacacaatttcacaaactgcttagtaatggtaatcaaacaaacgagaagcaaaattgtcgactttcatatttactgacagtaatcagtttttttttctggagataataataagaatgctttacatattctgttttcagtctcttgtatagcagatgaccacaatgcatattaaatttcaaaaccatatcctcagagttctaccagcaaagtaagtggctcagatcatgatcacgatcctatttgcattgtcatcatgttcatcaggtattacattttactttaaccatgaacctggagagaattacctgaaagcccaccgaaagtgtgccttctgcttccttgcttcctgtccaacagaaacttagcgtcacgtcggaaatagagcatgccgatgaggccccacatgcagcctatgttctcctgacgcctagccagtctttgacttctcttccccatgttagttggcttgttcctctacactttgcaattgaaatatgcctgatgttctctgcagtttagttcattgagctaatcctcttgcagcaggtttggttcctgagagaaactctgcagttagctgatgaacacttaggattcatcccgatgaaccatgcaagccaagaatgaaagaacaaaagaaatgagattttgcaggagcaagagaagatgaaatgcagcaaactggcagcataaaaccaacaggttccagtgttctgttattaatttgtgtactgtcaaaaccaagcaaaattatcaaaggaagatatgctaaaaactcctcaaatccacagatattgcttcatgcgaaacttacgtgataaccgagagatcgcagggaacttcaccactctgaagtctgaaccaagaaaccagatgaagacgagcattaaaattcttcaggacatgttgttggccatgtgaagagatgctaggacctgagctgtgcttccttttggcaacgatgacggaaggaatcagaagcctttcttgcacaagcctcggtcagttctagtagcttttcctctctcccctcttctgttttctgttactcctacttctcttctcgccctgctgtgaagagtggactggagcgaaggcaacactaactaactaggtaaggtagctaatggcgctgtagcagcccacaccacatggcttgcacaagcaaaatggactttcggccagtgtcccacgcaccacttttccccactcgcacaaaaagtaattgctagctgcaggcaaaagctgaagcgagcccttgataaattctgtgttgagcctgtagcaatgatataatctcgtgggtcttgaggtgtttgtagttgtaggtgcccagatatgaaagtatcataggagtatacgagtataaagagattggttttgcattgagggtgattgatatctaccgttttgtttgttctgttctgctagtgagagcccaaaaagggctccatcttgtcaagtagtaatattgagatggtgatggcatggagattttcttagctacggatagagttgtccaccaacatctaaccatggcatatcaggtttttgtcgatttgtttacaagagtgcaaaaacaattgagagtgcttgccatttccaatacgtatcttctcagttttcagttcaattgagagtggattacttcagtaattgattatggctaatttagttcagaaatggattagggcgagaagagttggtccaacataaatgagtggtggacctagcaatttcagtggcgtataaagtcacttgcctggggtgcactgcactagagcctgcaggagtacaaagatggaaaatggatatgcatatttccgcaattaaactaacctcccttgtgttctacggaagggtgctatgatgtggattgcgatgctgggtttggatatcttatcagcgagtcgatagaattagatggattgttttcttacacacatctaacctcaatctggttggtcctccccgccaaatcttcattgttatttaagaccgaatcagcaactgaattgtctagcacatcttgacttgcaaacctactctactcatgccatgtgtgttgcgtctgatactttgctgtattggataatgtgttcttttctcttgaagataaagaagatgaagattaagtttttttacgtaaaatgaggtggtattaacgtatgattgattgggttttaattattacaaatttgaaaaatagattaatatgatattttagagcaactttcatatagaaaatttttgcacaaaacacaccgtttagcagtttaaaaaacatattttgaaaatcttaattttcttccaactcttattctcttctatctgatcatttggtcttacccagatgcaatactatagtagtactagtatatgagtattcatgtcttaaaatgatgtctccagaaggaaacacgtgcggtgcttaatttcttcaaattttacactatgcacgaccagggttattggccgctaattaaattgcagccctgattgcctgaaggacactgagtagccaaagacaagtgagcccaacgaatcgcccgtggctcattatcaatttatcagcaattgctaaactgctaattacaagtatgtgccttcacattctgcgagtcagtgatttgctttaataatctcttgcaaagttaatgcaccttaatccttaggccttacttggcagttgtaataatgataaaagaaggcgtgggctttgatcctcagaaatgtgtcggcgaggcctgtccattctcccatctgatctaacctccctttttcttaagaaggggttttttttttacccggcctctaaatccaaccggatatatgcaacacttttaagctagaaacttggcctatcaaatatagaatttagtcctcaaataatccaatctgaaattcgctcctatgaagatttgaactcagaaccttggggtactactcaggtcactgtaactactaggctgcatgtccattctcccatctgatctaacctccctaccagccatagccacccctccctccatcattgcttcatctttcttgttaaacctggccaggcaaattggttggaaaacctaataactaggtttggcaagatatctaatcaaacaagatagtgctgctcgctctgtaaaatttaaagaggcaactccaataaaaatccctttgcttattattcctgatgcacacataccggttattagactagtgatgatgaagtacgctagtactgtccaacgaacttttcctgacacaacaaacactgtgtcgctgtattatactcctaacctttttttttgttttgtatagagttgtcatgtgtctcattaacttcagtttacaagtggggaggacaaacatacttcagtgagatgctatactaatgaagacgtcagtgtagcgacatcatttcattaacagggagactctgtccaagtactaaacaacagaatagtcgtaccgatgagcattttagaggagatgatggtgcaacggttgcactaactacctactacagcaggggtatctatctatgattaatccgataccatctgtcgctctctctctctctctctctctctctctctctctcctgaatcctgatatgtagcattattgttgatggagtttatatatccttttcagtttccaaacacattcaatggctgctagggagatggatattgggacagcttgttattgcgtcagtcatgagccgcaaatgctgtagcaatgcgtgctgcgcttgtcgcaatctcaagcaggcgacgttaatttactaatactccgtattatactatctgagatttggtgagcactagcaaacgatactcccaatctgcactggactggaatactggatcccgcatatgcatctttctctatctgaactgaaatgccagcgaaaaggctggcaggcacctgctgctttttacctttagcctcccccaattcacagggcatatgaaaatcaaggacattttcgagacgaacaagcagcaaacacaaataatatgcaggaggacatcacagagaacgtacgtgcaggtgcagcgactggtttgtcggtgccgggcatcatcgcttctccttcacttccatgacaactcaactgaactgtaccgaaccgaaccggcatgacatgaatgccagcataggatgctactccagcctgctgtctgcctgttctatagccaggtgcgaaagtggacagatatataggaatggcatcagctggttgctctacagtatgtgcgaaaagtggtgtctgtttgtgatgcggtacagcattcggcagcatggtaagttagttgtccactcgacctcccaacaacaaccgcaacaataacaacagcagcactggacagcaggttctagctctctagtttagtggttgatttaccttttaatttcgtcttgtcgtaatctttatctctttcctttgtttggctttatgttaaaacaatcagtcaatcttgagatgatgatgacgatgcatgcggcgttaccattaattagctaggatgcgagcacgatggactgcatctctctcctcctcctcttcctcgccctccgcaggatctccaggccctcttcggtgccttgctttgtcactttccactccttgctacctgcaccatatgttcacatgtgcaccaacccgtaaatactagcagtagcagtagaagggtaatcaaacgcaaactgtaagtaaattctagatgattgaaactctactctattacgcaatcactcgccatgacagccggcaaagcagattcagtgattgaaagcatcgtttttaattgttggttgcatggaattcagctctcttatcccctagatctcccgctgggtttcatccatcgaaaagaatgcaccctggcttttcgaggggaagttcaacggttgatagctacctgtttctgtcttcaaaatcacgcaggacgcacgtccttcactgtcatcatccgactcgatgattatgctgactggtgcctgcattttgcattcacaagcaagcaaacatgatcacgagttgaacataaggcgaccacctactatctttattaaacctgcgtgatacaaagctatgccactttggtacattcagtgatattgattttagaacattaccaattagagcaagagatgcttcttgttaacaaattggccttgtaaacatgttctttcgttactgatacagaaaggagcagggctgcatggcttaccttctttgctggcacttgtatattgacctttctaatcgctacctcttcctgtttaggtgccaccctgtagtagctcgaagcaaacggcttttgtggagctgcttttacctttccctgctccacctttggcttcagatctgtcacctttgcaggataaaccaaatgtgcagaaagcctgacattaacaaacaatcctcgtcagaatagaaaatccaacaaagatccgaagaagaacagttggtagcttaagtcttgctagtaacacaactcgaaggaatgcaccgacacaattccttccaataaaatgagataatgttccattatacaaaatttagaataattactatctagtagatttaaactggcagtatttaaccagcttcgtaacgaaaccaatggaatattaatcattcttttgaattgcttctaacacttgattttaaataggatctcaaggatttaaaaccgatttgaatttgattccatcaagaggtctttcagttcaattctccatactatagtagtgataaatacatagctaatgactgaactatgtaaggagccaagagcagaaaattacacttttgtttcaggtaattggttcatccgggaccttccagctgctactggtgctcggttcattggagaccttccagctgctactggtgtctggttaatctgggtccatccatttgaaactggtacttggtaactctggtccttcagccaagaccaaaaagaagttagagaaagatactggaagacttatggctaaaattacttgagtcatgaatttacatactgccatcatttgcattgcagcaggcctactattgacagacctgatagctctaacaaccccctgcgcaaacaggcaaaacacaatcaaatatagacaaaaacatcacattggttgccttcactatgcgaattgatgaggtttgagcatgacaaatttaagttcacgcagacttgtgcctgctccttcagacatcatcagactcataaaaaccgaaaactgaaagatatcatatactgaatatattggaccttaggttctcaagtatcatgaataattgaatatagaagaaaactttaggtaactatgcttatatggaaacttaactgtcatatttggatataccagaaaaaaaatcacatgctcatacacaagaatgataatcatttatatgcaaatgatagttttcagaataatttgtagacacttggacagttggacttatcagagttgtatcaaaactggaagtacctccatctcttttgtaaaaactctgaagacgtcacaccgcagttgtcttatatctgcttgcatttgtgtctgcagggttgcaagagtcgaggatatctcattcgatttgctggcattagaattcagaacagttgtctgatcaccctgcagttgtcttgcttgcatttgtgtctgcaaggttgcaagggtcgaggatatctcattcaatttgctgcctagagaattcagaacacttgtctgatcaggattgtgttttgtgctgcttccaaagagtgctttgagatcgtcttgtcccttaagctgtgataacacggtagtatgttaactctgacgttgcacaaaagaaaaggaaagagggaaagtggagaaaatgctgaaccatcaattatccttacaatttgctgaagtgagctttcaaggacagcaatcttttgccgtatgctaccagctaaacataaaaaaataattgctttcagttccagttgctgaacaaggacagaaatagagtgcagaaattcatagacaaaacagaagttgcacaataactctttatgactgaaagttaggggcttacaatctaatgatgcctccttcatggctctgtttaactgcattacgtcactttggactgagtctaccaccatccccatcttatgtactgagcttgccagatgctgaaatttgcgctcaacatcctcattagtaacctgacctgctgatatacccatctgtcagttatactgatgagaaaatactatggcagtacaacaacttagtgatttggagtccagataaagaatgatttcaattgaactttctattataaaagcatgcagcgatcatcttacattctatgcagaatagaaaaacagaacccagttggaaaaaacaaagtgtgcctggaactcaggtgaaatgctgctattctggtataaacgaaatgaaggatatatgagatgtagtgcgtgggtcttgagagtttacatctagtatctgcaatggaggggttccagcggtgcactgggttgcttggtaattttgccagttgcagctgagactcttctcgcgcgcaagaagctgaactggctggtaaagaggacatcctcttggatgagtcatcatgcaagccaaatctctgtacaacaatgaagacatgaatgaatgttaatgggcaagatacaaaacactacacatgccatttctaactagtcaagctgtaattagatgcacaggtacagaaatctcagtttgtgatgcaccaatgatgcttccatgaataatgcaaaagtaatttatgaggaacaggcattcatgtaatgaaatcgtgtaactgcatgtataagggtgggtgtcaattgcaaacagttttacaggacagacaaaaacggagttcaattccctgatttatcagtgcaagcgtgcagcaaggtggtgggcagcagagtgagcaatttgtaccactagtaatcaaaacaaatctgaaattgcaggaacagcctactcatagtaattggaccttgcactatctattagtcgttctgcagcatacatttttttttttgcaactgcgaccagagataaaaaaaactgacaaatgctgtatcaatactgaatctgatatggattttcaccaaaaatccacaaggcaattcagcggaagactctgataaacaccgaacaacacacagggacaggagtgagtggaatccccaatcagtaaggcaccgaaaaataccaaaatccattgggcggcagaaacaagagcgagggggagaaggagaggagaggagaggagaggagaggtgaggtgaggtgagacctgatcgcgggtgggggaagggaggagggtgaggaggttgtcgtcgagggagacctgcgagaactgcgactgcgagtgcaagagcgaggcggaggcgccctgcgagaaggactgctgcgactgcgagagcggctgcgaccgcggctgagacgccaccgccaccgccacggaaccggaagccgacgcgccgctgctccctccggtcctcctgaacacaccacaccaccccaccatgagcaaaaacacagcatgcatgagcattgagcagaaggggattaccggggagggaggacggagatggaggcgatgtcgcaggccttgttcatcttaagcttcatgccgccgatcgccgccgatcgccgtagccttctccttcgccgtcgccttcgccggggagagagagagaatattcgcaaatttgaatttcttcctgctctgcttgctttctggtgggtccctgttctccgccttttataggcaccacagctccccgtgtgggcccgcccttgcgcatggcagctctgaggctgacacatggggcccgagttttgaataattgcggctatgtcatgtatgggtgtgtttagttcaccgaaacataattttaattttagagtgtcatatcggacattttgataggatgtcggaagaggttttcggatacgaataaaaaaactaatttcataactcacctggaaactgcgatacgaatttattaaacctaattaatccgtcgttgtcacatgtgggttactgtagcaatggctaatcatggactaattagactcaaaagattcgtcttgcgatttcgatacaaactgtgcaattatttttttctttttttatctatatttaatgctccatgcatatttccaaagattttctaggaaaaaaaatcctgggaactaaacaaggcctatacaaaattaacattcaaattgcggcagagaagaaattaggagtgctctgctatgcaactgcaaacacaactcaaaacaggaatacatctcttgcacagattcaaaacaaataaggtccagtctttttttatttgagattttcttgatactagtattttgtgataacaggatacattagcacactgttcttgtgatcagaacttcaggagcacaggactaatagtatatggggaatttgttctgaccataaaaagaacaacattttttattattttgcattattatcggatcaatgcgccaaatacccccaacgtatacagcgagaagggaggtacatgatcactggtttagttccacagtccagcccatacaatcgtccacatgacccatctggaggcttgtaagtgaagtatacagctgctgacacaccacgcccactccttggttgccatattccaccctgcaaggttagcagtacaattttcggatcttatatgtcttgtcataactatctcaagaacaaacttagcatagttaaatatctcattttaatgcgtgcggcagcacgactccaattgctctacaattatcatgggcaaccaatcccgaaagatctcaagtttatagctaactgaccacctgcgcgtgtaatactacattccatatcatgttgcatttcggtttttctaaaaacagagaaaatgttgactctcagaccaaacgctggtaaagcaattggtggtgtttgtaacaggatgacatgatcatgccaggtaaatgttgaggtaataattacaaaaaaaaaccctaagaaatgatcacaagtgagaaaatcatatcagcatggtgaaaagttaaggaaaacctagcctatgaaacacgtagctaatccaaggtcttcttcaccaggttttatttttaccgaggtagtaccatttgttttggtgctatttctagtagagtagtaactaactaatccagtcttatcccgaaactgctgtgatatgtgttctaaagacattagctgcaaatttttactgcatcaaatagccatattgcacagcaagtaagctttcaagcaaagcagaagtttcacctttgccccagataagttatgctccccacaggggacaccacaacagctgttcccgtgcagaaaacttcatcagcttcaagaagctcatccactgacacaaggcgctcctcaaccttacagtaagttaacattaattaaagctacataacattaacaaaagcatttaaataacatattttttcttcctgtaatcaatgaggaaataaccctatgatgggccaacaacagctcttccaggccactaggaaaataggatctggctaatcatttaagtaaacttgagctactggtgaaaacaagaatttaatttggtattgtggaatggtaactataaaaagcttatctcaaattcacaggtaaaatgcactaggcagtcatttctttcctggtctccatgatgctgatgagtaatttaccatgaagccttttctctgagcaacttcaagaatacttttccttgttataccaggcagtatggttccttttattgctggagtagaaataacattgccctgatgcgggaaaataacatgattacgacgataaaaaaaaaagaacctaaacgatttacacatcctaagggaacttgtgccatttcactgcataaaacctaaataagcattggccaaatgggaacgcctaatcatgcaacaacaaaaaaatatcgattaggttgtaattgactaagtagtataacatcatgcgcttcgctgaggaaaaactacttctgactccagctactgaaaatatttgctaaaataagcataggtataagagaaggatcatactttcacaataaagatattgcacgaagacacttcttccagatatttcttgtgaacggcatctagatagaggacatctgaatatcctttctgttttgcaatcctctgtgcttttaatacctacatggtggcaacaaatatggaaactgagaaaccataagattaaaactaaaacagtgtgagtaatagcacataatgtatgtatatatgctagaatatcagtattcagtaaacaaatcatcactgactgactctaacttccatttcaggctaattttaccacaacatcacttcctcacaaatcacaacgagtgagatttccatttccggttatttgtctcaaggggaaaaaaattaaaataagccgtgagctgaccatttgaaactaaataatatgaaatccacatagatatccaacataatagcttcataggaacaaaaatgtttacattttaagtttcgaattcaattactcttgaaacaatagagaagcctaactgcgtaagcaatagaatttagagggtacatagttacatgctgtacatatagcagaataagcaatagccaataggtaagtacatagttgcaaatataactaactagatgatggccacagaagctgtaaattaaatagttgtagctttcatagatgcagtgccagaagttaccgaggcatagtttccaatggttttcactccgccagttccaccaggggcagcacggtgaaagttttcttctataatcaagttaataggggctaaaccttcctgtaaatcaaagataacaaatttaatcagcatgtatggtagtttacaaagataacaggggatgaatttctattcttggtggaatcaggaatcgtgatagcaaatctgcttgtggtgtaattccaattccactatcctataatcactgcaaaaggaatattatttccctaggatacatggttctttacatattggatgagttgctcgagtatctggtggaagttaagttaaaaacttaacacaaaccttgaaatagttcccaacaggggagacaaaaatcataaaggtatactcaggagcaggtgcaagaccaaggacagctccacttcccataagcagcggccttatatacagggagcctttaccggttgggggcacctacaaatatagtacattaaagagagtgacaggattatgaagacaaaagattgttgaatgcagaacttaatccaagagcataggaaaacataaaatttcttacccatcttttatttgccaaaacggtttgctttactgcatccacaaattgttcaagagttggtgcaggcatacacatcctctctgcaccatttctcatccttatggcattctcctccggacgaaacagcagaatgtatccatctgtttttctatatgcctttaagccctcaaacaagccctatgtacgaaaataatcactgtttaagcgcagtaaattcatttaggacttcaaagagtacctatttcacatgttaccaatgtttgaagttcccaatccactgtagaaactccctactaacctgtccataatttaagactccagcagatgggctcagttctataggtccaaatggtaccatttctcctttggaaaagttcccatctggcccgcattttgcaatatacataaaatctgtctggacaaggccaaaaccgaggttctcccagtccaaatcagccaccgcagaggtttccctgcaagttatacgatcaggacaatatttatcacttgtggacttgattgaaacgtaacccatggcagtgagacttgtcatatacagttcatatttacatacatgtagttagttgctagagaagcttggcatcctatcgcgcagtgagccttggagaaaggaggtggcactgaataagtgtgattcttgatctgcagtagcaagaagaggtgggggaaaaaagatattcttctatcagatcaaaaggccatcgaaagttgaaaatatttaaacccggatgcatctttgctagtagtaggaaatacaatatgacaataaatcagacgaggcttgaatctatgcatgggatgggaccagtagggccaatcaagcacaaatttcactcaaaaggaccagagagatggcatctactctacagcactagagtctagagtagccactaccacacgccaatgaatgatacagtagacaacttagttgtgcctgattcatttatttaggaattcagatgataacagtccagaacaaggaaaatagggaaaacgaacagctttgttatggtaatggtcatttagcctaaacctttacaagtaaccaacaattagagctaaacgccacgtcttaatcccttcatgtatgattagacgctcgaatcgctgggcaacaactagttaggagattcactgtttaaaaaaaagaagagggagaaaaagaagaaaaggttcgctccccattctagttcaaaagtatccactcacgcaggcaggcagcaagtagtagaaacgcatggtatttgcaaagcgaagacgagaaaaataggtggggagggaggcgagtttgagattgagaagagagtaccggaagcgacggcgtggagagagagaggtgaggacgccgctggccggcgagcggcggagacagcgggagggcgccgcgggaggtgaggtggagctccattcggtttgctctccgatgggtttgagcaggcggcggcggggggcgaagacaatggcaatgcggcggtggcggcggcggaaaccgtcgtcgtccgaataaaatagcggcggccgcgagcgcaaaacacacacaaggctaactagttggtcccaccggtcattgactcgcgggaccagctgccgcagccatgccttgagctcggccagatccggcgcctcgtggccagctccgccagccacgacctcgccggcggccagctctggtgagaggttcaccggcgagtgcgggctccacgccgagaattccggccgctgcctcctctggtgagtcctttctttttctgttttttttttgaacggtacttttctttttctgttgtttgtctatgtgatgcgtttttcaaatctaatcacataaatttaaatttgagtaaattgtacgtgcggtccttaaacttgtaggggtgtgttatctgggtccctagactctcaaaatacatatccaagctccagaacttatcataatgtgtcatctagattctaaatcgccacaacctcttcaggatcttacgtgacgttaatgtggtatatgacacaactttacaagtttaagaactgtcaatgcactttacgcattaaattttgagtaaattccaccaactatattagataaaactatggcaaactataaaatttattaaagattttgtatcacaaaattataaatttaatgtaaaaaaatattttaaaaaattatatatgtttttaagatggttttgtgaaatttattaccattattagatttttgtacatgcctagctttccaatagctgattttttttatatgggtgtgtttgataaatgggttataagaggtaggtttgaaaagataagagatgcgaagaatggatggttaagataaaatattatcctttaaagggtgaaataatatttttctatccgccaaataattagatatgcgagtgatttttaacaggtggtcaaaattaaacaattagaacgagctaatacttcctctatgctttttctaagttgggttagctcgaatatttgggaaagaaggtattagacaggtagcatccataaggttgtcttcacctctcttttttctctttatctcacttatttatttaatatatttattttaaagtatatgtagggttaattcttatatattaaaaattataagttaatacttattatttttctctcttatttatactatcagagcagatatatagtattattgatggagatcaaagcccgggccacagattgagaaggagaacttgggtacccaatggagatcaatatgcatgggaacataatacctctgttgtaggtgtagcagcagctggacaaccattgtgcgccatatatatctgcaaattaattaagctctctctctctctctctctctctctctctctatctctctgggtgccttaattttacctaactatgagtacgtatttgcctcgatctcgcaccacagctgcttaattaagtgcttaatatatgaaggtagctatatatgcctatgttgcgcggaggggtttatatagatcgagagagagatgacatcattcattgacatgcatgcagcacttagttactatacattcgttttagagttaggcaagctagcgtattgagaaagcagataacattaaatgagaaagaattatgattgattgagaaaataaagtaggtaaataatttaaatggtgaaattaattaacgatgtgatttgttgataggagaagttgttgttatattttaagataaaatttaaaggataaaagttgttatattttaagatggagggaataataattaataattgatatctgttttaaaatatagctacctatacatgatgagatatttcctaataatatgaatctgaacaatatgaaaaatgtgctatgttttaggatggagatagtagctagtttacgattatgaactgagctttttgtgttatactataaaagattgtatatagttagctctcccggccaagttgcccacgttgctcacgccctttacttttaaataataatttatctctactattataaaaattaaagatatttctactaatactttggtacgtcgttcgtatctgagtcgatttttaagttcgttcacttttgaaaatatataaggagtcgtataagaaatccttttaaaaaattcgcatgttaacttgtgacgagagtcaaactcctaattgctttagaattgaccatcatcccaataaaagttccaaattatatatcaatattatcaaaaaaaaatctcatataccttctggacaaaaaaaattctgacaattatataaataaaatagcctttacccgttgcaacgtacgagtatttttctagatagtagaaatatgataaattataagtcatgtttaaagtttatttatgataaaatatgttataacaaaacaaatgatatttttataaattgttttagatagaatgaatgatcaaatatgatgtcaaaaatcaacaatgttaaaaaacgaaggaaacaataagttcattactacagtatgaactgacttttgggtcaacggcactagctacactcgtcaaaatccactagatgcatggcaaagaatttcggtacccggttccttttgtctttatatgatacttcctcagttacaaatgatcatcatattattaaatattaaaacttttaaattgatcatcaaccctagtcctttatttaatatgcagtattattgtatttgtggatacaaattaattaagtatgcatatatgcaggggtagttaagcactgtttctagtgcatcccgggagttaaaattaaagtcccatatttatggattttacctcaccatatactcaacttaaatgaaattagttatatcaccgtgtatagcaaattatttatactatgtatagatatatatatctagtataaagtggggattttttatccatctacatttttttattattcttctttagcgaattttctatcatctaaccaccttttatttttttacttttctatttttatcgaattttctgttttgttgggatcgcacaacaaccacctttttctttttcttttttttttagcgtgagcgagcatttttttttaaacgtgcgctgcgtgctgtatgagccagggatgaaaaggaggatgcctgtgcttttatgacagtaaagtaaagatacggagaaaataagcttagctttactttttttttatgatagaagagatatagagaaaataaatttagttttccttgatgttggtgaaagaacttatacaataattaaataggaacgacggagggatggatggagtatattattgattatatgattatgtgataacattttaagagtaggaacgaataaattacttattaaaatttatcgaaggttgctttaaaatactatataaaaacttatgtatagaattgtttgcaccgttcaagtagcttttgaagcatgtcaatggtaatctgtattatgtaagaagaaaagaatggttaagtatttaataattttggatggagatttactaataaattactgtcttaataaattgtatatctttgtatttttgtggatcttaaatgtgtaaaatcatcttttttttgttttcatggtgttgaaattggttttgagccaagaactttgaaaataagtgaatgtagtttcttttgaagcaaagaccagataatatccattatcagaaaagtccctattcttttgtgctgaatgattgaataataaatggtttgtaataaacatttgaggattaaaaaatattaaatattatgaaagttgaaaaaaatgttttctaagaaattcgtatataatttttctgtgaaaattgtattatttaggagcctagaaaatgtgcgcaatcagccattgatcattctatttcttgaaaaggaataggccataggcagaaatatatataccagaggttatatatacaattcacagttgagtaatgtttccgcgttcatcttcgatgacataagagcgaacaataataatgttatatatggaactagctaggtaattaagctaggtagcagttatgtagccttttgtcaacttcgaatggagattcacaaatagaattcaataattatgtgctgtttatcttgtgttggcgtttacgagtttgcgttcgctttatgtttggaaaagttttttttttcaagttctctttaagttgcactcgttttgagtgatttaatgtaataattggctgtaactcgttcgagcaaagatggatttctattccattattaaaagatattatgggacttgtggtcaagtcaagtcatacaaatattctagacggtaactttttttttcctttttggcgaggattttagacggtaattgataactcataaattatcattagttaattaactagtaccaataggtagcagtataaattcgttattcctaccactcaactttcgggtcctttccaattttctttttgagagaccagagctggactcgcgatacgaactgtgcatttttaattgcaagtccaaatttaattgcgcgtcgacgaagcccacatatatgcaatttgtaaaaataatattggaaatgaataagtagttgaactatgcgacgaccatcgaataggtaattacttagatccacgacattgtgaccaaatttatcaacttggaaaaaaattgctactatatattcatgacatcagatgctttgcataattctaaccgtgctaattaagttgtgatggtttctgtcggcatctctccgttcgctccaattccggccagcacatccatttcttgtgcaactcatggccggaaatctccagcgacgcttaggttcggcgcagagctagggggctttctccgtctatatatggcaatacaaatgaatccaaggaaggcgatgatcgagctcaactccaggcaaaggccaaatatattaagggagatggagctggccggagatcaacgccagtcgtcgtggcctccagatccgatatataggtcgatcgccggcgatatatatggacctggaggcagggactatcgatcagtcatggcttctagatcgaggtgacgcgacgattgctagctggtggagcctcacgtgctgccgcggacgatgatgatgcatggtgctatagcctatagcagaggtgatgagacacgcaccgcaccgcctctagagccatcgtcttcccgtcggtgaagcccaatgcaacgcgctagctgtggccgacgtcgctatatagtatatatgagattagaggcagagagacacatgccacctcgatcgtcttctcccccaccgccgcgctcgacgacgccacatcgggtgctcagctgagcttgccccatttgcaccattccccaggaccaggagcacgagcgccaccgcaaatttgtctgagttgaggaagaagctactcctctgtttttaaatattttacaccgttgacttttttaagcacatatttgaccattcgtcttattcaaaaacttttatgaaatatgtaaaactatatgtatacatataattatatttaacaattaatcaaattgataggaaaagaattaataattacttaatttttttgaataagacaaacgatcaaacatatttaaaaaagtcaacggcgtcaaatatttagaaatggagggagtacataactagatggagaccccatactttaatataatttgccacgagacttctgtgtgattaagtgacaatataatatgtttggatttggtctgaataagcaggacactactctagtccaaatttgtataattattttatggtgatgtcatagaggtagtatgagtaagaacaagatcaatagtgcagctagcagcaagctctaaaattttatcatgtcaagtagagtaacttaaaagccaactcatacaacaagcaaactttatagttagctataatctatcttggtagcatacatacattaaataattgtatggatacatcagagagggttctgtatgggacccacataaacacattttttatcgtctcttctggctgcacgtgagcaatacagtttggggcacggtgcaagcgctggcgccaaaacaagcgctcacttgtttctttctctgagattttatttccttaatctcaaattaagctgataagtaagttttggagccagtttaacagctctatacctgctctaagtagttattcataaatattaatgcaagtccattggatgcaaatagtacttataagggcatgtacaatggttgtcaatagtggtatcttagcggtgctaattagaaatacttgttgacatggaagaaaaagaaagagagaaaaaaatcattgttatgcataacaatggcttaacaacgactcttaatcactataatatggaaatatggttgcatgagtataaaaaaaggaaagaatattaataaaataaatattttttaagttaatgattagagcctttatcgtctcaactattgtaaacatatggtctctaaataatcttgtattgtttaagagaccatactcgcctcaaccattgaacgtgccctaatatgctatcgataaatgctacggcaaaggatacgtttccttcctttaattttgggctggcgttgtttacatgtgcttgagatatatatactctataataatacaaatgtgatgctagtatatattgcgattaaatgtacagtaaatagggatgaacaatatacgattttttactgagaagacatgcatgtacctacactatatatatctggatcatctgctgcagaaagagtgagagttaatgtttgtcgtgattaaaccattaattaataataattccaggttcagtgtggttaattgagaaagttactactagaaaagaagaagtttgggatgaagcccaggcccaccatccgaaactagtagcggtcagcccgacaaagtaggtagcggccgccatgcgtccatcgatcccccgacgccttcctttgtcccgcgatcccggcggtgctccgtccatagctctcttgcctccgcccataaataccacccgcattggcgttcagctgtatcatccaccagcaataacattatattgcagcaatggcatcctcctcccttctactcgcctgtgttgtggtggcggctatggtgtccgccgtctcctgcgggccacccaaggtgccaccgggccccaacatcacgacaagctacggcgacaagtggctggaagcca

SEQ ID NO: 7060 - DNA, 13567 bp, Oryza sativa
ttcctcatcttggaactctggaagaaaccagagataaactgcacgaaaccaagaaggaggccaggagaacagaacatacacttagggaccggatcgccgagctccaagaagccaattttgaactgagtggttcttcaaaaggtaactctatttctgctcaactcattctgacttgactcagtgactaaatagacattgtccatgttatagtccaagctgccaaaattgtcgagctggaaaggcaagttagtatctggtagtttagacgtggtgtctagattacgggatatcattatttggggttatatattgcggatgagaggtgggccgctgatggtgacagctcagtacgggtattcctctgcgcctatatataatcctaagttaattccttggggagggtattcctccgtatttagccccggttatatggtcatgacgggctgtcgtaaggaactcggcagtcaggggtggcttctcgaagtatcaggagggcatcggataaagggtattagctagtatatcagttaactagaatatatgtatactatgtatactagaagtataagaatgagttgttaattcttgtgtgtcactctacccttgaattatcttagcccctgcttagaatatgattatgacaagtaatatataaattattagtggagttctctctacatgatcttcccacttgataaaataaatacgatacccttggaatactctcgggtggaaagctacaatggtatattcgtgcgcttacagataatctctgtaactataataaaccagaagtatttctggcgccatttctgggaattatatttctagtaatgtcgttaagaaataccaacaagcatttctggcgccgttaccggggaagattcataatagagatttcttgaactaatactttatatttacctctgtataatcatttcctttgcaggctaaccttggttgttttcactgttgttgtggaaacagggtagtgcatgactggtttcaacctgccggaaaacttcaaagaaaatccagaagctttcttccagagcgtcaggcaacgagtcgttgctccgcagaaagctctaccgacagagaaaccagtcgtaccagcgccaccaaccttcaagactatggccagcaagactccgcgagttcgctgctccctctgctgacaatgtggccattgggccgcaggtcaacataggggacgtggatttcgacttgaagtccagccttatcacgatggcgcaggctagcccgttctgtggcaagcctaatgaggatgccaatgctcatctgcaatagttcctggagatttgtagcacgtacaccatcaagggcgtcagccccgacgccgtcaggctacggctatttccgttcttcctcctcgggagagcgatgcagtggttctataccaaccgtgctgctatcaacacctaggacaaatgccccatggcattcctcttgaaattcttcccgatgggcaaaaccaatgctcttcgtggaaggatttccagtttctagcagacaagggatgagtctattccggaagcatgggagcgtctgcaggaatatgtggccgcctgtcctcatcatgggatggacgactggctgatcctgcagaattttttcaatagactcaccccaatgtcccgcaatcacctggacgcggcatctggaggagctttcttctctaaaatggttcaaggagccgttgaactcatagagaggatggtctccaatatgggttggagcgaagaacgactccaaacccgtcagcgaggcatgcacatcgtcaaggagatggaactgcttgctgccaagttggacctcctcatgaaacgtttggacaaccacgagaaaaggccacaaggcaccgtcaaggccttggactcacacgtcacgtgtgaggtctgcagtggcacatgtcattctgggaatgactacccagaaacccgtgaggaggcaatgtacatgggaacaacaacgggtaccacaaggaagtcaggggtggaaccaaccacgcccatattataaaggaggtaacaataacggtaacatctccaaccagccctccttgaaggatcttgtttttgcgcaagctaaaactactgattcgttaagcaaaaagcttgctgccaatgataaggtcctggaaaacataaatgtcaaattagatggctttgcttccgcatttcaaaattagctgagctttaataaaatgatagaaacccagttagctcagttggcatctttagtccctgcaaatgaaactgggaagatcccggggcaacccgactcctccattgaaaatgttaaggcgatcacgacgaggggagttaaatccactcgtgatctgccgtatcctaaccctgcaggaagtgaaaggatgtcaaaagaagcgccatctagtgactcggctgacaaagaggttcagccagaaaagaccgtgccgcaggagtactgtgacacacggttgaagccattccctcagtggagtaggaaaccgtcagtggacgagcagttcgcttgttttgttgaagtaatccagaagattcacatcaacgtgccgttgttggacgctatgcaagtgccgacatacgcccgttatctcaaggacatactcaacaacaagagaccgctcccaacaacggaggtggtcaagctgatggaacaatgctgcaacctaatactccacaagctcccggagaagaagaaagatccggggtgtcctacgatcacctgttcgattggggcacaacaattcgaccaggccttgtgcgaccttggagccagtgtcagcgtcatgccaaaagacgttttcgacaaacttaacatcacgatgttgtcaccgacaccgatgcgcctccaactggctgactcgtcagtccgttacccggcagggatagcgcaggatgtgccagtcaagataaaggattttttcattccggttgactttgtggtgctggacatggacacagggaaggagacgccgctcatcatagtgcgtccgttccttagcaccacaggagccaacattgacgtgggaacggggagtatccgtttccatatcaacgggaaggaggaaaggtttgagtttcaaccgaggacggaacaatgctccatggttagaatcaagtacgggccaaacccgcagaatattcaagtggtcgaagtggagcgacccaaaacggatagcctggtggaattcatgcaaaatttcctggagaaggaaacaacgatgaccaggaaccgttattagaggatgccggtaaaatcacctgtaccggctaagaagttagagcagctggctcagaagaagccgtcttccgcatcgaaatcaaagaaggtgcggaaggaaaagccaaagacgcccgctccatcacctccgcgcactaaactgaaaggaggaacggtcctgcacgtcagacctaaaatgacgcgaccttcgccaacaggtaaattggtatgtatccgcatatttgctttcaacaatttgaatttttgcatcatcacatgtttaaatttcaaaattgcatttaggatttttttaattttgaggaaattcttcaaatgaattttttagagcaaaccaaaataaaattttcaacgaaaattccctatgccacgaccacactgaccgttcaaatccaacggccgaaagtggggccggttgggcctaccaggggttcggccaaaccggccaggcaacgactccctgccactttttgcagggtaacggcttgtgggtcccacatgtcatttctgaccgttatgggcaccctataaaagccagccggctggtgagggaattccatcccatttcaacacattttcattccctctctaaagtttgctctcaagttcattcaagctttgatagtttccctcaaattcaaatttttagttgcatatatacaagttgctttggtgaaactaaccggcgggtaaaactcttgtcattcctaacccccgccgagttagtccgttcttgcttcattgtgtagaatgaggaggcgattgtctcgtctgttcaaggggtccggctcttcatcaagtcatcatgacgggtccagtactcgttcatcagctgatgtctcgatggaagacgccgaagctccacgacgactcctgaacgacactgacctcaaccttgtcagtgatcgggagagacaagcctactacatgctgagcgaccgggagtatgctcacacgcgagaatactcaccggagctgctgaaaaagataggtatggatgttgaatttcgttctatttggaaagctattggttggcagagatttgctgtggtagatgagcctggttctcgtttgcttactatgcaatttttgtgcactttgaaagaaatagaagatggtatttcttttcgctttttccgtgaggagttcacgctcacatggaaaggcttaagtacattgttggctttcacgattcctgtaagattgatctccagaaagaaatttctggcttctagaaaaataggttttggaaagatatttctggtgctccaatttgcaagaaacctggaacgaatgatatccatcatcctacacttaggctcatgtacaaatggattgctatgactttgtttcctagaggtgatcagagacccattaggggagatgaattaattatcatgtttgccatggttagaaaaatcaaaattgctcctgtgaaatgtatgataaggcaatggttcgaaagtataaagttctctactcctattgagtgcacttctctgattactcggatagcaaaagggctaggggtcgttagcaaccaaattgtttttatctcagccgctcgtccacatattgatgaggcttatctagtgcaagggcatactttgaaacatggggcagatggatctttgatatactttttccccggttgtacaaatgaaatcccgttgccgaatgcggggtatcatttgtacaactgccatgaactaaccattcccctgcagaccatagaagaatctcgtgcaggtggaacatacagggagacgcgcaacatgacaaggaacgaacgataaagttcatcatcctcaacacccgtgcagatgtatgaagcaggttgagcaccaactggggatgcacccggatggacccaagctccacgacatagcatcggagtctcgacctggacaagcgccagtgaggaccggtgacatgcgcctcatgacatccaatggggggacaatcaaccctccagatcaagagatgtgcctccatctccaagtgaatggcgctcaagttcctctcgttgggacttgggtgaaatcactaggaaaatagacacccttgatatgcagatgggggagatccagtacaacctcacggaacacatagcttagacgcaagaatggcaataatctgcagatgcccagttcaccaacatcaataacatgatgcagcaacagcatgatgaccttcaagcgtactttcgctttcaggggttcaatccttatcaaggaccctgagcgaaagccaagcttaggggaagacatcgctccccccactaaggtaacttgtatcccattacatatttccctttccaattgcatatttgcttcccaattgcatcttataaaacttgaaaacaacataaaaatctgcaaaatagaaaataccaaaaagataagataggtttgagtcatgctatgtaagacaagctagttctctttgttgaaatgatgaatagttgctctgttttatatctctaatatataggttcttggtaagtgctctctcaaaggttaaatataagtagccaacaattatccaggaacctaaggtaaatgggctgcacttgctgatttaagtctaagttgttgcgagatatgaaataataaatatgagttgctatgatcctgatactagtttgacttgaattccagatgttttgtttttcaaaatgataaaattgaaagttcctcatttggtataaattcctaccaaatccaaaaatatgctatcattattaaaccatatacattttggttgcttgacattccattgaactttgtcgaactcttgtgacttgtttagatacttctcatgctctctgatcaagatcatacacccacatatatgcacatgctaaactcctacactgggagctaaccaatattccattccatttccatattaccaccaaaataaattctctatgctttcatgtgttttctcctcttaaaaagaaaaatccttttgaaaaaagagagagaaaaggagggaaaggcatggttatgaaaaaaaaataaagttatgctccatcaagcatgagcatgattgaaaaaaaaatgtagccatggcctctcctaattaataaaagaaggatttttgggagaagaaagtaagcacaaaggagaagcatttttcttttatttttcccatataccatttccaccatatatctcacacattatgcatgatcttgatcttgagtatgtttagttatctgctctagtctatgtttttgacttagtaataaatgtgaatgtaagtatgccatgtttgatccctaccgagctccacatacaacccttagagtaggaatcaacaaggcaacatttggtgaggaaattcatactgatacacttagagagactgagtgaatcatttgaggaacttgggtttcttttgcaaaaatcatttaaaaacttccggaataagagttgaataaagattgggtgattggtactctgattgatgttttgtctttcaaccgcccaaggcaaggagaagtagtgtctcgtgggaatcaagggtaagggtaagccaccgtgccaaagattatttaatctgagagagagagtacatataccttgcacctatatctctcagatatgcagcatagtaacaactcctgatcaacaactaatctttgttcccttttgtccttcacttgggacgagtaaaggttcaagcttgaggggttttgttgacggtcgttatcgattagtttcgaccgtcaatattaccaaaatagaggaaaactaatgatgcttacaatgcataaatatgttagaataataatattccactagtattaggtatactaacctcttgcagggaatgacactaaagtggaggagaatcgacatcaacacagacgataaatcaatcagacgatgtcgagaactagacttatgtatgaatgggccaagaactcagaaataacatgtcgcgaccgagaaaaatacattttcccgaacgctagtgtattaatccccatcccaggaaaagccgaggtacaccaaacaaacatgatacaaaaggcacatctttattatatcgataatatttacattattacaaaggcacttaaggcctgacaatcaaaattaaacagcagcggactagcgggcctatggctccaacttcataggcgctcaactggggtataagccaggactccacctaagacttcttctccaaagcttctcttactgaagggggggaaagattgagcaagaatgagtacaaccacagtactcaacaagccacaccggcagatgcatgattaatgcaagggggtacaaggggtaataatataggggttaagttttacagaaaacggcatttaaaagtcacttagttgcccaaagccattttataaagatgatcctagagttacacagtgttattaatcaaggccgtgaaccttcacgaacctgccttaacctaaggcctacaatgattcagaccgaattggcaacccgaccctgggtcccagctcgtcccaagccaacccaggccacccattccacattttagttgttaagcaggttttaagaattaaaacactaacttgggtacattgctaggcttgcccataaccgagggcgcgactattcgaatagattatactctgatcagaggtgtacatctttacccacaagacacatcttcctcacgtgtaaccacgtgccacataccaccatggtatacggacggaagacgtgacatagttcccaacccatcctagccataaacaagagtactgacccaaccccacctacggccggaacctccgggacaggtaggcaggattgagcccctagcagcaggacaccagccctgtgacatgacatctcgactaccgggccgcagctcgtgtagcctttatttgtcctagagatgtccatcgacccccgacttcatccatctccatccgtgtacttttgtttataaccagactgagccacaaactaagccttacccactagacatgtggaagtacggtagtgctttgcaacagaggcccgagcttaatccttatagtacccgaggtacgactaacaaaacccaaccacgcacctcgagcccagcctaaaaccattttgggggttttgaatagagggggaggtgtgtgtccaattccaacataagccaaccattccatactgtccaaatgatatgagaattcccaaagtctaaagttataaaaccacctaatgttgcctaattaatcagcgaagcatctacctaaattcatactagtggaaccatgaatagagtacccactagttggggttttattttcctagggtgaacaaggtaataataacaatagcaataataataaggtcataacaaagataaataaataggcatggctaaataaaacaatgataatgcgggaatttaaataaagcgataatgcattaatttaaatcaaaataattttataaactgggattcaatatgttcaaggatgatgtgacttgccttgctcagagataacggccttccgaaccttcggcgacgaccgcaaaccacgcttcgggaaccttcagaacgacgaacactacgcgaagcacacacgcaaagctacaagcctataaagaagcaataacaatatataaaaagaaagcacagggttctttaggttataacaaacattaggagacttgaacggatcgattcggagctcgtatgaccaagacatggtcatccgaagtttaatgctgttatatggagatttgcggattattataattaggtttttcaactataaaatatgtgcaagcgctagcctggagaagacaggaaggctgcgctgttgacatgcggaccccacatgtcaacctaagggaccacggcagagcgggtacacagagacggtccacgggtcgacagaagcggatcccgtgtgtcaaccgaggcgagtggccaacaaacggactccactagacaccacacgggctgcacacgtggaaaccacgcggctaccgagcgggcacactaacacagtcaccacacgcacaagcgaacgactaccgacaccggtacacgggtaccggggtcgacaaccgcacaacgggcacggatgacaccgaaaggacgaggacggggcagcgaagaagagatccttaccaccacgtgacgaggcgagggaacgacaacgacgaacgggtgcggcggagacggccgggaatgacggagacgaaagcgaggggacgacttcagcagcgatccttggatgaaggcgagacatggccggcacgaggcttgacgacgcggagccgaggacgaagacgacgacggggctgcagcggctcgcttgatgaacgtggatgacgaacgcgatcggcttgacggagagatgagcgacacaacgagcgaaaccgggaacgacgagaggacgacgatgacgacgatcggggccggcgaggaggcgacaagggcagccgtcagcggctgcacggagacgaggatggcgtggaacacgctgctgcgatgctgatgacggaggcggcgccgcgagatgacaagccagcgaggaggaacgatgacgacgatgacgaacaccggcggggttcggtcgaaggggaggcgaggccgagggcgaccttgccgctgtgatgccggaggtggagatggtgacgtcggccggcgcacgggcacggcggaagaggctgccgaaggcgacgtcgacgaggaggaaggagaggtcggcgcgggcgacggcgttccggcgaaattcgggcgacgccgtggcctggccagggaagaggatggcgccgcggtgccggggaaggaggcgacgacgacagccaccgcacctgcgaggcggcacaagcggctgaagccggtggagtggtggcaacaccactaaacgtcgacgaggacaccgttccggcgagcttcggtagaggggacggtgaggccggtgaaggggatggcgttgcagaaccgagggaggagacggcacggtcggacggcgcgcgggcgaggcggtaggggcgactggaggcggccggcggcgtgggagatagaaggaggacggcggggagaggcggggcgaccacgggagagcgcgggagggggctaaaactggagaacgtaccgagggggttccattttataggcgcggggagggagccggccacgggaggagcggggaacggcggcggaaaagccggccggcggccatggaaggcagccgaggaaggcgcgggcgttcccgacgattgggggcacgaatcaagggggaaattagggggaattgaagaggaaggaaaggggattaattccccctaatcaattttggaattcctggtttgaatcgcgtggatttaggggaggaatcgacgctagatttcacgggagagagaagagagagagaggatgccgggcgggaggaaggagacgaccgggcgggtgggacccatcggtcaggcgcgcgtcgtcagcgcgcgcacatgcgcggcacgggcgggagggcgccgctcggcttgggcaggggcgcggcttgggccgggtggccggcccaggaggagaggagggggaggcggcctgggggacagagggaggaggagggagtgggccgaggggaaggagaggaggcccaagagaaggagggagaggaggagagggagaggaagagagggaggaagagaggactttggccgcgggccgagagagagagagagagggaggctttgggccagagggaggagggggattatttttaggttttctttttaataaactttgttaattgttgttgttgtttaataaatatttccggtgctctgaaaattcaagtaaaatttgagggctccttttagaccaaggagaatttaacaaaaattctccggccatattcgaatttttcttgtacatattttagtgtttgccaatttcttttcgaattttaattaattctattattccttttagaaaatgatttttattttgggatgaatttatcaggacgtgacataacacgacacattgggccaaaattcacaagtctgcggagaagaacaatggagaaggccgccagcagaaattgggctggttttggctggacggttgagataaagccccaatgactgttgaagggtattaccgaccattccaaccgtcacaaccgtcatagttcagctataaaaggacttcaccttctcacttcactcacacacctcaaggaatagctctcttatttctctcaagtttagtttagtagtatctagctggtggaatagaaatagaataggaatcaggagtccggaagctttcggaagagttcgggtatggctctagcagatttcctttcctcttttgtaagctttgtacttttattataatactcttctttatacatttatggtattgaaatacttttcgtgtatatgagtacctaccttacattatgttcgtgttatactaaatatacggctggcgtatctgtgagatgctttggtgcgggtataatgtttgcttatacaattactctatgtcatgacgatgatattagagtagtatctggtagtttagacgtggtgtccagattacgggatatcattatttgggattatatattgcggatgagaggtgggcagctgatggtgacagctcagtacgggtattcctccgcgcctatatataatcctaagttaattccctgggagggtattcctccgtatttagccccggttgtatggtcatgacgggctgtcgtaaggaactcggcagtcagaggtggcttctcgaagtactaggagggcatcggattgagagtattagctagtatatcagttaactagaatgtatgtatagtatgtatactagaagtataggaagagattttcttactcttttctttccacctagcttagatcatttattatgagaatgagttgttaatgcttgtgtgtcactctactcttgaattatcttaacccctgcttagaatatgattatcacaagtaatatataaattattagttgagttctctttatatgatcttcccacgggagaaaataaatacgatacccttggaatactctcgggtgaaatgctacattggtatatccgtgcgcttgcggatgatctctgtaaccataatataccaaaagtatttctggcgcctttgctgtgaattatatttctagtaatgtcgttaagaaataccaacaaagccataaccatgaaacaatcacggatatccaaacaaacaacctgaaaccgaaaccgacacagagtcggccggtcagatcgcgggctggccggtctgactgctcaatacacgtcggtctgatcggcagcacttgcccggtctgaccgaaccacatccagcagtacctgtagatcacctgtgaaatccaatcatctccaaaaccacttcgcaaataaattccaaataacaaaatcaataatttccaatacccaattgttcatcacagaataataatcaaaaacacctttagttttacacaagttgccaacaaacaatcaagaggattttcctactcgcactatgagaaatctggtatgttactgggcgaagtgcttacaagcttgctctgaatctgagtgtgatgcagtatgtaggtgcaagcagttctgcaaaagatggagaaaggtagatatgggcaaatatttggtctgcacaggttccgcctaaggtgaaaatctttgcgtggaaactcgctttggatcgacttcctacacaagaaaataagcatcgaagacatcttgctccatgggccatttgtgttatctgtggttttgaagctgaaagcagctatcatgctgttcttcgctgccccaaggcacgagagttaaggaaggaaatgaaagcctactggcacatcccaagtgagaagaagttggagtatactggtacagattggctgcttgttttgcttgattccctgtcacctactcacaaagcacaactcctgttgcttttctggcgagcgtggcacattaggaatgatgctgttcatgcacaaggtagagaagaggttgctggctcctgttgttttcttcgtacttactgcgacattctttttcctatccagcaaaatgatatagtcaacaagggtaaaggaattataggagttaacaatctaaatgttcttggtaaggataagtcagttagggttgcttgggagaaacctgaacctggctgggcaaagatcaatgttgatggggcctttatagctgagtcaggacaagctaggataggtgttataattcgggatagcgcaggtttacctctgttatcgtcctggagaatga

SEQ ID NO: 7061 - DNA, 1367 bp, Oryza sativa
ctaggatctcagatatttccttgacatacaagtttagaatttaacccgagtccttttaaagatattctatctatacatggcaccccatacccagtcggactatacatgccgtgtaggtatggggtatccataaactccacagtagccccagagacctttacagccgacgaaacaatctcttctcgtagcacagaatgataatccgagtactccgacttcttctcccctgatctcccgagtaccaaaaatcaaagactgtgaaggtctaaaaatagaaaaaaccaggtgcatcgactagatgcacctaattaggtgtagcccccgactatgtgattagttaaaaaactaaacatatagtcaagatgcaaacaacatccaaccgagtggttttataaccgaatatcatacagcaaagaatatgcggcgttcaataaagcatccagccgaatgctttagctttaatatatcaaaaatggagatatgaagaggcctgagtgagaaacactctaaagatctataaatccacacatatgataagaatccgagtaaaaactcttaaaaagatccatcaaacgtggtataaatgtgataacataacaggtgatgagtctaaatagcctaggctatgactcacgccataatcaaaataagcatataacatgccgagtaaatgactgtattaaaaccagtcatctcaataaaacccaaacagcctttgcagcctaaaaaggtgtcacgcccggaaattcactagtaatttccgaacttatttgtgcataaaatcctcgtccaggaatcagccgaggtacacaaactgacaatttaatatacagattcatcaaattaactaaaacgataagtacttacttaagaggcacttagtcctcaccatgaagaaaactgcagcggaaaataaaatctagcgaagctccggctccactcccacaggcagctcaactggagtataagccaaacgtcttctccttctggatccttattcttcaactgaggttgattgattattgcaaggtgagcatatgacatactcagcaagccacacagcaaatatgcaagtgcacaaagataccaaaggatggcataatataggttcatttgcaaaagcagcatttagcaaaacttttaagagaagtaaaaacagtggagtgattaatcagaaattttaatcaacactgaacagcacacccatgctgcacaggcccaaccattctgaacaaccatacccggctgtacagatctaactccaacccaggagctaagcaaattattaccaggtattacatccataattattgtgagaggtgtgagactaatcacgaaaaacattgctcaacccggccataaccgcg

SEQ ID NO: 7062 - DNA, 4709 bp, Oryza sativa
gccgccgccgctgccccagcccgcctgggatgccgccgccgcttcccccggctgtcctggacgccgccgtccgattccccctcctcgtctcacgccgcgcgccgccgtgcatcctccgccacgagagagactgagagagattaggaagagagatagaggaagagagatagagggggtatgatatgtgggtcccaccatttaaaaaaataaaatgctgactggactgcaacgtgtacgccacgtagaccaaaatcaccgcggattaggtcgaggggggtaattcgtccggtttgcatagttggaggtgaagaatatccggttttgtggtttaggggggtaattcagacgaccgcggatagttcggaggtaattcgtactttttcctttgtatggtgttgatacttcagggacgaattctgtgcgttactggaattggagacaaaaaattaaacaacttgcagagttgatagaacaaatatagacttcttcctaagatatttttttgttgttttgtcaatcagtcaactaaataagtacaggcctttcaaaccttggtttacacccaaaattcgtaaaaatgcggcccatatttgcaaatgaaaaataatttgtgataaaacttttatatatgtgttcttagcgatctaaaaacaaaggctgataaataaacttcgatgaaaaaaaacaaaaatcaactccaaatttaatgctgaaaacttaaattttagctgataagtataagtataagataagcgtaaaaataagaccgatggcatcgtcatgagttaaccacgcggatcatttagattctgttgtgccatggtgatgaattctgcattagtattacatgtattggaaaataacttcggtggggcctctttagttcaaccaatataaactagagtacatggctattaacttttgaatatggtgttggaccctttgtatttttttttcaaaacgttaatgtaaatatgcaaaatgtaagtcatcattaaaatacctttagagatgtgttacaagtcgcaccaaaataaatgatacttctatttttttaataagacaaactatcaaatgttatattcaaaagtcagtagctcaatttaaaggcggatatattgttatattgcacacgcttgatgcatgcttgtgtccaaattaattatgaacaaattgaaaaatatccttaattagaaccaaattccaatgtactagttgcttgtgccgtcacataactgtataccagcatgtgtcaacttaaatgtgtatccgcataggcatgacataaacaacgaaagagacctggtggcatgtgcttgtgggctgaggaaggagagtaactgctaaatgcagatttgtagggacccaacaaataaatcggaaagaaattttcatgcaagtaaagaagaaccgagatttgtacgcaagtaaatcatactggaacttccatccaaaattcataaaaatggtgtcatggtgagttaaagatgtggattatttaggttctgttgtggcatggcgatgaattttacattagtgttacttgtatgagaattgctttggtggtcgcctcctttatagtttaaatgatatacactctttttttttcagaaaaagtgtaaatatgaaaaaacttttgaatacgacatttgatcatttttcttttttcaaaaaaagtgtaaatatgaaaaaacattagcaatgattaaaatatttttaataataaagaaaggtcaaaaaataaataatacttacataatttatatttttgattaagatgaataatcgaatgttactttcaaaagcccataccgttgtttattgatggaggtagtacgatcttgcatattcttgatgtactagtttatgtaagatcaatgtgtgttttgattcttattctgtgatgaataattggcatctgtgattattggttttgatatttggagattattgtcgaagtggttttggagatgattgattttcaggtaatgaacagggttgctgttttgtcgggtccggtcagaccgggcaggtgttgctggtcagaccggcgctatgtgagtggtcagaccggccagcccgcggtctgaccggccgacgctgtgtcggttttggtttcgggttgtttctttggatatccgtgattgtttcatgtttatggcttctagatggatactatacgtatatgatactgttgtttgctaacaatgagtcaagttggggatagcttggtctcgaaatatggtttctttgtttattgcatgtgtagttgactcgatgcctcgggagagtatttgcagtgatggatcgggagtcggcttggtggtaagacgatgtccgtggtggtcagatatcatgcgggatacttaggttagagttgatgcacgtggttggtgaagattccatatggcatacgatggaggtattgtgtgcgtatgggatgcgaagtcgaatttggaaggagtccaaatttggtatgattggttatgtaaaatttgtttcttgcactaggaggtttcctatggggattaggacttctagaatgagtttggttcgtggctttaggctgtctatctcatgtataaatagagagggagcatgaggcttcccggtatcgctttgagaacaattgtgttgatagtttagttaggctttcgagtttagtcaagatttttgtaagaagtgctattggtgcactttgtaaacacagagagaagtaataaagttgtcatctactttgagagtttttcgatttgtgttttctcaggtgcggcggtccaaccggcgagttaccactggtcagaccgatggcatcggtccggtcagactggcgggcatacggcggtcagaccgcggcggcatcaggaggctgaggagactttggggcggtcggaccgggcaatctacatcggtcaaaccggcggcacaggcacggtcagaccgacgggactactccggtcagactgatctacatcgaaattgaggggaacttttatttccgctaaaagttttggtttttgagtacaccaaccatttaccccccccctcaggttggcttagttcctgtgtttcgatcctacaagtggtatcagagccacgtttgctcttcttgatctttaccgatcttgagtttttgccatggctcttaagtttgcaattaagcctgatgttttcgatggaacggattttccttattagtgtagtaagatgcaatcttatattcaacctgagtatcttgatatttggagaaaagtttctaatccttatgtgattcctgaacaaattaatactgctgttttaaaacttgaatttgaacaaaattgcaaagctcgcaatattcttttaagtgggatttctcgttcggattttgatcgtgtctctcatcttgaaactgctcatgagatttggaaagctttgaaaaactttcatcaaggaacaaataatattaaagaactttgtcgtgatcttttcaaaaaggagtacattaaatttgagatgaaacctggagaagctttggatgactatctttctaggtttaacaaaattttgagtgatcttagatctgttgattcttcttatgatgcaaattattcacaatctgaggtttctcgtcactttttgaatggtcttgatatgtctatttggtagatgaaagttacatcaattcaggagtctgttgatatgtctactttgactttggattcgctttacacaaaactcaaaactcatgagatgaatattcttgctcgtaaagttgattctaggtctagtgctttggtttcttcttcgacttctttgaatgttggtgcttcttcatcatcttcttctgtacttgctttatttaatgccatgtccgatgagcaactcgaacagtttgaggaggaggacttggctttgttatctaacaaagtttctcgagctattaacaaagtttctcgagctatgaacaatgtcaggaacagaaaaagaggaggtcctaatcgttgttttgagtgtggtgcacttgatcatcttcgttcacattgtcctaagcttgggagaggcaagaaggaagaaaatagtagagtaaaagaggttgaagtggacaagaagaagaacacgaaggagaagaagaagaattgcatgcagtggttaatccaagaactcatagcagcttttgatgaatcagaagatgaagacgagagcaaaggtaagcaagttgttgatctagcttttattgctcgtaatgcaagttctggtgttcatgaatctgacagtgatagtgaagaaaagcttagttatgatcaattagaacatgctgcttacaaatttgctaagaaacttcaaacatgttctactatgcttgatgagaaggatcacactattgagattctaaattctgaaattgatagattaaaatctttggttactaatgatgatgaatgtaaatcttgtgaagttttattttctgaaattaacgctttacgagatgtcaattctgttaattggttgaaattggaatctgagattgaaaagtctaaaaaattggagtcttcttttactcttggatttgctttgcatgctcgtgttgttgatgagttgattttgataaagaatgttttgagaaaatacaaagttgttttttgtgcaagttccttgtttaatacttcatgtgcaaatagggctttacaaaacaaagatgttttgatttctcaaaatttttctaagtg

SEQ ID NO: 7063 - DNA, 1477 bp, Oryza sativa
ttaacttacaagtgaagttaaatgtgggaaataaatttcctttaatataaagcatggatggatttaatttttattaaattctccatgattaagtcaactctttgaaattttctcggatttttcggagctcaattcctaaatgatacaaacaacagttcagtaattatttgatcattaatgatctaattatatttgttaagagtttttcttgtttaaaatccttaaattataaattgttgtttaaaaggaattattagaaatgattttaaaagcctagaagagaagatctaattttaatttgttaaatctcaatataaaattgggctagataaaattttgttaaatactttgcttaattctataattcctagatttttctaggatttatttgagctaaggaagtatttttaataaatggaattgcatttcatgaataatttaaattgaaaaaggtttttaaaagtctgttttggctttgggccgaaagccggcccaaaacctctctcttcctctctccctccccggcccagtcggcccagtcaacccgcgctccttccttttctctctcagtcgctgacaggcgggccccacctgtcagggtcgtcgttctcctcgcgccgccgccgccgcccgaaaccctagtttcgcgccgcagccgttcctttccaaatccggcgttcctttccgtttccggtgaaattgattgaggggaaacaatctttgggatctcctctaccttttctcctttggaaacatcggctaaatcggtttggaatgtgtttgattcgagttcgaatcggatcggtctctttccttcaaaccccgatctttccttctcgtcgccggccgccgtgggccttcgccgtcgcctccgagcccctttaaaaggttccccaagctcttctctacctgccgccaccctcgccttcgcctctcatcgtccgtagtgccctagcgccatgtagcttcgcgccgccgtcgccgccgtcgctccagccgtgcgccgccgccgttccggtcgtcgttgtcgctcgggaaggccaccgtcgggatcgccaagtcgtcgccgtcctcgtccgccgcttcgccatcgccgaagatcgccggagcaccatcgccgccgtcgacccgatctccgccgccgtttcaacctcgtcgccgtcgccgtccgttgctcctccgccgctcctttggtcaccggtgagttcgccgcgtcgccctctacccgttggtgctctccgttcgtgccgaagcgccgccgttcgccagcgagcgtgcgccgtccgagccgccgagccgccgccgccggtggtgacgtcatcgccgacgtcatcgtcgccctctcccgtgagccggtcgtggaccgatcgatttcggccgtccgttttggaaggatcgatttcggccggccggttccgtgaaccggtggtaagcacccggtttcactgcgaaaccctagccgctgacacaataaata

SEQ ID NO: 7064 - DNA, 24046 bp, Oryza sativa
atcatgaattagctcagctagctaggagattaaatagttgtgcagtttggcggtttgatgctgctctctgtattagaacttagaacttctgactgtaatctctctggttgagtaaaaaattcaccctttccccgcaaaaaaaagaaaggaatatgaggaagatttcagagagagctacaaattggacgtgggcgcccacgtcatcatgacgtcatcctacatgtatgcatctaagcgaactttaaactatttttttctcttaaattatttatccaaatcatgatccgattgcactattaaatccgttgcaactaaatctttaaaacaaaaccacacatggatataatccgatgaaaaaattagcttattattaaactattttttaatgttgcacgctgctgcaccaagtatatcggaattgtttcactaactagatcgaaaatgtttcatcggacgttgtttcgccttatatgaaaacaatgtttcagcaaatagcgaaaggatgtttcaattcactgcaacatttgattcatacatagtgaaacattatgaatacactaggtgaaacatttttttgtggaacaaaaaatgaaacggattcctttaatagagagtttccataatatgtgggtgatttgttgcaaaagaattgtttcaattcactacaacatttgatccatacatagtgaaacattatgagtaccctaggtgaaacatttttgatgaaacaaaaaaattaaaagaattcccttaataaaggagtttctataatatgtgagtgatttgttgcaatggcgtgcatggtggggacacgtggcgggaatggcgcgaggaaacgtgacgggcagggcgcggggcgcccgattttactcccccacgtcggacgcccggttgtaggtattcccggaagatttcggtgcaaaagggctgggataagtttaagatgcacgatgatgcaatccagaaaacaatttgtccaactattcctgtaattacaactccttatgtttgcaatacattcagacacatgaaaaacatgtgtttgtgcttgcaggtgaagaaggaaataataataaatgcatgctcatgatgctcggaaacaaaattctcaggacagacttttgggcgtaaaatctaatccatgcgtgcacatggccacatgggttagtcttacggacggcgcgacctctgccgaagccgtcagattaaagccatcacgtgtgcacgtatgcatgcatgtttttttatctcgacgcttttagcttgagagttcaatgtgagtctttctaacttatatagtacttgtatatttttaatattggatgatatatttcaaaccatgtattggttttaagatccgttttaaccattgatcccacttaaaatatatgataaaatgagtatactattgaatacattgaaatatttaaaatccaccaggtccctttccctgtttgtgacatgcccatgtgcatttacatttcatattggattatttggcacaaaagaaatcaaatatcaaaaacaagtaatggaaggtgaccgaatggcataaatctaaagtgtggaaactttcagtagtataccctaaacttatcactagtgcagaactgatcttttacagtggtacccaaaataaaaatatttccgttagattattagtaccggttctaaaagtccgagtactaaaaaatgcatctttaataccggttggtaacaccaaccgagactaatcatggaggatctttagacccggttggtgttaacaaccggtactaaaaacaccaacctggactaaacatatttttagtactgattggtattaccaaccagtactaaagatatctccagggttacactactacaaaaaccctcatagagaatggcttataggtgttggttcatttaaaaccggcacatatggagcttttcccaccttctacgacggaaaaacagagaactgacacctttaaacactataggtgccggcacctataatatattataggtacccgtttttttaaaaaaaccggcacctatagctttgagccgagcctgcgagccgagcccatcagaaccgcacaaccacacccatcgcgcgcgtccttatctactcgatcattctccgcctaatccatctaccgtctctttctcgtctctcagctctcgggtctctctccctcctgtctctctatctctctctctcgcatctctctccttctcccccctctctctatctcgtggtgcctgcccagcgaaaacggcgagcccccgtggctggcagccggcctagtggacgctgcagcggcggcggtggccgcgccctccccttcgccaaatccggtgggagggcagacggcgggctcctgcggccagcggtagcagcggcggcggaggtagttgtggtgcacctcggcagcggcgacggccgcgaaatccccatgcggcgacgacggcaggggtgaagaagaacactggtggcacgggcgaggtggtggctggcggtttgagttctttggtgtttttctttttgagttcatgagttcttgtcccaaactttttgagttctttatgctttgtaccatgcatatactattttgctgttggttttgatctcggattcaaaggcggtgatgaaggggaatagggctgggttcgacggaggatgacaacgacggtggcatgtggttggtgagttcggctcggattcgagccggctctctttttttttggctcgagcaatgctaaaggtgccggttcctaaagagccataggtgtcagttgctagtattggtgcggaccaattggtcccggatgaaaatccggcacttgtggcccatttggaaccggcacctatgaccattattttagttgtgttagttcaaaaagaaaacatctctatgcaagttagatgtgtgtagtagtgttgacggctgttaagtgccaaaataatgccgtcaataccttcctaaaaccataaatgtgaaacatccaacatagtggtaagatttatttctaacaatttccacgagtgttgatgtatacttgtatgcaggtgatcaaccaccaaagttgggagagaatgagcataaagagtggaaatatattttgctctgatgaactcacatggttttgagctacaatatataaaatgtgcaattatttggagccaaaacatggagcatcatgaagtggggcccacatatcagcatcctgaagaaagatgtgggccaggggagccaaccatggtttggccaaaccccggccgaacccctagctggcccaatccagcccaacttcggtatgacggttgtgctcctcatactatgacggttacgggcgttaataccggtagaaaccgtcatcaagaggacacatggcaagaggagaaggaagatgctctttggattctatgtagaatattattagcatctccactctcccaagcaagctccacactataaatacccctctcctctccctcattcacacacaccaaagcatgagctgaattacaagaggctctattgtactttattgtatattagaatagggagagagtaaggtagaagaagtcagaggaatcccagagttgtcggtaatcctctcttatcttttgtcccggtacgtagtagagcgacatttgggaacagtgggttgacagtgcctggtgtattgcgttaggattaaagttaagctttccctagacattgtttctcattaggaaatcctctctgccctctgcccatattagttttgtgtccttggatgaacctgacgaggaaatagtcacacacgttcccttggattcgatacccttggaatactccgtaggggaagtgctacatcggtatatcagtgcgcttgcgtatcttatctgtgatcgtaagaaataccaacaagcatttctggcgccgttgccggagaacggttgctgtttatctctgaaccttgttcatcctcgtatcctctttatttttctctcttctaccttcacccctactaccccagagaagtatttctgaaaaaaccttctcaaccgatggagccattatctatcttccaattatctactcctcggggtgaattttacgagccacctgcttcatcggagcctattttgacacctggctatgaaattcgtcccaaattcatcagtatagttagggagaaatatttctctggtttaggccaggaaaacccctaccatcatctgcgggaattcgaacagctttgttcgtgcttaagatttgaggcatgaagcaagaaactgttcggtggaaattgtttccattcactcttcatgagagagcgtaacaatgggtggctggtctgtcctctgggatagtccaggcagctacaaagtcagcgaggacctgtgacttgacggctgttttaggcacgaagtggacattgaattggctcagctcgactacccatttggcgatttggccgaccatgtctttattcctgacgacttcgcccaaagggatggaggagacgacggtgaccttatgagcctggaagtagtggcgtagctttcttgatgtcatgactacagtgtagagcagtttttggatctgtgggtatctagtttttgcgtcgtggagggcctcacttacgtagtacacaggacgttgtacttttttccctctctacgatgataactgtactcacgaaataaggcgtggcagcgatgtacaggaataattcttcattgatttgaggaccaacaagtacagggggatttgacaagtagcacttgagcgcgataaatgcgttctcggcttcttggttccacttgaatttgtcttgcttcttgagcagggcaaagaagggttgtcctcgttctcccatttttgcgacgaatcggcttagcgaagccatgcatcctgtcagccgctggatttccttaagccttgtgggcaactttatgttctcgatcgccttgatcttctcaggatttgcctcgattcctcgtcctgaaaccaagaatccgaggagctttcctgacggtactctgaacgtacacttctctgggttgagcttcatctggtatcttcggaggttgtcgaacatttccctgaggtcgtcgattagtgagtcgatgttcttggtcttgacgacgatgtcgtccacgtatgcctcgacgttttgtccaagctgagtgccgagtgctccctggatcccgcgctggtatgtgttgcctgcgcttatcaatccaaagggcatcttggtataacagaatacaccgaaaggcgtgatgaacgctgtcttctcctcgtcctcttttgccatgctgatttggtggtagccggagtaagcgtcaaggaaacttaacaactcgtaaccggccgttgagtccaccaattggtctattcaaggaaaagggaagttgtccttggggcacgccttgttgaggtcggtgaagtcgacacacatcctctagttcccgttggctttgcgtaccattactgggtttgcgagccactctggatggaggacttctcttatgaagccagctttgagaagtttgtcgagttcttctcgtatggcttgtttttgatcgggtccgaatctccgcagtttctgcttaactggcttggcatcaggtcgcaccatcagtttgtgctcaatcacctccctgggtactctcggcatgtctgacggctaccaagcgaacacgtctacattgtcttagaggaaggtgatgagcgcaagttcctatttgtcgtccagcgttgccccgatcttgacggttttgtcagggttggcgctagacaacgggattatcttgatggtgccatctggttttggcgtcttcttgggcttgctcactttgttcgggttctctgttgtggcgggcaggttgggagtatgctcgatcatgtcaaggctccgcttgtcgcactacactgccaacttggcgttcccctggatggtgattgtcccttttggtcctagcatcttcagcacttggtatgcgtagtgcgaggccaccataaacttcgcgactgcagctctcccaatgatggcattgtatgcggtatcgaattccgcgacatcaaaggtgatctgctctgtttggaaatttttggcgtgtccgaatgtaacgggtagtgtgatctttcccaacggtttagacgacgattccggggtaattccgtggaagggctgatctgttggcgtcagcttgcttcgagttattctcatcgtgtctaaagtgctggcgaagagtaggttgaccgaactcccaccgtcgatgagaactcttgccaccttgatattccgaatagtgggttcgaccacgatgggatatctgccaggtgtagtcacgatcttggggtgatccgcttccgagaactcgatcttgtgctgggaccacttcatcttggtggtagtcatctgcgaggtggagcagacttcgcgttccgctttcttgtactccgtcttagaggtgtacgaagtggatcctccaaaaatgtgggagacatgcagatcgtactccggcaaggcagagtcagagttgttggtggcagcttcttctgccgtctcaacgactcgtacttgctttcctctttcgattgctagttgtctcgcgagctcctttttgacgacgtagtagtcctccaaggcgtgtttgcttgtcttgtggattgggcaccatggcttgcgggagtcgtcgccctgggggttggagtgtctggatggttttgcttgctctgtggcaaggacctctcctgaagatttgcgttttccactcttgtgacttctcttcttacttgactctggtgcatctttatcggccaacttcttcttctcatctcccattttgcttttcccctcattgcgcctcaaagcgtcgtctgcgtgagcgcacctatcgatgatctcgaatagttttcggccagatgtgattcagtgtgttgccaactcctgagtagtgtatcgatctcggacgccagacttgaatgctcaaatgacagaagcgtcggtgatctcggggatcgtatttctgcactcattgaggcgccgaatacagccccgcaatgactcgcccgggttctgggttaaagtatgtaggtcgtcctcaatcgtgtggcgcttgtatgtcccttggaagttgtcgacgaactgctgccacaaatcttcccacgaagagattgagttcggcgggagatggacgaaccatgaatgagcagaacctttcaacgcggctggcagatagtttgccagggcgttgtagtctgcgccagcggcttagagaattgtggggtagacttgcaaaaattcttctgggtttgtacttccatcatatttctcaattgatcccggtcggaacttgtcgggccacctcacattgtgaagtgcgggtgtgaatgccctgcgtccgttgcctgggacatcatgtggcccatggtcgcggcgtcgtcttggaggccaattcgaagaagatgatgaagatgaggatgaggggtcgcacggatcaggagcccggcttctcgaacggtggtcacgtccgcggtctcgactcggatgagcagattgggagtttcgatctcatcagttgccattgtccctctcctgtctttggtgatgatttttccgatcacggttgttgtcgtcacttcggtcatcacgggttcgtcgatcttgatcctcgttgggggtgttcccgcgaccatcgtcctgttctcgccgcaagggagagcgatgacggtgttgtcggtgtggatcaccgtcttcatggcgagaaggagaacaatggtggtgacgctcgttctcgttgcgttccctcctattacgccgatgtccgtttagatgctcgcggaggtcgccatcttcacggcgtggtggtgtagggtcacgtcttggaggagagcggttgccggtggcatgtctcccatcgagattttcttcctccgcatccccggtgggccgttcttcgttcatgttcggctctggaccgcctgcggcttcagcgaacgtggtattgaggttggtcacagtttcccgtagtcactttgcccatcggctggcatctgggtttgtcaccagatacaaaggactttccctcaaaatcgcatctacgttgcgcaattgatgagctagcgttctcgctgctacgaacatgcttgtttcagtgttgtcgaccacgttcacttctctaggtgactgcaaagaggactcgtagccttctaagaggtgtaacacggatggctcattcgcgccgatgaatcccacaaaccgatctggggccgcaactggttccttggcaacgcatggggtttgaactcgtggttgctgaacgcgatgatgcgccggtttaagggttctgaggaagatcctgcagttggtgagatcatacactttggatctatggatcggaaagtaggtggtactcgttggtgaagtgcattgtatccctcgttcccaacaggcgtagagttcagcttgcacatggaatatcaccgggcagtcctcaagagcatgcttggttgtcttatgcacaggacaccaagttctcggtcttagggtggtcgtccttgtcggctttgatctttcacatggagaatgaaattcagctgcttgaggatacctcccaggtgttggggccgtcgatgttccgttctccaccggagtgggaggaattatcggcggggcgtcgtttctctcagtcgttgccgtacccttctcgctcccgatgacgatcggaccagtcgagattgttgtaacgatatagaccggaaagacaatagatccgacttgagtccacaccagcggtgtcgaggtagaaactccttgattggcgctggtgatgagactgttgtcggggagtcctgaagtcatactagcatatccataagcgccaagtgcccctacctggcgcgccactgtcgacgagtggtactcgcggaccgaaagaatagggtattggcgtacgttggaacagggatctatgtagtacgacattaaaacagacaaaagactaggattatactggttcaggccccttatcaggtaataggcccagtccaatttatatgggattgatgatgatgaggacagattaccaagacagtaaccgaagcaagcgatactgataagatcgtagtcgagggattcgacgagatctcccggcgagttgactccgtggacttcggttccgtaaactttggtgggtgtgttggcgatgaaatgcgatgatctttgcctctccccaggggtcccttttataccgtggaataccttgaccctcaagtaagtcttggagatatgtaaacctacacgatatactagagatttcaccctttccgaggacttatgcaattccttaacttcgtggagttattttccataatctgaggtgaattcctaacggcgtatatgggaaccaaccttatatgcgaaggtataccttatcggtatattccataagtcgtaggatagagggtatgctttatccgtaaccctgacacacatctaccgtcgggtatgtaaacggtgaccgggagaaattgcgagacaggttatgcctcgcattcttccctataacccgtattactactcttcgtgtagaaattctgagtttccagcagataaataaagaatcgattgatgcagcctggtccaaattcactaatttagttcagtctggcccaaccctatctatagccgattacgtgctattgcaacattttcaaatgggtttagatagggagtctgcattctaccttgacataagtgctggagggtcattcatgcacaaaactcccgccgaaggcaaggaaattctcaatcgcatattagaaaatacctcctttgtcgggcagtatgttgaaccccatcaagaagcatgtgtcaagaagggaggaaccttcttttgccgagcctaaacccgagccttcaacatcttcaggtctgactaaagagtcctccctggagccatcgccggattccaatgaaattcaagctccgggttacgctcctaaattcagggatgatcctcataccgattatgagaaaaccttgacaggcatcctccctgataacacgccgatagaggaagtaatgttagttctgcttcatgaatcccctgaatcaattctacaacaggatgatcttcatttcattcaaaaagattctggtgagacccttgaattgctctccatagaaccaccatcacaacctcctatcgagcctaaaccttgtccctctggccttcaaaacgtcgttcttgataatcatcaagtatcaacctcattcttgaatgacgtctctcttgagaaggagaacattcaggccagggacaagtttgagacatcaactctggaggatgagaactccacaaatgagcatgaaagcttctatttcaaaatcaaccaggattcatgctcacataaggaatctctagagtcttgtctgatcagtgccgcttcttcgtgcgaggaccacaaccaccttatggtcctcatttctaacatgattagaagtgtggttgtggatgctttcatttatcagaaatattgcaaatctcgtatgtgtttgtggcactaatcttgcagcgagatgtctccatggtcgagcctgtgaccaaaaacaaagcactgtcgggagataccccagattatcttggtaagttttctttccaataaaagcaagaaccagtttttaggataatatgcaccttcgggtattcttggtcaataaccatttcagattgagattaagaacgagggacgtatgatgcctaagaatatgggagctacatcaactgttcattttggtgatccttggtgctgaaacacactttatgaagactccaacaacacacatttggttttgatgtctcgtgacacaaaagtccaagtgtgagggaggccgacgagcttgcatgacgagttccatcaaccaaggccattttggtttgcagtcgatgttagtcttaccttgctgaaaaaaagagaaaaaaaagaagaaaaaagagagaaaagtaaagaaaagagtgacggaagaaaaaaaataaaagatgggagaagaggaagagagcaagagagctggcgggctgcatctagatcaaagaccgcattatgtgcgagtctttaaaatatggtcatacacctcattagtagcaatcatgctgcctggctacaaccagcccctctcttgagctcatgtgcagccttggcttagccttcatccactcctagctgtgcacaacctctcgctccagcagcgcctacacgcatacacgcaagaggagatgccctcttcttttctaggtgtttgatgctacactccagttggcacttgcatatttgcccaaaaagagatgcatcctatgtctctacagcattgtgccaaaaccactcgcttgagttggtgtggtcaaagtgccttcctccgccacaacccacatcaagacggaggagagatcgacaatcacatgtgaccatgccaccgctctagaagtttcaacatatacattatgctggcagtaagtacactcaggtatacaacaaaagattcaccatttcttttacttgtacttatctctagttgagtctggcttgatcgtacatggttatgcgtcctcgggtccattttcatatgctatggtttgggtggtcgtcgacattcataggctttttaaattaagcatgatgcttaggatagatagcctgctttaatcaaagttaacatggtgtcaagtttgcttcaatgaaccatagagccagtactttcatggacttcggatgtatacccttcgtggattaaaccttgcaggaaatcatttcaatttaacggatgagttctcaagcacgagtcacactggaggtaagttaagggccaggaacaaatcaattgccaaaacaggcaaaggagaaacatatcacctctcaaggtgcacggtatgtatattgccaaatgctgctttgctatgttatgtaactttatctcaaccttgtatgagttttgcttaaataaaagtttcgtgaacaaaataaaaattgtttttaagaataaaagaaatgtctctcgaaaaaaaagagaaaaaaacatttttttctctcgagtaaaaagaaaaaaaaatgaaaaaaataaatggcaaatttatgggatccatgctcattaagttttcaatttaattcctttttaccatggatgtgatcaactaatcttgaggctacgataaaatcttttcaattttttgtagtccctcaggtatttgttgtccactaaccttttgcaggaaatatgtacaataacctcaacattcgtaccacgctccttggactatgagaagacagatgctcagggaaccaggcagaacaaatgcaaagttgtgttgcattcttgcatccgaatcaaagcttggtaagtcctatctagtaagaattcgaaacaccctgtgtatcattgcgtcacaaatgtccaccctgctaggttacccatcacctctattgctgccataaaaaatgataaaaaaataaaaacaaaataaaacatgaaaaaaataaaagaaattttaggcacttcatgcgcctagaattacttgaataaaatttggctcaccggtattctaccccgatgaaagcccattttgctttccatctttttgttgaataaagacaaggtacaaaacaagtgtgggggagtcttttcggaactcccaacgcacaatagaatcaattcaacatgacaacatgatgaacactggccaatgactgcgcacaaaattcagtagccagaaccgagtcctggctgggtcggttgaaccaagtgttcgcccaacccttgcctggctcggtactgtcatccttcgccgtatggtcaggtttgcgtgtctccttccttatcctcccttgtttgtgaattaaactttggtagaaaaatcgaatataatttagtttgactccaaatgaaatattgaaaacattaactctcaacgaatagaattgccctatgaatgatcatgtatactttttattctttgctaacacttgtcacttgtgaacaaccatctatcataggaaaccttgctcatctatgtaattaatatttgtgatatggttatgacgaaagaaattattgtccaactgtcatgatacttgggattttgttttgtgaaaaataaaactttttcgagcaatactcctcagtgactatattattaccttccaatgccatatatgattatcattgcaaaaaccttgtatatgtataggctgcttgacattacattgagccttgtcaaattattgtgacccgtgtgagatacttttcatactttcatgatcaagatcgcacgcacactccacatacacacactatgctaaacttttacactagaagctagcatttctcatccattatttattttatccattatccacaaaataaatactccatgtcatttatgcttcttcctccaaaattctttcaaagaaaaaaaacagagatagagagaggcatggctatgcaaaagaagaaaaaaaaaagtcttgctcatacaagtatggagcattgatgaaaagagagagaaaatagaaaaaaaaatcttgttcatacaaagtatggggcatgatgaaaaaaaagaagaaaagatatagccatgcagtctcaaatttccaaagagagaaaattggaggaggaggtatatcaaaggagttgtcttctattttcctttttccacccataaaacaaccatacacatacatacccatacacatatcacacacatgcacattcttgatcagagagtatgacttgctatctcctagggtccgatattttggctttgcaatatatgtgatgcaggtatgccccgattgatccctaccgacctccacctatatagccttttagaatagggacaattcggcaaacatgccttggtgaggatccacaaataaaaccacatgagtgatctgagagaaggtcatttgaggagtatagctactttgcaaaaatatataaaaaccccaagagattgacaggaggattaaggaggacttgagtcatgaccgttctattcatcaattgcccaagatgataagttagacacttgaaaagttcacaggtacaggtatagcttagagtaatttgtgtacttgtattatatcttgggaaaatttattccacattaatccttaacctttactcgggacgagtaaagagccaagtttggggggttttgttgacggctcttaagtgccaaaataacgtcgtcaatacctacataaaaccataaatgtgaaacatccaacatagtggtaggatttatttctaacaatttccactagtgttggtgtatatttctatgcaggtgatcaatcaccaaagttgggagagaatgagcataaagaatggaaatacattatgccctgataaactcacatggttttgagctacaatatataaaatgtgcatcatgaagtggggcccacatgtcagcatcctgaagaaagatgtgggccaggggagccaaccaaggttcggccaaaccccggccgaacccctagctggcccaatctagcccatcttcggtatgacggttgtgctcctcaaactatgacggttacgggcgttaataccggtagaaaccgtcatcaagaggacacatggcaagaggagaaggaagatgctctttggattctatggagaatattcctagcatctccactctcccaagcaagctccacactataaatacccctctcctctcccttattcacacacaccaaagcatgagctgaattacaagaggctctattgtactttattatatattagaatagggagagagtaaggtagaagaagtcggaggaatcccggaattgtcggtaatcctctcttatctcttgtactttgtttattactctgctttaatagaaatatcattctgagtaattgagatttgcgtagtgataattacttcttggttagttcctaattagcatacgggatcattgttcactatagtccatttatttatagtgattgctttagtgtttgatcggaactagagtagttattaattgcgtagacgccgtgtctgggtaattaatcttcagtggttgctgcgtatcgcacagtacgtttgaggtgggtgtagaggtggaaacagcgggttgacagtgcctggtgtattacgttaggattaaagttaagctttccctagacactgtttctcattaggaaatcctctctgccctctgcccacattagctttgtgtccttggatgaacgtgacgaggatatagacatacacgttcccttggattcgatacccttggaatactctgtaggggaagtgatacatcggtatatccgtgcgcttgcggatcttatctgtgatcataagaaataccaacaagtagttgagatggtaacgtgcgtgagggttgaggtcagagatctttagtttaaatcccacatcgctgacattttttcgacatcttaaggattggggtacccatccttaaaagaaaacaactgaagccctagcctactctaggctcctatggattgctaaacatgtccatttagaatagcagaactcgatgataccgacgagaccatagtcgagttggttcgactagatctcccggcgacttggctcctgcgtgctctagctccgtaggctgtggtggatgtgttagctttatgttgatctattgtaccgtctcgtgtcccctctcctcctagggggccttgtatttatacacataggtgtccccttgtccaagtagaactagggaaacctatatggatacaatccgagtagtccttgttatttccatgtagaactctgttcatccttccttatgcggaactcctcctatatccaaaggttgtttccgtataagagatggtatgtggtgggtcctgccgagatttagtaaactactattaggtatgtggtatccataaccctgacaatagcccccgacttcaataaaaatgaacaaatttatattctcaaccgcagaccttggagtaactattatcgagctcacgtgagcattctcggtgagttcagagataatgttagacttcccttatcagcctcgtgcgggcacctgtagggtttgtctgagtcaatctccgacgtcaaccaagaaagtacaaagcatacgactaagtctgtcgtgttgctgtaatcgagaatttggattgaagtcaagaatttttatctcagcgggtacaccatctcttcatttcgtattccttgtcaagatccaccaaccgttctcgaatgatcgagaaggcgcagagtctacgacggagccttgtcaacatttttcgtactcgccttagtcgatcttggtatagaaccatagagacatggagtcttcaacaatgtcgaatagaattttcctgaaatcaacactcaaaaaagaatattagatagaaatagcccctgagcgaatgctcaaagggtgacatgttataatatgtatggaaaactggaaatgaattaaatttacagaccaatgttttgtgtacaagtgtcttctcttttaccgacttcgatcagtcagtttgttgagtcatacactctacctagcccccagccttgtcgtcggagaatcgttctcggaggataaggctcttggaccctcgacctgccttggttgaaaaagcactgatcctagcccccagccatgaagttggaaaactcaatttctgattacacggcttggttaatacgcactgcgagaaatcttacatgaccagatcttacatggtcgtttgtctttacatgatccgataaggccttatccgctctaggcattgctagccgaagttcccttaggttcctcagagaccttgtcggaacggcgtaaagggacatgaggataggtttcaactctaggtgtcgtcatggtaagggatttctgggtaaaacgcttggcgatactgtgtacctgatatcaactttgttggagtaaaggtagcgggagaatcgctacaccgctggtcggggaccaggggtagtcataactcgaccacttgaagtggatgcagtgggagaaacgctacgccgctggtcgagaaccaggggtagtcataactcgaccactagaagtaaaggtagtgggagaatcgctacaccgctggtcgaaaactaggtgtagccttaactcgaccaccagaagtagaggtgggagagatcgctacagcctactggtccgagaaccaggagtagcctcaactctctgccgattgatgtcgaggtacgagagatcgctacggcctacttgtccgagaaccaggagtagccttatctctggaccggttgaagtcgtggtgcaaggaccactacgctgctggtcgaagacaagtcgtagtcgtacctcgaccatctgaagtcgtggtgcgagagattgctacgatttattggttcgggaaccaatgagtagaattatctctcgagcaccaatggaagttgcggtgcgggagatttctacgatttactggttcgggaaccagcgagtagaatcatctctcgagcaccaatggaagttgcggtgcgagagattgctacgatttactctgggggcgctaaagttggtatattacatgtgcatctcatgtggccagcatgactcacatacccaacttatagcatatccagatgtctgttcgcaatcatgtcgggtgatcaagccgacaatgttcacgaggaattatccgttaacaaccttttctcgaatagcccagctatggccggtgctatgagataggtcgtcggtcttcgttggtaggttgggtgcgataactctgcatttgtcgagaacgttctcgataatggagtgtgctcgaccacaacctactcgagtgctcaattgtttctgaaaaatattttctagaaggcaagacatgtagcagataatatcgagtatgtactcaaaaaactgcatggatcttctagtattatcaggatataacgagcaaattaaatatccgggattatgtaaaccgtaaacaagcatgatttatacagaagaaaatagagcgagcccccagcgttagactgtagttggcctaacatcggtaatactcgcacaatagatattgtataaaaaacatgctctaggtaaaaataaattattgatctgacaatgttgtatgatctaaataagtacgataaattgcatataaaatgcgtacctttgtagatatatgtcggatgtatctacaaaattagtagatcaatttgaaaaaccaatctaccaattaccttattgcgtactcgttcgacatcatatgatctgacatcttttggtacgccgcgtatcttgaggcttggatgatctcgatagaccgagttgtcgatgacgatgatggttccgatcttatcggggcacgtactctggtttggtttgacttctcagatctaaagtagttgaagtatccctcgtcaaaaaatccatagtgacgatgtcttggcgaagcttgacgaatatcccgatccgcctgagaacgtacttcgttcgggtcatatcatccagcataagaagtcgttgagtagtttgttgaggaatccatctcttgaacctatctcgtcaaaatcctgaagcaccaaaatccccctacctggcgcgccactgtcgacgtttgatgtcacgattccggtatttgcatagtatggggatcgttggtactaggatatacgcgagattgtagtaaaagagatggggacgaggatttttatacaggttcgggcccctgaattgtcaggtaataaccctacatcctattgatatgggattatatgatggaaaccacagattacaaagggaatagcagaactcgatgataccgacgagaccgtagtcgagttggtttgaccagatctcccggcgacttggcccctgcgtgctccggctccataggctgtggtggatgtgttggcttgtatattgatctattattccgtctcgtgtcccctctcctcatagggggccttgtatttatacccataggtgaccccttatccaagtagaactagggaaacctatatggatacaatccgagtagtccttattgtttccatgtagaattctattcatccttccttatgcggaactcctcctatatccgaaggttgtttccgtataagacatggtatgtggtgggtcctgagatttaatcaactactattaggtatgtggtaaccataaccctgacaacatccaacgaccagatcgaccccacgatccccacgccctatttcctgccgtatccaccctcacgatcccggccctacgccctcaccacttcccgcattgcccccaccaatgcgctccttccctcccccgcgatcccggccggctcctccaacacgcggccgctgccaccagatcagcggaaatccgcccgcgcccccaccctcagcacccattcctcccgctgtgccgtccgttgtcgccgtcgtccagcgccacggccgccggaccggcaagaatccacgcacgccctcacccccagcgccccatccctcccgccatgcatagggccttcatcctgcgtcaccgccgctgccggatcgacgggaatccgccgtgcccccaccaccagcaccccatccctctcgccgttgctccgtatcgcctcaccgtgcccttcgtcgtccaggaccgtcacccacgacaccggcgacgaatcaccgccatcttacacttccattgcaccgccgccgtcgtcgtcgtccaacacagcgattcgccctccgtcctccacgcccaccgcgcccttgcggccattcacgatggtcctggaagaatgccattgcagcgcccaagcttagcctccgtcatcgatgatgcaggtctgcagcactacgtcaatatacctacgtccatgtcccgcgcggctcatcgctgccaaccccgccgacgaggtaactagatttaaagctcattgctttggttcgatggattgacggccgggcaacatggatcttagttcttcgtaccgaaggttccagcagaatgttgttgatcgtgatctttgttaacacagaaccccagttactactactttcgttacagagatataccttttgctttggctccagcatacaaaaaaaaagggaaattaacatttgctatgaagtatataaattgaacttgtaggaaccagtcctgagggtcaacaattatgacagcattaatagaggatgctgctgcaatgtcatttgtaattgcccatggacttttggtaggtcagcctagccagccattcgggtccctacaaagagagttaaggtttggtattcaatcaagctgtgaatatggtggtgtttggttccaggattaagctttagtccatgtcatatcggatgtttggacactaatttagagtattaaacatagactacttacaaaactaattgcataaatgagagctaattcgtgagacaaattttttaaccctaattaatccataatgagcacatgtttactgtagcatcacataagatgatgatggattaattaggctcaatagattcatcttgcaaattagtccagggttatcaaataggttttgccattagtctatatttaatacttctaattagtgtcccaatatccgatgtgacagggactaaaaaaatccctggatctaaagagggtctatgttttttttctactagaaaaaaataccatttcgttgcaatgggtgaaggctattttaatcttattattgttatatggtttatttaagataaaattcactgttaaattcgcttggatacatagtttgttagaaaatcataagctgcaattaggaatccgatcgtctcagagttagcatgcgagttttctaaagagatttcctatacaatttcttttctatttccaaaagggaacaaacttaaaaaccaactcaaatacattatagttccaaaagcgaacgaatttaaaaaccgactcatacacaaatgacgtatcaaagtaccggtaaaaacatcttaaattttttataatagtagagatcatggtccagcctgagttagagttcttgacttgagacaagggtacagcaataactgaccaactgaatatcctaactgacagtccgatagtaattcttccagtaccaatattgccctgtttaggatgccaaaattcagaattagaaagaattatactacttcaagcagcttcaaagtaaattccatactattattactaccactgtaattattccatactgtcataactaccactataattagtgcaattatacgcataattgtctcataatgaactatttggttttgtcgcagtgcactttaatttgtgctgttcaatgctcgatttgggttgctgttaattgctgtggagtggagctgtatgggaattgctcaattctaaacacacttagttatagggctaaaaaaacaagaatttcaggggaaatcatccatattgaagtttagttagatttgccaacttattaacactcaatccctagggggatcaaaggaaatgttgtgactgactaaaatgttggtcggccatcaagagacacaaactatttggttttactttgttaggatgatttcctatttgcaagaaccatgcgagtacttttctttgtttttcctgtacggaattaaggatttctacgaacatgataaaatatcatctcttttggattgtgatttattttaattgtgagaattaacaaatagtgtatgtcttagtctgaatttatacctgagactgtcaaaaacagttgcaagggtatgccatatgtagttgttaatatctatggatcaatccatgtgggtagccaattgtacgacatatagccatgtacaggtaagcctggtacatttgtcaattgataaatatatgaatatgtatcagatacaaattattgttatttttttcctccaatccattcttaactatctaaaccactaatttacatataagcacgaaacagaaagtaagcaagtatcttaacacattttcagcatatttgaaattgataatatgctagactgattactatctgtaaataatgctatactttctaataaaaaggtttaataaccatgccgcttctttcatttctgtagctactatatcatgatgaagcaagttgggtatgtcaatgaaagccaattagaccaagagcagcagatctctgctttataagggagatgactaatcaggttacccttaattccaaagtagtttttgcaatgaggatagtattggattttttaaaatggtaccgctgagtgtgagatgatcagtacagttgtcaagaatacaccgctatcatttagccttcagcttatcagcataagcgataatttgaattttaaaacttaatttagagttgatttttaatcgctaacaagttgtttcacatataataagtttgagcaaaacgatgaagcctataaatgtcattttcaaaaatgagatgtgttgtttgaggggcagcttaccaatgttctagcggaaccagttgaaggtattttagattcacccaatgaagaaacatgcaaaggttctttaatgtcagacaaaaccagctattcagatctttagtgtaatatctcatcttttgagctcaatggacaaactcaataataacttcttttgtaagctagagcatcatggttgaagtgttgttgaatcgaagggcaaaagaggaagctccaagtttttgatttagatggacaagtgaggtgcacattaaatccaacttccaacttgatgaacaatacaggtcctcgacactattctacttgatgccaagagtgtggacatgaaaggacatataaagtcattgctaaagctactttttttagagagtcttggcagttagttttaatgaaaataggtgggtttttaaataaaaacaatataaatttgaatttttgtgtttcatgtgtccttaaaacggtctttgtgaagtttgttatcatttggactcatttggagagaactatccacaatggagaaaatcataagcagattgtttcttgctattattctgagtttttgaggggtcgaatgacattttgacccatcgttttatactagcaaatgaataattgaattgtttcaattctgttttgtttgccaagtttgattttatatgtcaacgatccagtaagaaatctagcagcgtaaacatccctatatgttctctacttgctaatttggggtgagaccaataattttagttacatgatagtgattttgctacatctaccaacatgtaatatcttgttcctacttgatagaatttatgactgaagacaaatttttgtttgatgagatggtcaaattcaaaattggtattttcacttgaatgattttagcaacacgtcaactttgttagctttaaaatgcttttatacccgttgcaatgcacggtcactaaactgtaggatcgaaacacaagaactaagccaaccagaggggggtgaatggttggtgtacccaaaaaccaaaatttttagcggaaataaaagttaccctcaatttcgatgtagatcggtctgaccggagtagtcccgtcggtctgaccgtgccagtgccgccggtctgaccgatgtagattgcccggtccgaccgccccaaagtcgccttagcctcctgatgccgccatcggtctcaccgccgtatgcccgccggtctaactggaccgatgccgtcggtctgaccagtggtaactcgccggttggaccgccgcacccgagaaaaaacaaatcgaagaactctcaaagtagatgacaactttatttcttctctctgtgtttacaaagtgcaccaatagcactccttacaaaaatcttgacaaaactcaaaaccctaactaaacaatcaactcaattgctctcaaagcgatactgggaagcctcacgctccctctctatttatacatgaggtaggcagcctaaagccacgaaccaaactcatactagaagtcctaatccccataggaaacctcctagtacaagaaacaaactttaaataaccaatcataccaaatttggact

SEQ ID NO: 7065 - DNA, 12790 bp, Oryza sativa
atttcccccctcttgattgcacgcggcgcgaacgggagcggcggcatttgcgggggcggcggcgctagggcacgggccaggcggcgggagcggcgggaggtaagggatgacgggtgggccccacctgtcagcgagggtggcgagcgggcccgcccgtcagcggcacgcgcgcggggaggaggccggatgggccgcgggggagaggagagagagggagggaggtgggccgagccggcccaagagggggaggggggaaaaagacttttttgggtttttctttttataaaacctttttaactttgtttatttcttcttaattattatttgtgctctgaaaattccactaaaatttatttacgcattttaggcttttaggaaatatacaaaaatcctccaagccttatttgacttttaactttgcacattttaattgttggaggctttcacacggattttaaattattctaggcataatttagaggatgtattttagggtcgttttgggacgcgacagtatagcatggttcattgcagagcaccggactgagaagtggcggagataagcccacgggggtcgctggggagtccatgcctctggtttttgagggggtgattatgatccaggaatggtgcactgtggttgattgtgttgtgcgaggggtaatgtcacagctcctttccgaggtaccgtggtggtactgaggcacatggtgacatgatgtggggctgtgtcttgtgggtacagtggtacacctctggccagagtaaaactattcgaatagccgtgcccgcggttatgggtgggttgagcaatgtttttcgtgattagtctcacacctctcacaataattatggatgttatacctggtaataatttgcttagctcctggtttggagttagatctgtacagccgggtatggttgttcaggatggttgagcctgtgcagcatgggtgtgctattcagtgttgattaaaatttctgattaatcactccactgtttttacttctcttaaaagttttgctaaatgttgtttttgcaaatgaacctatattatgccatcctttggtatctttgtgcacttgcatatttgctgtgtggcttgctgagtatgtcatatgctcaccttgcaataatcaatcaacctcagttgaagaataaggatccagaaggagaagacgtttggcttataccccagttgagctgcctgtgggagtggagccggagcttcgctagattttattttccgctgcagttttcttcatggtgaggactaagtgcctcttaagtaagtacttatcgttttagttaatttgatgaatctgtatattaaattgtcagtttgtgtacctcggctgattcctggacgaggattttatgcacaaataagttcggaaattactagtgaatttccgggcgtgacaagttggtatcagagccatctcgactgtaggataagccaaatggtcaaaccttaaggactaattttccgaaaacatgatttgtgaaaatttctcctttcttccttatctagaattctttgcaaattgtttcattgtctactcccctttctctttcaacttgagtagttctgagacattgaaacttgaagacgccaatgaggtctacttaaacttatggaggccagtcaagtggatcgaggaagaaccgaagtgccaagtggtcaagatggaatgaagtttggatcctaccttagaacctatgccgccaaagtgtctttgaggaatagttagtagggtagaacgcttgttgtttgctttgtgtgtaggtatggttgcattcccatcattggagtagttcattgatgagtgtgtaactatactaggttgcttgcttaatcaacttgaacaatataatggtctacacacatcagatcagtattaacctggttaaggtcttgtctttagtgtaacccctctccttctatcttctctaatatgcaacagatggtgaacactcgcgccaatggaagtggaaacaataacaatgaagggaacccaactcttgctcaagttctggctcaacagactcagttaatgaacatgatgatacagcagatgcagaaccagctcaaccaagggaacaacaatgctccaccgccgcagaacaagttagctgattttcttcgtgtgaggccacctaccttttctagcactaccaacccagtggaagcaggtgattggctatacgctgttgagaagaagttggaattgctccagtgcacggatcaggagaaagttgttttcgcttcacatcagttgcaaggacctgcatcagaatggtgggatcattttcggatgaacagagcagaaggacaaccaatcacttgggtggagttcacggaagcattcaagaagacacacatacctgtaggagttgtttctttgaagaagcgtgagttcaggacattgaagcaaaaggatcataccgtggcagagtatcttcatgagttcaatcgtctggcacgttatgctctagaagatgtgcgtactgacgaggaaaggcaggagaagttcctagaaggcctgaaggatgaactgtcagttacattgatctcccatgactatgttgattttcagcagctggttgacaaagcaattcgacttgaagacaagaagaacaggatggataaccgtaaacggagaatgactgtattccaggaggcacaaggtagtagctagaggcagcgtatcaagccactccaaattggtgaatcttcttccgctggtcaaggacagtcgcaacaattgaacatcgctggtgagatcaaattagagactaatgaaagcaatgaagataatgttgagcaagctactcaattagtgccagttcagcaggatcagtctcaagagaataacagtagtggaagggagcagcaggtatgtttcaactgttacaagccaggccactttgcaagagagtgtccgaagccgaagcgtcagcagccgcaaggtcaggtcaacaacattgtcgtcacaggagccaatacagtgccagttgcgtcttcaagagttgcgttttcaagtgttacagctcagccaccagtttcaaagcagcagtagttttctttaaagccttagaataattatcggagttatggaataagatagactgcagtttacctatgcccttttctttctagccgttccgaatctcgggacgagattctttgtaaggggggtagatttatcacatcctgatttttgtttcaggatttataaattatttaataaattattattagaagttatattaaatgttcattaacttacaagtgaagttaaatgtgggaaataaaatttccttaatataaagcatggatggatttaatttttattaaattctccatgattaagtcaactctttgaaattttctcgaatttttcggagctcaattcctaaatgatacaaacaacagttcagtaattatttgatcattaatgatctaattatatttgttaagagtttttcttgtttaaaatccttaaattataaattgttgtttaaaaggaattattagaaatgattttaaaagcctagaagagaagatctaattttaatttgttaaatctcaatataaaattgggctagataaaattttgttaaatactttgcttaattctataattcctagatttttctgggatttatttgagctaaggaagtatttttaataaatggaattgcatttcatgaataatttaaattgaaaaaggtttttaaaagtctgttttggctttgggccgaaagccggcccaaaacctctctcttcctctctctccctccccggcctagtcggcccagtcagcccgcgctccttccttttctctctcagtcgctgacaggcgggccccacctgtcagggtcgtcgttctcctcgcgccgccgccgccgcccgaaaccctagtttcgcgccgcagccgtttccggtgaaattgattgaggggaaacaatctttgggatctcctctaccttttctcctttggaaacatcggctaaatcggtttggaatgtgtttgattcgagttcgaatcggatcggtctctttccttcaaaccccgatctttccttctcgtcgccggccgccgtgggccttcgccgtcgcctccgagcccctttaaaaggttccccaagctcttctctacctgccgccaccctcgccttcgcctctcatcgtccgtagtgccctagcgccatgtagcttcgcgccgccgtcgccgccgtcgctccagccgtgcgccgccgccgttccggtcgtcgttgtcgctcgggaaggccaccgtcgggatcgccaagtcgtcgccgtcctcgtccgccgcttcgccatcgccgaagatcgccggagcaccatcgccgccgtcgacccgatctccgccgccgtttcaacctcgtcgccgtcgccgtccgttgctcctccgccgctcctttggtcaccggtgagttcgccgcgtcgccctctacccgttggtgctctccgttcgtgccgaagcgccgccgttcgccagcgagcgtgcgccgtccgagccgccgagccgccgccgccggtggtgacgtcatcgccgacgtcatcgtcgccctctcccgtgagccggtcgtggaccgatcgatctcggccgtccgttttggatggatcgatctcggccgtccgttcccgtgaaccgttgctatgcacccggttcactgcgaaaccctagccgctgacacaataaataaccttttccttttcaaaaataattcattattgcgtcataattcaattaaaatcaatataagtgttttaatccgatttaatctttaaaatttcataactaattcatttgaactcagtttaatgtggttcaagttgcaaaaattatataaaataaagatctacatattaaaattatccataaattgaatttaatttatttaattctttataaatgggctttaattagatttaatcttgtaaaattcataataaattcatttgaagtcagaatgaggccgttcaagtctcataattcatctaaaattatgatctacatgtttgtttactttttatgtattgtttatttggtttttattagtctttttcctcgttttgcgtgttagcttgtcgtttccgtcgttgcgaaggttcgcaagtgcgtcggaagtattcaagaagattaattgaagaccgattattgcaaggcaagtcacacagatcccaaacaaccctttgagcatgttgatcctatttaaagctattgtttctattcaactattgcatctattttcgaatgtcattgggtggaattaacctattctttgttatggcccttttgtacttgattactttattccttgataccttgggtgattataacttgactagttgggctatatatatattggttcaactagatattagatataattgcttagccatgcttagaaacattagcacactattgggataacttattattcactattatttaatggtggcttaatgatagttcacgatggtcaatcgtgattggttaattaattacttgccaactaaaacttgataatggtgggttgtgagcacatggttttgagagtcgtgctcatgacaattaaggaccggttcgcgagctactattgtgaaacattaaccgtgccaaccacaagccagcgtgggcaacggctttaactttcgtatagcatggttcattgcagagcaccagactgagaagtggcggagataagcccacgggggtcgctagggagtccatgcctctggtttttgaggggggtgattatgatccaggaatggtgcactgtggtggattgtgttgtgcgaggggtaatgtcacagctcctttccgaggtaccgtggtggtactgaggcacatggtgacatgatgtggggctgtgtcttgtgggtacagtggtacacctctggccagagtaaaactattcgaatagccgtgcccgcggttatgggcgggttgagcaatgtttttcgtgattagtctcacacctctcacaataattatggatgttatacctggtaataatttgcttagctcctggtttggagttagatctgtacagccgggtatggttgttcaggatggttgggcctgtgcagccttcatgctccaggaactcctcttctgggtttgggaaaaattgagcaagactgagtacaaccaccgtactcaacaagacacacccacaagtgcagaataaatgcaagggagtacaaaggagttatactataaagggttagggttgcagtaaacagcatttaaagatatttagttgctcaaagctattttgtaaacacgattctagaactatacaattattaatcaaggccgtgaacccacacgaacctgccttaacccaaagcctacgatgattcagaccgaactggcaacccgaccctgggtcccagctcgtcccaagccaacccaggccaaccattccaccttttagttgttaagcaggttttaagaactaaaacactaacttgggtacattgctcggcttgcccataaccgagggcgcggctattcgaatagattatactctgatcagaggtgtacatctttacccacaagacacatcttcctcacgtgtaaccacgtgccacataccaccacggtatacagacggaagacgtgacatagtttccaacccatcctagccatagacaagagtaccgacccaatcccacctacggccggaactcccgggacaggcaggcaggactgagcccctagcagcaggacaccggccctgtgccatgacatctcgactaccgggccgcagctcgtgtagccttcatttgtcctagagatgtccatcgacccccgacttcttccatctccatccgtgtacttcttccatctccatccgtgtacttttgtttataaccagactgagccacaaactaagccttacccactagacatgtggaagtacggtagtgctttgcaacagaggcccgaagaccggtccttatatggccgaggtgctactatcaaaaccatgcaccccgagcccagcctaaaaccattttggggattttgaatagaggggacggtgtgaatccaattccacaatactccaacaattccatagtgtccaggttatatgaatatcccaaagtctagagttgtaaaatcacctaatgttacgtaattaaacagcgaagcatctacctaaaatcatactagtggtaccatgagtagagtgtccactagttggggttttgtttattctagggtgaacaaggaaataataacaataacaatattaaggtcataacaaaggtaaataggcatggctaaataaaacagtgataacgcgggaatttaaataaagcgataatgcaataatttaaatcaacataattttataaactgggattcaatatgttcaaagatgatgtgacttgccttgctcgctttcccaaacgtcggcttcaacttccacgaagagcggatcttccgaagctgcagcgtctacacgaccaacggaaaagaaaaggcttttactctaataaactctatataacaagcagaaacaaagcacaaaaatgggttcttgacttcttaaggaaaaattagagacttgaacggtccaattccgagttcaaatggccaagttatggccatttgaagtttatatgctctttaaatgaatatttgcgaatttcttcatttaaattttaatttaaaatagatttattgcgtcagccgaggggaggggcgcgcggaccgggtccacgggagtggggcccacgcggcagcctcacggtccacggtggaccgggtgcacccggctcacaccggccggcgccgtgggtcccatgcgtcagccgcacccgagggcgcgggcggctgacggccgggccccacatggcagccgcgggacgcgcccgaaggcggccacgccggcacagccgacgggaggtggcgcactcgcgccccgatggtcgccgccggcgaccaccggcgcggcggagcggcgcccgaaagaggggagggaagggggaagcgaatcggcggtccacggctcaccccgggtcgacggcgacgacgggaacggtgaccggagcgcgcggctcgggtagacggggacggcggcgttccggcgatcggcgaccgaaacggagaggtggacgaggtcggcgaggttgcggcgaacccgaaggaggcggcgccgaggcgggagagggtccggggcgacgacggcggcggaccggagctcggcggcgacggcggagagagagagcgacggcgcgagctcgattccgacggggagagagagcgacgagtggcggaaacggtggagggaggcacggggagtgtttatatatggttgggagtgagagagggcggtcggatgagggggaaacggccgcggaagatccggccgccattgatgcgccggcgaggtttaggggaaaagatcccgaacgaatccgatggagagagagagggaaaagtggggggaaagagggagggaatcatggggaatatttcccccctcttgattgcacgcggggcggacgggagcggcgggatttgcggcggcggcggcgctagggcacgggcgaggcggcgggagcggcgggaggtaggggatgacgggtgggccccacctgtcagcgagggtggcgagcgggcccgcccgtcagcggcacgcgcgcagggagggggagggatctgggccgagccggcccaagagggggtggggggaaaaaaggactttttaggatttttctttttataaaacctttttaactttgtttatttcttcttaattattatttgtgctctgaaaattccactaaaatttatttacgcattttaggcttttaggaaatatacaaaaatcctccaagccttatttgacttttaactttgcacattttaattgttggaggctttcacatggattttaattattctaggcataatttcgaggatgtattttagagtcgttttgggacgcgacacggcggcgcacggctggagcgacggcggcgacggcggcgcgaagctacacggcgctagggcactacggacgatgagaggcgaaggcgagggtggcggcgggtagagaagagcttggggaaccttttaaaggggctcggaggcgacggcgaaggcccacggcggccggcgacgagaaggaaagatcggggtttgaaggaaagagaccgatccgattcgaactcgaatcaaacacattccaaaccgatttagccgatgtttccaaaggagaaaaggtagaggagatcccaaagattgtttcccctcaatcaatttcaccggaaacggctgcggcgcgaaactagggtttcgggcggcggcggcggcgcgaggagaacgacgaccctgacaggtggggcccgcctgtcagcgactgagagagaaaaggaaggagcgcgggctgactgggccgactaggccggggagggagagagaggaagagagaggttttgggccggctttcggcccaaagccaaaacagacttttaaaaacctttttcaatttaaattattcatgaaatgcaattccatttattaaaaatacttccttagctcaaataaatcccagaaaaatctaggaattatagaattaagcaaagtatttaacaaaattttatctagcccaattttatattgagatttaacaaattaaaattagatcttctcttctaggcttttaaaatcatttctaataattccttttaaacaacaatttataatttaaggattttaaacaagaaaaactcttaacaaatataattagatcattaatgatcaaataattactgaactgttctttgtatcatttaggaattgagctccgaaaaatccgagaaaatttcagagagttgacttaatcatggagaatttaataaaaattaaatccatccatgctttatattaaggaaattttatttcccacatttaactttacttgtaagttaatgaacatttaatataacttctaataataatttattaaataatttataaatcctgaaacaaaaatcaggatgtgataaaaggcctacaaaattagtataacacttttctgcgtcaaaaaggattttaacaacattgggctatattgtcgtgagcaagtgttgccgaagcaaaaacaaatgcttaagtccctaaggatcacaacttaaccacgctgatagcaaacttgctgaagtactgtttaggcccaggcccattagtactcccgataccctaaggaaataacaccggaagcaaagcgtcggttcgttttccccgccaaaactctcgccactttcctcattctctgctacagtgcaaaaccacaccggcggagctagggttcacagattcgctccaatccagccttcaaagctccacgaaaatctcccacgcaaccaccgcatcaatctcccatccattcccagccacatttcgaaccaaatcacatcatccaattcgcatccatgacggaagagagagaaagctttgagagccagtgggcgccatccgacgtaacggaggaaaacctgaaggagatggtggcgcacggtgttcttccggccaaggagatcatcgggtggcgtccagcatacggcaaaatgtttccaacccccgacatacacgaagtggttgtattctccatttcttttacggcgggttttctcttccaacctcaaacttcttctgaggaattctggatttctatggtattaacctgcatcacctaaatcccaattccatagtccacattgccaacttcatccacgcttgcgaagctttctagggattaggccgcatttcgctctattccgccgcatcttctttctcaagccccagccaaacaagagcaaaaaaaaccatgtgttgttgggggagccggttttcaactgagggggaccttgagccaaaaatacttctccatgccattcaagacctcgaacaaaggttggcatgcgaactggttctatgtacaaaaccccgagccagtgcttcccgggtactcttgtctgcctccggtatatcaagatacctggaattcgcttcccattggagatgaggcagcccaagcacttgcattgatggatcgcatgctgaggctcaaagagcaaggtctgcaaggagaacagatcacccagcattttataaaaagccgactagcgccaattaaagagagatcctgcacagcctttgaatttgacggcaagcatgaccccaaccgtgaagatccagattctcttgagtttaaagtcatgaaggagagaatgtacaaaatcttctcgaatgctatcgtggtcagttattcgcacttgctgctagtggtgccatacaacgccttcaaccctcctccaccggtatgtcttatacaactcagctattctcaaagcatacttttatcttctgtaaggtcaactgaaaacttggaatatcatgcacaggaattcgctttgatgaaatctgaccctccaattgctcaacgccgctcaccccgttggaagacaagccaggccagtggagggccaaaaatcaagcctgctgatcaatctgacacttcgaagttgactaatcagtctgactctcggaagaggaaattgatttcaagcgacgatgaaggtgatgatgcggaaaagatgggtaacaaaggggtgactggaaaatagtcaaagcaaaccaatccgaagaagaaaacgtccagtcgtcccatgcaaaaaataaggaagtcatccaggtatgtgtcatctagcaatttcttctgtttcgctagtcactcactattgaagcaaagctgatagcatgtctcaaatctgtagaaaaccatctgacatagatccctctggaaaagaccccacgtcaactgacacagagactggtccttcagcagaaactggactgactgccgaagaccgcccgggtaataatcaaccggcaaccgacaatgtagataccaacaacgagcccccgactggaaaccagtcagccgagactgaagtcagtgctgatcaggagcccccgactggaaaccagtcgggttcagaaccaaatagagatatcccagaagtagaagctcaagctaacaaccctcccaagacggacactggtgctagccctggaactagttctcctgttagggtgcaagaacctgctcgtcctcgactggaaattatcacaggtaaacacgtcctccaaacctgctttgatccgacaaactttcttcaattacttcactattattcatgactatctaagggccaatgattggcaatgaagaagaggtcctccggatacaatcggctgaagattctcgtccaccaatattagtcaagtgatgggatgatgaaatgcatccacagggaattgtaataaataagcaaaaggaagacgaggaagtatgcctgctgaaaaagacactcggccaagccactcgtcttgtaaatgtaggtctccctatatatagcctcaaccatcctgtcggtcactttagatgaacaaagataaatttgtggtgcagagaatccatcttaggaatgaggcgaagaccgcaaccctcgaaaaattagttccccaccttggaacccttgaatccaccagagaccagctacgcgaagctaaggagcttgccaagaaaactgagcatgatctgagagaccggatcgccgagctccaagactccaactttgagctgagcggttcgtcaaaaggtaaatatcgtctctgtctgacttgttccgtgttgctgtctatgtgcaacagaccaatgaaaagcaat

SEQ ID NO: 7066 - DNA, 10023 bp, Oryza sativa
ggagtttattagagtagaagccttttcttttccgttggtcgtgtagacgctgcagcttcggaagatccgctcttcgtggaagttgaagccgacgtttgggaaagcgagcaaggcaagtcacatcatctttgaacatattgaatcccagtttataaaattatgttgatttaaattattgcattatcgctttatttaaattcccgcgttatcactgttttatttagccatgcctatttacctttgttatgaccttaatattgttattgttattatttccttgttcaccctagaataaacaaaaccccaactagtggacactctactcatggtaccactagtatgattttaggtagatgcttcgctgtttaattacgtaacattaggtgattttacaactctagactttgggatattcatatcacctggacactatggaatggtttggttattgtggaattggcttcacaccgctccttctattcaaaatccccaaaatggttttaggctgggctcggggtgcatggttttgatagtagcacctcggccatataaggaccggtcttcgggcctctgttgcaaagcactaccgtacttccacatgtctagtgggtaaggcttagtttgtggctcagtctggttataaacaaaagtacacggatggagatggaagaagtcgggggtcgatggacatctctaggacaaatgaaggctacacgagctgcggcccggtaatcgagatgtcatggcacagggccggtgtcctgctgctaggggctcagtcctgcctgcttgtcccgggagttccggccgtaggtgggattgggtcggtactcttgtctatggctaggatgggttggaaactatgtcacgtcttccgtctgtataccgtggtggtatgtggcacgtggttacacgtgaggaagatgtgtcttgtgggtaaagatgtacacctctgatcagagtataatctattcgaatagccgcgccctcggttatgggcaagccgagcaatgtacccaagttagtgttttagttcttaaaacctgcttaacaactaaaaggtggaatggttggcctgggttggcttgggacgagctgggacccagggtcgggttgccagttcggtctgaatcatcgtaggctttgggttaaggcaggttcgtgtgggttcacggccttgattaataattatatagttctagaatcgtgtttacaaaatagctttgagcaactaaatatctttaaatgctgtttactgcaaccctaaccctttatagtataactcctttgtactcccttgcatttattctgcacttgtgggtgtgtcttgttgagtacggtggttgtactcagtcttgctcaatttttcccaaacccagaagaggagttcctggagcatgaaggctttggtgtctagctcgtgcctgccgtcaagtgcctgtagtcgtcgccctagttttccgctgtttctcgtttgtctttgtgtgtgctgggccttcgctgcccatgtaataaatgaactatttacgcttccgcttgttaaactctgaattgtatcaactcttggtgtaccttgcctcctgggacaaggaataatacacgcacgtaaggaacgcccgttgggttaattccggtcgtgacacgccgccgttccggtcgtcgtcgtcgctcgggaaggccaccgtcgggatcgccaagtcgtcgctgtcctcgtccgccgcttcaccatcgccgaagatcgccggagcaccgtcgccgccgtcgacccgatctccgccgccgtttcaacctcgtcgccgtcgccgtccgttgctcctccgccgctcctttggtcaccggtgagttcgccgcgtcgccctctacccgttggtgctctccgtttgtgccgaagcgccgccgttcgccagcgagcgtgtgccgtccgagccgccgagccgccgccgccggtggtgacgtcatcgccgacgtcatcgtcgccctctcccgtgagccggtcgtggaccgatcgatctcggccgtccgttttggatggatcgatctcggccgtccgttcccgtgaaccgttgccatgcacccggttcacagcgaaaccctagccgctgacgcaataaattcccttttccttttcaaaaataattcattattgcgtcataattcaattaaaatcaatataagtgttttaatccgatttatctttaaaaattcataactaattcatttgaactcagtttaatgtggttcaagttgcaaaaattatataaaataaagatctacatattaaaattatccataaattgaattaaatttatttaattctttataaatgggctttaattagatttaatcttgtaaaattcataataaattcatttgaagtcagaatgaggccgttcaagtctcataattcatctaaaattatgatctacatgtttgtttactttttatgtattgtttatttggtttttattagtcttttttctcgttttgcgtattagcttgtcgtttccgtcgttgcgaaggttcgcaagtgcgtcggaagtattcaagaagattaattgaagaccgattattgcaaggcaagtcacacagatcccaaacaaccctttgagcatgttgatcctatttaaagctattgtttctattcaactattgcatctattttcgaatgtcattgggtggaattaacctattctttgttatggcccttttgtacttgattactttattccttgataccttgggtgattataacttgactagttgggctatatatatattggttcaactagatattagatataattgcttagccatgcttagaaacattagcacactattgggataacttattattcactattatttaatggtggcttaatgatagttcacgatggtcaatcgtgattggttaattaattacttgccaactaaaacttgataatggtgggttgtgagcacatggttttgagagtcgtgctcatgacaattaaggaccggttcgcgagctactattgtgaaacattaaccgtgccaaccacaagccagcgtgggcaacggctttaactttcgtatagcatggttcattgcagagcaccagactgagaagtggcggagataagcccacgggggtcgctagggagtccatgcctctggtttttgaggggggtgattatgatccaggaatggtgcactgtggtggattgtgttgtgcgaggggtaatgtcacagctcctttccgaggtaccgtggtggtactgaggcacatggtgacatgatgtggggctgtgtcttgtgggtacagtggtacacctctggccagagtaaaactattcgaatagccgtgcccgcggttatgggcgggttgagcaatgtttttcgtgattagtctcacacctctcacaataattatggatgttatacctggtaataatttgcttagctcctggtttggagttagatctgtacagccgggtatggttgttcaggatggttgggcctgtgcagccttcatgctccaggaactcctcttctgggtttgggaaaaattgagcaagactgagtacaaccaccgtactcaacaagacacacccacaagtgcagaataaatgcaagggagtacaaaggagttatactataaagggttagggttgcagtaaacagcatttaaagatatttagttgctcaaagctattttgtaaacacgattctagaactatacaattattaatcaaggccgtgaacccacacgaacctgccttaacccaaagcctacgatgattcagaccgaactggcaacccgaccctgggtcccagctcgtcccaagccaacccaggccaaccattccaccttttagttgttaagcaggttttaagaactaaaacactaacttgggtacattgctcggcttgcccataaccgagggcgcggctattcgaatagattatactctgatcagaggtgtacatctttacccacaagacacatcttcctcacgtgtaaccacgtgccacataccaccacggtatacagacggaagacgtgacatagtttccaacccatcctagccatagacaagagtaccgacccaatcccacctacggccggaactcccgggacaggcaggcaggactgagcccctagcagcaggacaccggccctgtgccatgacatctcgactaccgggccgcagctcgtgtagccttcatttgtcctagagatgtccatcgacccccgacttcttccatctccatccgtgtacttcttccatctccatccgtgtacttttgtttataaccagactgagccacaaactaagccttacccactagacatgtggaagtacggtagtgctttgcaacagaggcccgaagaccggtccttatatggccgaggtgctactatcaaaaccatgcaccccgagcccagcctaaaaccattttggggattttgaatagaggggacggtgtgaatccaattccacaatactccaacaattccaaagtgtccaggttatatgaatatcctaaagtctagagttgtaaaaccgcctaatgttacctaattaaacagcgaagcatctacctaaaatcatactagtggtaccatgagtagagtgtccactagttggggttttgtttattctagggtgaacaaggaaataataacaataacaatattaaggtcataacaaaggtaaataggcatggctaaataaaacagtgataacgcgggaatttaaataaagcgataatgcaataatttaaatcaacataattttataaactgggattcaatatgttcaaagatgatgtgacttgccttgctcgctttcccaaacgtcggcttcaacttccacgaagagcggatcttccgaagctgcagcgtctacacgaccaacggaaaagaaaaggcttttactctaataaactctatataacaagcagaaacaaagcacaaaaatgggttcttgacttcttaaggaaaaattagagacttgaacggtccaattccgagttcaaatggccaagttatggccatttgaagtttatatgctctttaaatgaatatttgcgaatttcttcatttaaattttaatttaaaatagatttattgcgtcagccgaggggaggggcgcgcggaccgggtccacgggagtggggcccacgcggcagcctcacggtccacggtggaccgggtgcacccggctcacaccggccggcgccgtgggtcccatgcgtcagccgcacccgagggcgcgggcggctgacggccgggccccacatggcagccgcgggacgcgcccgaaggcggccacgccggcacagccgacgggaggtggcgcactcgcgccccgatggtcgccgccggcgaccaccggcgcggcggagcggcgcccgaaagaggggagggaagggggaagcgaatcggcggtccacggctcaccccgggtcgacggcgacgacgggaaggcggcggcgcggctcgggtagacggggacggcggcgttccggcgatcggcgaccgaaacggagaggtggacgaggtcggcgaggttgcggcgaacccgaaggaggcggcgccgaggcgggagagggttcggggcgacgacggcggcggaccggagctcggcggcgacggcggagagagagagcgacggcgcgagctcgattccgacggggagagagagcgacgagtggcggaaacggtggagggaggcacggggagcgtttatatagggttgggagtgagagagggcagtcggatgagggggaaacggccgcggaagatccggccgccattgatgcgccggcgaggttgaggggaaaagatcccgaacgaatccgatggagagagagagggaaaagtggggggaaagagggagggaatcacggggaatatttcccccctcttgattgcacgcggggcggacgggagcggcgggatttgcggcggcggcggcgctagggcacgggcgaggcggcgggagcggcgggaggaaggggatgacgggtgggccccacccgtcagcgagggtggcgggcgggcccgcccgtcagcggggagaggagagggagggggagggagctgggccgagccggcccaagagggggtggggggaaaaaaggactttttaggatttttctttttataaaacctttttaactttgtttatttcttcttaattattatttgtgctctgaaaattccactaaaatttatttacgcattttaggcttttaggaaatatacaaaaatcctccaagccttatttgacttttaactttgcacattttaattgttggaggctttcacatggattttaattattctaggcataatttcgaggatgtattttagagtcgttttgggacgcgacacggcggcgcacggctggagcgacggcggcgacggcggcgcgaagctacacggcgctagggcactacggacgatgagaggcgaaggcgagggtggcggcgggtagagaagagcttggggaaccttttaaaggggctcggaggcgacggcgaaggcccacggcggccggcgacgagaaggaaagatcggggtttgaaggaaagagaccgatccgattcgaactcgaatcaaacacattccaaaccgatttagccgatgtttccaaaggagaaaaggtagaggagatcccaaagattgtttcccctcaatcaatttcaccggaaacggctgcggcgcgaaactagggtttcgggcggcggcggcggcgcgaggagaacgacgaccctgacaggtggggcccgcctgtcagcgactgagagagaaaaggaaggagcgcgggctgactgggccgactaggccggggagggagagagaggaagagagaggttttgggccggctttcggcccaaagccaaaacagacttttaaaaacctttttcaatttaaattattcatgaaatgcaattccatttattaaaaatacttccttagctcaaataaatcccagaaaaatctaggaattatagaattaagcaaagtatttaacaaaattttatctagcccaattttatattgagatttaacaaattaaaattagatcttctcttctaggcttttaaaatcatttctaataattccttttaaacaacaatttataatttaaggattttaaacaagaaaaactcttaacaaatataattagatcattaatgatcaaataattactgaactgttctttgtatcatttaggaattgagctccgaaaaatccgagaaaatttcagagagttgacttaatcatggagaatttaataaaaattaaatccatccatgctttatattaaggaaattttatttcccacatttaactttacttgtaagttaatgaacatttaatataacttctaataataatttattaaataatttataaatcctgaaacaaaaatcaggatgtgataaaaggcctacaaaattagtataacacttttctgcgtcaaaaaggattttaacaacattgggctatattgtcgtgagcaagtgttgccgaagcaaaaacaaatgcttaagtccctaaggatcacaacttaaccacgctgatagcaaaactggctgaagtactgtttaggcccaggcccattagtactcccgataccctaaggaaataacaccggaagcaaagcgtcggttcgtcttccccgccaaaactctcgccactttcctcattctctgctacagtgcaaaaccacaccggcggagctagggttcacagattcgctccaatccagccttcaaagctccacgaaaatctcccacgcaaccaccgcatcaatctcccatccattcccagccacatttcgaaccaaatcacatcatccaattcgcatccatgacggaagagagagaaagctttgagagccagtgggcgccatccgacgtaacggaggaaaacctgaaggagatggtggcgcacggtgttcttccggccaaggagatcatcgggtggcgtccagcatacggcaaaatgtttccaacccccgacatacacgaggtggttgtattctcccatttcttttacggcgggttttctcttccaacctcaaacttcttctgaggaattctggatttctatggtattaacctgcatcacctaaatcccaattccatagtccacattgccaacttcatccacgcttgcgaagcttttctagggattaggccgcatttcgctctattccgccgcatcttctttctcaagccccagccaaacaagagcaaaccatgtgttgttgggggagccggttttcaactgagggggaccttgagccaaaaatacttctccatgccattcaagacctcgaacaaaggttggcatgcgaactggttctatgtacaaaaccccgagccagtgcttcccgggtactcttgtctgcctccggtatatcaagatacctggaattcgcttcccattggagatgaggcagcccaagcacttgcattgatggatcgcatgctgaggctcaaagagcaaggtctgcaaggagaacagatcacccagcattttataaaaagccgactagcgccaattaaagagagatcctgcacagcctttgaatttgacggcaagcatgaccccaaccgtgaagatccagattctcttgagtttaaagtcatgaaggagagaatgtacaaaatcttctcgaatgctatcgtggtcagttattcgcacttgctgctagtggtgccatacaacgccttcaaccctcctccaccggtatgtcttatacaactcagctattctcaaagcatacttttatcttctgtaaggtcaactgaaaacttggaatatcatgcacaggaattcgctttgatgaaatctgaccctccaattgctcaacgccgctcaccccgttggaagacaagccaggccagtggagggccaaaaatcaagcctgctgatcaatctgacacttcgaagttgactaatcagtctgactctcggaagaggaaattgatttcaagcgacgatgaaggtgatgatgcggaaaagatgggtaacaaaggggtgactggaaaatagtcaaagcaaaccaatccgaagaagaaaacgtccagtcgtcccatgcaaaaaataaggaagtcatccaggtatgtgtcatctagcaatttcttctgtttcgctagtcactcactattgaagcaaagctgatagcatgtctcaaatctgtagaaaaccatctgacatagatccctctggaaaagaccccacgtcaactgacacagagactggtccttcagcagaaactggactgactgccgaagaccgcccgggtaataatcaaccggcaaccgacaatgtagataccaacaacgagcccccgactggaaaccagtcagccgagactgaagtcagtgctgatcaggagcccccgactggaaaccagtcgggttcagaaccaaatagagatatcccagaagtagaagctcaagctaacaaccctcccaagacggacactggtgctagccctggaactagttctcctgttagggtgcaagaacctgctcgtcctcgactggaaattatcacaggtaaacacgtcctccaaacctgctttgatccgacaaactttcttcaattacttcactattattcatgactatctaagggccaatgattggcaatgaagaagaggtcctccggatacaatcggctgaagattctcgtccaccaatattagtcaagtgatgggatgatgaaatgcatccacagggaattgtaataaataagcaaaaggaagacgaggaagtatgcctgctgaaaaagacactcggccaagccactcgtcttgtaaatgtaggtctccctatatatagcctcaaccatcctgtcggtcactttagatgaacaaagataaatttgtggtgcagagaatccatcttaggaatgaggcgaagaccgcaaccctcgaaaaattagttcccccccttggaacccttgaatccaccagagaccagctacgcgaagctaaggagctcgccggggtgcag

SEQ ID NO: 7067 - DNA, 3293 bp, Oryza sativa
ccgcctcgcctcgctcgagcagcgcgagccctcgcctcgcctctgtcgccgccgccgcctcatcccccgctgctcgcctcctccgccgccaccgcctcgcctcgccgccgctcgccgccccccccgcttgccgttgtgggcgtgatttgtgagacaaagtgagagaagagagagagaggaagagtgagagaagagaagagagaggaaaagtgcaataggagtacgacaggtggggcccacctattttttaataaataaattgctgactggactgccacgtgtacgccacgtagaccaaaaccactatggattgggtcgagggaggtaattcgtccagtttgcatagttgggggtgaagaatgtccggttttttggtttaagggtataattcggacgaccgcgatagttcgggagggtaattcgtactttttccccatacaaataatgtccctggctaagtacgtacatcaaggttttgtcctgaatggcatcctattgtgctgaatacataggaaacaagttacaaaaataagaaagtaattggacctgttagataacagattatccatctaggtaaatttattatttttcatccccttcctcgccattcgttttgtattaaaaagaaagaggaaaaaaactaatagaaaatattgccatttctcttaagaaatgactacggaatgggaatccaaatatcctttggtttctgtccaagcttagacagaggtctatcagaccacacaccattgctactagacactggatcagcagctttttcggggaaccgtgcacagttcaaacttgaacttggctggttccttcgggatgattttcgtgaccgtgttgtggaaatctgaaataagccagttaagggccacaaccctgttcaaagatggaacaataagatgagtgctttgagaagacatcttcaaggttgggcggctcacaccagtggttcttacaaacaagaaaaaaataccgtacaaaatatcattgatgagttagacatcacagccgaggtacgggaattaactgatagtgagagagagcatcttgcttaatctagagatcagttatctagacttcttcgagaaaaagaaatcaaatggtaccaaagggcaaaagttactgacctcctacgaggggacaacaacaccaagtattaccatatggttgccaatggtaagaaaaggaaaaaacgtattttttgcctcgatcaggacgaagggaaattagaaggtaatatagcattgaagtcctatattactaaattctattaaaatctttttgggccacctgaggatacttccatcacactagatgaatatagaattgaggatattctgcaggtaacgaatgaggaaaatgaattcctaacggcacctttctcggaggatgagatccagggagctgtgtttgaaatggaacacaacaaagcccctggtccagatggtttcccggcggagttctaccagaatttttgggaggccatcaaagatgatttgatgaatctatttcgggatttccatgtgggtgatttaccattgtttagtctcaattttgggataattacacttcttccaaaagttcatgaggcaaaccgtatacaacagtacaggccaatatgtcttttgaatgtcagtttcaaaattttcaccaaggtcgcaacaaatagaattaattcgtggcagaccatgtggtgagctcttctcaaacaacctttacgagaggacggaatatcctagagggagttgtcatccttcatgaaactgtacacgaattacatcgtaaaaaactaaatggggaaatttttaaagtagatttcgaaaaagcctatgataaagtcaaatggcctttcctcttacaaactctacatatgaaaggtttctcgcctaagtggatctcttgggttgagtctttcatttctggatgaagcatagcggtaaaggttaatgacgaagttggatatttttttcagacaaagaagggggtacgtcaaggtgatcccttatcacctatattatttaatattatagctgacatgttgactgtacggattaatagagccaaagaggatggtcaaattgcaggagtagtaccacatctaattaatgatggtctctctaccttgcaatatgccgatgatatggttctctttatggatcatgacctagaaaaagctcgtaacatgaagttgttgctttttgtctttgagcaattatcgggtcttaagataaatttccataaaagtgaattatattgctttggtgaagcgaaagattttgaaaacgaatacatggaactctttggttgttccactggtcaatttccatttcggtatttgggtatccctattcattataggagattaagaaatgccgattggaaggaggttgtagaacgctttgaaaagcatctaagcagttggaaaggaaaactcctatctactggaggacggctaacattgattaattcggtgctaagtagcttcccgttgtatatgatgtccttctttgccataccaagagggatacttacaaagcttgactactttcgctccaggttttactggcaaagtgatggtaaaaaaaaaagtattgtcttgctaaatggaacatactgtgccgtcccaaggaacaagggggattaggaattcatgatttggaaattaagaatatggctctacttagtaagtggttattcaagttgctctccacggaaggggtttggcaacagttgatgcgtaataagtatcttggtgataaacctctttctcaagctcaatggaaggcaggggtcacacttttggtctagcctcatgaaggtgaaacgggactttcaccgttttggatcctttataattaaagatggctcccaaattaggttttgggaagacaaatggttgggcaattcaaccttgaaagaacagtatccttgcctttacaacatagttaggcataagcacgctacagttgcacaagtcttcgaaaacaatcctccatctttttcatggcgaagagaccttataggatcaaactagcggcgtggaataatttattaccgtgcatcactggttttcatttaactcaggagcaagatgagtttcattggaacttaacctcaaatggggagttctcagtgaagtctcattatctagctctaattcacagcattgttcccaacattaataaccatctttggaaattaaagatacccctaaaagttaagatttttctttggtacttgcaccgtggagtggtgttaacgaaggacaatttgataaaaaggaa

SEQ ID NO: 7068 - DNA, 41646 bp, Oryza sativa
gctaccgccgccggatctagcctcccccgtcgtggcagcggcggatccggcctccctcagctgccgctgccgggccccttcgtcgtcgtcaccggcctccctcatcgtcgaggaggcggatccggcctcccccgttgacactgcagccggatccggtctcccccagccaccgccgccgggccccttcgtcgtcgtcgcccgccggccttccctgtcgtcgaggaggcggatccggcctcccccgtcgtcgcggtggccggatccggcttcccctagccgttgctgcgccgccccttcgtcgttgttgcccgccggcctcccccgtcatcgaggaagcagatccggcctcccccgtcgtcgcgacggcccgcgtcggtggatcaagagttcgcggatcgagagacggagaagggagagaggcggatcgagagctcgcggcggcctgcggcggagaggtagaggctgcgcctcgccgctgctcccgaggcggtggagctgcggcaacgggagccggcggtggtggggagagggagaagggggaggagaagggagaagggagggaggagaaggtggaggagaaggataaggacggagaagaataaggataagggcgggcggtggatttattggcctcaatttttttcagcggtcttcactacctgccgccagcgaaaatcacgttttcactggcggacagctaagaggcccacctcaaaaaatagagtttttttttatggcggatctcttagcgtggccgccagcgaaaatcggttttcgctggcggtccatggccccccacccctcgaaatatttttactggcggttttcgcgtatggccaacgccatgaaatatcgtttttctagtcgtgaatgtattataaaaatgataaaaaaaaactaactatggagaagtgttttttaaagataaatttactttagtgatactatttgcacatatcaaatcttgttactttgatatttattgacgatttaagtttttaagatttggctacacttattgtacgacaatgtgatctatttgaaaacagttggaggggatatctttgatttgccctcttcagtttcgtagttcttgatattttgaacaacgacacagtgttctaaacatattttgactatatttttctattataacatataaaaataagtaaatatttaatattatcaaattacttttaagactagcgttttcaaaccaaatattttaaaatctatatatagttaaagttctagttattttatttaatttcaaccttacctaaaatatgaagaattatagaaccagataaagcaacaatatacatactatatacatatagtaatatggtaaggacacaagagcatatgcatatcagcatatatacttgtatacatgcacgcttactttgagatgatcaccacctagcctagcccttttttttccttttttttttgttgcagtgagcgagcaagcatgcaacaaagtgtgcctctcttttggcacataccattattgtgtcttgttggaacagctagcagcatgcctgcctgcctgccttgaccacacacacactgcccggccagctcaaatgcttctgatgaacagagcgagagatcagctttgcaattcttaatcgcccatatgtaagtacgagcaaaagctcacctgaaagcacaccggacactagcaaaaggctgggatacgttgcttagtttttggtttaagataataataataacaacaacgttaataatacacagtagccgatagcgaaagagcgcagctttccgcttggccatttgtgactactccctcactcccaaaacaagcgcaaccatgacttttcctgttcaactttaatcattcatcttatttaattttttattactattagattataaaatgtaataatactttatacgtgacttattttttatttttttaaaaaaaattaaataaaatagacaattaaagttggattagtaaacttatagctgcgcgtattttgggactgagctactaagtgatcgtggtttttttttcactctagctcttgtactatgacagttttactgatgtaccccgggggtattttacgcaggaaaccctagaggttggggggtcgccgccgccgctgggcccacgtgtcagcctcactccccactcccccctacacggtagccacacgggctatttgctcgcacgcctcagtccacctcccctgagctgtgctgctgcgctgcgctctcggactcctcccagatccccaatccccccacgctctccggccatcgcgggtggagcagggccgccgccgagggctgggggggagcgcgagtcccggggatccgagccatctgccggtgggcggcggcggcggcggcggagttggggttcgtcgtcttggtcttgggtcttcttcgtccctcgctgcgggtgggtagcgcagcgtcggggcagatccggctagccactgcgacgctgaattctggagatccccgcacatggagtcgcagcgaggtccgccgccctccctccctctctctctctctctctccttatttagtagtagtatgtatgcctgtgctgtgctgcctcgagaacaaacgttcaccgcgtccccggcggcggcactcagccggagcacgcggctgcggtgtggatcgccctggctttcaggggtgaataagggaacaatttgttgtgaagactagtagcttatagtcaatttattcaattccttggtctatgtgtgttgtttataattcaacataaggaatgctagttttgtaaagtaggattaattcagtgctagggttgccactcaattgaacttcaaggccaataggcacattttagacgctcagagcgcaagaactaagataatgatttagctcaagttattctgtgggagacaaggaaaacatcagtttgtacgattagtttcaaaaatggtgccccaggagacatcgtataagctcttttgagcctaacaagtgttgtgcatttcacattacaaacaagttggccccctttgatttgtaggaaaaacataggaaatttggaggatttcaatcctataggaaaaatatctatgaaggtctttgaaacaaaggatatcttatccttccctttgaaattcctatagagattttgaaggaaagttagcaagagctctaacctcttggaaaatttcctttggagtctatctctctcatccgattcctgcgtttttcctgcgccctaataaattgaccattcttgtatttttttcctgtgttttgcaatcatctgttctgcacttatattcctttcaaaatcctgtgtttttccaaatcctcctttttttcaatcctgtgcttcaaaggagcactttctgtgttacaatcacataacagcacaaacaagaccttgttctttgttatactcaagtgaagatgccatctataatttctatacactacatcttattatcagtatgccaatttttgtgcacttgttgcctctgtttggttaataaatcatctcaacagtagttcttgaatctgttgttaatttgatgaatatatatcaacttgagaaatctattttgtagatacgttgagcatgagtgctcttactttgtccatatacaaatttctatcttctctattatacatttgcttgttggtactttaaagtaaaatacaaaaattgatgtgcacaatgtgttgtacatttaactttctggctcaactgggaagccgtgccctttctttacctgaaatttatttgtttgattgcttctcatttgcatgatgtagcactaaccaatgggacatctaaacttcaatgctgaattgctgatcatatcatttactttctgttacctacttacctgtacttaactaaaaacctaaaatttcttgaagccctattgtccaactgtaacatattttttgacaatttttttaatgacatttggcagggcaatctcctgatcgtggatcagacgcatcaggaccaaaacagtctagtgtttcatcacatggtagacaaaggaattcatcatcttctatctgtaaagattttctccggaagtttgtggacaatgaactattgacatcaagcctagaggactggttctctgggcacagtgaagactgtggtttcaagaagccagcatttgatgttccttttgacctaagtgaactacaaaattttgactatgctatagaaggtgttactttccaacagctagtacggatgccaaatgctcttcatgcctcaacatcagatatttttgaagctactgcacatcttgctttggaagattttcttcatgcaagtattaagggtttgtgggaaactttctggggccctgatgaatcgatgcctttctctgttgcctgtatacacagcacaagctccaaattttatcctgctgagaaggctattagcagtgggagacttgatggcgtttgtgcaacggctgtattgctgaagagtttaaagcattcacaaggaaggtgggatcatattgttgtactggctttgttgagacctgatattggaatgttttcggggcagaatgaccaacagccatctccggctgttttgggggaggcactattctttgccttgcgtgttctactttctcgaagccttagtaggtcttccacagttcttcaaaattcagattgtgtttacgtccttcttgttgattcacagtttggaggagtggtaaatgtccaaggtgatctgaacaagcttgattttgatttgaacaatgtttatgactctgctgcagagtggataaaaaagcatgcacaaatcacagtttcttccatagaccgcgtatggaacaaacttggcaatgctaactggggcgacattgggactcttcaagttctccttgcaattttccattcaatgatccagttctgtggtgcaccaaagtattctcttgatgaactagctacagagcatagttcccgattacagagccgaagatcagaaagacatttggttggcaggcaagctaatacaaatggtttgtttcgattccagcagcaaagtcattctcctgaaattgttgaagtacaagaggagggagctgttaatgtaaaaccaaaggaaattttgaagcttgaggtaggatctgttgtattgatggaggatgctgattggcagaagggttttcaaatcaatgatattcttacagacagcgaacctcctatctatagtgctactcctgtagaagaacctaccaaaacccatctgttgtatgtaggctccagcccttctcatttggagccagcatgggaagatatgaattcttggtatcaagttcaaaggcagaccaaagtacttactttgatgaagcaaagaggcatttcaagtagatatgtcccacagatggttgcttctggacgtgtcgtccatccaggcccttgtaacaagcctaactctagtgggagttgtggccatccatggtgcagtactccaatacttgtcacctcgccagttggtgaaactatttcaaatctgattcgtaatgggctgtttggtgttgaggacgctctgagatgttgtcatgactgtttgtctgcgcttgctgctgcatcatctgcaggaatccgtcatggtgatatccggccagagaatgtgatccgtgtgagcaatggttcaaggcatccatattttgtacttattggatggggccatgctatcttagaagacagggatcggcctctaatgaatttattcttctcatctacatttgctctacaggaaggcaagttatgtgcagcatctgatgcagaaagcttaatttatctgttattcttttgttgtggtggagtttgcccagagcttgactcagttgaaggtgcacttcaatggagggagacatcctggtcaaggagagttatacagcagaagttgggtgatgtctcagcagtgctgaaagcttttgcagactatgttgacagcatttgtggaaccccatatccgatggactatgagatatggttgagaaggttacgaagaaccatcaatgaagatcatggcaaggagattgatacatcaagttagtactgcagctcatgttagtgcggaagtacgatatggaagatcaagaatggtcgttccataccctgtattgttgttgtagataatttattcgcctgtctcgtaaaaggtccataacttagtatccccctccatcttgctccatttcatctaaagggtatttccatagtcacaatctgctgctgatatcctcaacttggatttctgaaaatggtgtcgcctttgcacaagactgcagtagagatcttctgaggatatctgcaacatgatttattttggcgagtgctcctcttaagtctttgcttttcttcgggtctcgagtgtgtggtatagttgatcaatttttggtccttttgcttttttgaaattgttccagaatggatttgtgattagaggtggtgtggcagagtagcattttgttctgactaaattattttgcgggtgctatgttccaagtgcacctagttcttgtaaatgttgttcttgttcagctgtacaaacttcaatcatgctaggctgcaactgctgggtgttgatatgttcgatgaaatgtcaaaaaaaaaaagttgttccccttatgtgctataaggagcaggttttttacctgacgggcatatattgttgtgagaatttcaggccatagataatctggatatgcagacaaattattgtttctttggagattcagttaatggcgtgacgaatagaattcaactgtacgtgtatcctactcccttcatctactttcgatagtcatatttccaaatctaaaaattttatttttttccaaatctaaaaaatttatttttgataggcatatttcaatccaacaacttatcatctcaataactttctcaaatttaatgcatgattcttcattgttccacacatgattggctacatgaacattgagaaatgtaaatattaatgaatcgcttatttacgaggaatgactagtagcatgtttaaatggatgataagtagaattacttatccttgatctatgtgtcaagatgaaatatgactatcaaaagtagatggagggagtatcttatttttgggggcaatttggcttgactagttgggtttcataattatagttctggaagtttgctagctccctccaccttttccaacaatgagcaatagaatcattgttgttaattactccctccattctataatataagtcacaactaccgttctatatattataaggcataactacctttttttttattttagatgttttataatatatggcatacatgtatgcatacaattaattaggacttcttctccattaaattattatttttttaaatcctccatcctcaatatctctaattctattggatgcatacattatatttattagggtgatctaaactagaagatgataataattattttttcatctttgggttaagggtggttgtgctttatactattatatactattatagaacggagggagcaatgatataatagtagcataattttccatggtattgaattccttttgatgttctcgagtacttgaaatacttgtacgcagcgcacatagttcatttcagtgacgttcgcagattttgctgtaaaaaggtacttcaccctgtgcgagcatatgcatatttctgaaaataaaaggcattttcggagtgaatagtcggtaatacactggtggacaaaccctttttaatcccgtttcacaaccctcctatattcccgcttatataactgggactacaaatcaaatcatttttagtcacagttgaaataaccgagactaaaaatgaatatttagtcccggttggagttaccaacatggactatagtccctcttggagttaccaaccgggagtaatgttctttttttcttttttttcctgctgcttgcatgatttcgagccccacaaatcactcatattatccaccaatcattcgaacaccacgcatcattcacaaaatccccaaatacatcaagctgcattttctatccccaaatacatcacaaatcattcacaaaatcacaaaatcatatccacaaaatcattcacacatcacacatcacacatatcagaataagaaatccacatcgctcagatcggccgcacatatcagaaaaagaaatccacatcgcatagatcgaccgcacacatcgcacagatcagaaaaaaaccacatcgcagagatcaggtgccgttcatccgccgccttgccggcctcccgcccggccgcctcgagctccgccgccgcctggggagcgttgccacccgccacccgcctcctcggcggccggtgcccgcccgctgccgcctcgggctccgctgcccgcccgggaagcgccgtcgccacgccggacccgccggcctcgttggccgcctgctcggccgcccgccgccggcctcgcaggctgcctgcccggccgcccgcctcgctggcctcgctggccgcccgccgccggcctcgcaggccgcctgcccggccgctcgccacttcgcggccctccctgccgccgcgcgccgcccggcctcacgtggtaggaggaggaggaggaagagaagagaagagaagggagaggaatgggagaggagaagggatggaggattgggtgaggctgaggatggagaagggataagggaggctgtttaattaatgagaggggaggggagaggaagggggagagaccgaggcggccgcgcgcgggcgcgtggcttggttgattttttggtctcggttggtattaccaaccagagctaaagatcaaaaagtttttaaccgggactattgtggattttgggcgaccgagtaaagatggtttcttcaccagtgttagctcagggaaagatcgtttatgtgagatttttttttgaaataatacgattttaatggaaaatcgcaaaaatataagtcggttaggcgaaattgcaagtttagcaccctatcgaacatccgtggttcgacagggtacctattgaacaaccgcagttcaacagggtacctatcgagagttcgacaggtgataaaataattttataaaagagaaaaaaaacactgtagagcactgtagccgtgctcctatcgaacattgcctgttcgatatgtcctgccgcacacctatcaaagttttcatgttcgatatgtccctgctgggtactgtagcaagtacttttttttttttaccaactaccggtcgaactgcagttgttcgatgggttcccctatcgaaccacggttgttcgacagggtgctaaacttgtgattttgactaaccgacatatatttttgtgagttttcattaaaatcatattattttttaaaaaaattcgtttatgtgaccccgaaagtccgcaagttaatagttcggtagagccttttagcttagcttagctaatcagctgcacggaaaacaagatagatatgcatgattaatcaagtattactatgaatatgaataaaatatttgtttaattttgtgaaaaaaacttttatgtagatactccctccttccaaaaagaagtgaatataggactggatgtgacatatactagtataatgaatctagatagatatatatccagatttattgtactaggatgtatcatatctgttattatgttagttttttatgagacggagggagtagtttgtcacgaaacataacgtttaaccattccaaaaagaatacatactcacgtaaaacgagtagcccagcttgtaagctttcccgagcgcaccctatactaagcgtgggtgttcggtttattcggtttgtttttttaagctatatggaattcagtttcttaaaatgtcaaccgatcgatgcaaagttctaggaaaaaaaaaagaaccgagcaaaataaaatgaagaagttcggttcagtttttctggggcttggtttttaccgaggaagatgttgatcgtacgccgtggtcgacttcgagcgattacgcacgcttagcgcccgcccagctacactcaaggggcccgcttgatcaaggaatggggtttgtgtacgtgttagctctcatatattttaagggccttagtaaaaattgggttacatgcatgttagtgggtcttgtgccagttggattggctacagagtgcacacccatttagaccatgttcggaagataggtaaagctgtaaaagactaggatcctggcttttttcccagcctagaagggaaagcccaccacgaaggggaaaaatccccagactacccaaaagttcattttgcaaggtccgggaaggtaagtttcctggctgaatacccccaaatcctaaggaaattcatccatgatcctacctcgtagaacgaatcccacacgccgccatctcctctatacgatgcgaacgccgccacctcctcttgcagcgaatgctgcctcctctcaccccatccaccggagctgccgcctctagatgcatcagccggcggtgcttcccttcctccctggtgctgtcgccgcctcccttttttccttattgccggtgcccggtgctgcccctcttcctccaccactgccaaggatctcgggtacatgctgctgggcatcaacgcggccttctccaggcctagaaccatggcatcaagtacgccccttcactcctctcgccgccgctactcatgtggaggaagaagtggacaggaagcttatgtttttctggcttctctccttgcaagatctttcgccacttccttctccgtccggccaccggatcttccctaaatccaataaggaccttgagaaactcggcatcttctactatctcatccaggtgtatacatttcaattaattttacgtggatatatattttcctactgttagaacttgtgtggttaagtttgctgcatattgattatcttgattctttcattattcagagcgtatgttagttgatatcttgctaagttaaaatctttaaagtctagttatagaactccaagttgttagttcattgttttcacttgcaatgagatgctattattcataccttttgaatatggttttctgatggcaagcagcgcatgtaattcaaaatgtgaaatttcatccccagtattgctctttggattgtagaataattcagattcagaattatcgtactgttctttactccatgtccaaatactctgctcagaccatgtttcaggctatggctgcacacgcagatgaagcattttgtactaatcactgaccaaaattcctcctaaaatttgcacattggatgaagcttaagattttcgtggcacgcttttcaaactgctaaacggtgcgtttcatgcgaaaactttctatatgaaagttgcagtaaaatatcatattaatctatttttcaagtttataataattaaaacccaatcaatcgtatgtaaataccacatcattttacgtaaaaaacttaatcttcatcttcttctttttcttcttcatctttagaagaaaaaaacaccaatgtagttttgcagcaaatctgacgagttaaagctctgaatcctaaaaaaatccccaaaaaacactctctgtatctgaagagtgaaatatctgaatatgtagatgtaaagtcatatatgcagcagttaagcacgtagaatagcagtctaccagttgccaataaacaatttttttttcatgtaatgattggtgaacttatatcctgatgatgatattttaagttttaccttttttgacatctttgcaaggatcactcttttcctcactacattttttactactatcaatgggaggtattgtctaatgaggaaatcaattttatcttgtatacctctgaaattttagctaatcccttctatacctttgaattttgcttactttcttatatacctctaaaatttggttttgatcccttccatgcccctttcgtcagttgaccatctaatatccataagagtgaaatacatggccggtccttaaacttgttgtgtggtgtcacttaggtccgtgaacttaaaaattgcacgattaggtccgtaaacttggtttaatgtaccaccccagtccaatcgtcctttgactatatttgaccgccaacgtggcataccacgtaggcaacacttttattctcagcccctccacatataccttcgcacataacttaccctgaccagtgcatttcaacccaaatccccccaaatatccctaaatcggctagggttttgatggtgagtttagcggaaggaggccgagaggtagtggttgtggcagcctcggcggtgagattagcggtaggaggcagcgcagtgaaacggggttagcggtggcatagtgcggcgggaggcagcacagtgcagcgggaggtagtgcaatgcggcttgcacgctaggcatccccatggattctccaagctcgtcctcatcttgaagtcgctggaagaaggtgttgttgatcaagtacccgttgcataaggataagattattttggagtgcagagcaatgtcaattgctaatcgggaccacatcttctatacatgcaaggagaagaatgagagggaagaacaatttgagattttttcttgggattttggtgtcgctatatagctacaaggagatatatgtgacatgttgtgatgtggaggggcctaagagcaaaattgttgcctacgtggcatgccacgttggcggtcaaacgcagtcaaatgacatttggactagggtggtacattaaatcaagttcatggatctaaacctgcaattttcaagttcacggacctaagtgacactactacacaagtttagggaccggcaatgtattttactctttcgataaaaatgaccattttaacttttggatgaacacataaatttatgaattacataattgaaaatgtaaaagtttgtcgcatgagactattatagttatgagtttgttgtgcgatacattatttatgacaaaatttatttttatataataaaataaaaatatatatttatttttttaagaaaaaaatcataaaaatgaggagcattcatacaaagataggactaccaatgctcacgatattttctttatgaatgctcccaataaagaaaatctattgccctattaaaatttcaaataaaaattttaatttattacatttttatttatgtcaaaaatttctgcactaattatttagtctcattagtttcataaaatgcacgtactatgcattaaatttctgcactaattatttaatcttattattttaatcattttttaagcttatattcaaacctaaataatcaagggcataaaagacatttgcaaccaaacttaacagtgaaatgaaggaatcaagttgaaatttcagagatatagaagggatcaagaaaattacaggtatatgaaaggaattgagtgagttttaatgcttaggtcttgtgaactctgtgaaggatctgttgcattgtctagtgactagtggcatgtagttagtaaatttgattaaggtgcataagctactatggcactaatgagaattaattatgattcattattggatagtcactaagttattaaataaaattgtagaagaattacccacaatcaaaagttagcactatgccagaaccctacatctgtgacagcataccagtgacgggcctatgaattggtcacagatgactgtcacctttgacgggttgctaggtttgctgtcatcggtggggcatccggccacggcccgtcacaggtatcccctcacctgtgatgggccagaaggaaaagccgtcacaggtgaggaagtgacgggttttcctcccaacccgtcactcgtatcctctcacctgtgacgggccgtggaattatgagccgtcacaggtggtggtccgccacctgtgacggattttttttatggctcgtcacaggtaggtcaatacctttgacgggcaactcaattgaagcccatcaaaggtatgaccaacacctttgatgggcttttttaatctaacccgtttgaggtgtgttgggtctataaataccccacaaactgccaactgctttccatcccgaccagttcaatgttcacaaatcggttgggagggcaagggggggcgaatttttgctaaaattcaaggtaaaaaacacattattctccattcattctcaatatatcgatcatcatatatttttctttgtatgttgttgattttagatggatcgtagatggatgtactatgcgcatcgttcgtctaccgagtatagagagggggtcactgaatttgtcacatttgcggataatgacagaaaatgtaggatgcacatgttgtgtccatgtagggactgtaagaatgaacagatgatcgttgatagcgatgaagtgcatgctcatttgataatgaatggattcatgaagaaatatacctgctgaaccaagcatggagagcaagaggcgcctgatgtcgcagctgaagaagtgttggatcaggatgtagagaacaccgccgcagctcgagaaggcatgttcgtaccttctcctttaggtggagagaccatagatttggacactcaatgtctatctacaatgttgcatgacaatgaagacgcagaggacaacgacagagattttgagaagtttagtaagttagtggaagattgtcagatgcccttgtatgatggatgcaagtcgaagtacagcaagttgtcatgcatgctggaactcatgaagcttaaggctagtaatggctagtcggacaagagttttacagaacttcttgagctgtttaaggacctgttgccagaggggaacaatttaccatagacgacatatgaagcgaagtaagtattatgtccgttgggcctggaggtcagaagaattcatgcatgtccaaacgactgcattttgtattacaaggaatacgctgacttggatgtctgccctgtctgtggggcatcaagatacaaacgagcaaagagtgaaggtgaaggaagtaagtcaaagaggggaggccccgcaaaggtggtgtggtatctcccaattgcggagcgcatgaagagaatgtttgcgaataaggaacaagctaagctagtgcgctggcatgccgaagaacggaaagtcgatagtatgctgaggcacccagcagattcagtacagtggaggacaatcgataggatttaccaggaattctcaaatgacccaagaaacatgcgtttcgcaatgtgtacggacggcattaatccatttggtgatttgagtagtcgtcacagtacatggctagttctgcttgttaactataacctttctccctggttgtgcttcaaaagaaagtatattatgcttgccatgctcattcaaggaccgagacaacctggcaacgatatcgacgtgttccttgaactaataatcgatgacttcgaaaggctatgtaatgagggcacacgaacataggacgcatatgcacaagagtatttcaacctctatgcgatgttgttttgtaccatcaacgattatccggcccttggcaacctttctagctaaactgtgaaagggaaatggacgtgttcgtgagtgtatggaggaaacaagaagcaaatggtgtctacatgggtcacaggagatttctcccaaggtatcacccgtataggaatatgagaaagaatttcaatggacacaaagatacagccggacccccagcagagctaacagggatagaggtgcacaacttagtgatgggaataaccaacgagtttggaaaaaaagagaaaagttggaaagtcaaaagagaagagcatgtcaaaggaaaaaacagaggagcatgtggaaaaacaaaagacaaaagagatgagcatgtggaaaaagaagtcaatattttggagactaccataatggaaggatcttgaagttcgccactgcatagatttgatgcatgtcgagaaaaatgtatgcgagagtttaatgggattactgcttaacccagctactacaaaggatggtctcaacgcctgacgagatctggaagaaatgggtgttcgctcggaactacatcccataaccacggaatccggcagggtttacattcctccagcctgctacactctctcgaaagaagagaagattgatttgctaacatgtttgagtggtataaaggttccatctggttactcatcaagaatcagtaggctcgtttcactgcaagatcttaagttggtaggaatgaagtcgcatgattgccacgttcttatcacacagctgttgcccgttgcaataaggaatacttttcctcctaaggtgcgacacacgatccagcggttgtgttccttcttccatgcaatcggccagaagatcattgatcccgagggactagatgaactacaggctgaacttgtgagaaccctatgtcatcttgagatgtactttcctccaactttctttgacataatggaacatattcccgtgcaccttgtgaggcaaacaaagtgttgtggtccagcattcatgacgcagatgtatccttgcgaaaggtacctggggatccttaagggttatgtacgtaaccgttcacaccccgaggggagtatcatcgagagttacaccaccgaagaggtcatcgatttttgtgtggactacatgtcagaaacatcttcaattggattaccacgatctcatcacgaagggaggcttgatggtgttggtactgttggaagaaagactgttaggttggatcggaaggtgtacgataaagctcatttcacggtactgcagcatatgactgaggtggtgccgtacgttgacgaacaccttgcagttctccgacaggagaacccaggccgatcagagagttgggtcagaaataagcacatgtcttctttcaacgagtggctgaagaaccgaattgccaggttgcagaacctttctagtgaaacacttcagtggttatcacagggtcctgaatggagtgccaccacttggcaaggatatgacataaatggatacacctttcacacggtaaagcaaaacagcaaatgcacagtgcagaacagtgggttacgcatcgaggctgctagtgacggtggttggcgtgatcaatactatggtagagttgagcaaatattggagctagattacttgaagttcaaagtcccgttgtttcgttgtcaatgggtcgatctttgcaatgtaaaagttgacaatgaaggtttcaccactgtcaacttagctaacaacgcgtacaaggatgaaccgttcgttctcgcccaacaagttgttcaagtgttctacatagttgacccgtgtaacaagaaactacatgttgttcgtgaagggaaaaggagaattgttggattggacaatattgcagactaggatgattacaaccagcacgtccacagcataggtcaagaaatacctctagaagatgaggaagaagaagatggcgttcaatatgcacgcgtcaaccatgaggaaggattatttttgtaatttatgtacgtagtttatgtctacatgtctgttatctatatgactctaatatgttcgcaatgatcaatagtatattgcttatgaaatagtcaaataaaataattaagtgaagcacccactagaagtgaaataaaataattaagcaagtataaccatcggaacaaaaataaaataaaaatgtagtgtatgtggaaatatgttaaggaaaataaaagaactaagtgaaatagaataaaattaaataaaatattgtagtccatgtagtcaaactcacctgtcacaggctctaactgtgaggccgtcacaggtgcccagaacgctgggcccgtcacaggtggcctcagctgtgacgaacccgctctttgcgcccgtcacaggtgacctcacttgtgacggccccacagttggcgcccatcacaggtgagtttgactagggttaacctagggttggacctcttctagatccagatccggccactctctcactctcactcactctctcgaccgccacctcgaccgccgacgctgctcgccctcgccgcctcgccctctccgccctcctctccaccgtcgccgcctcgccctctccgccgccatctctgccgccctctacgccttcctctccaccgccgcccctcgtcctctccgccgtccatccatcgacttccccgacctccccgaccccgacctccccgacaccgggatccacgatgccgtccacctccacctccacgacgccgggaccccgaccactgccgccctctccgtcgccatctccaccaccactgccgcctcgacctctccaccgccgcccactctgccaccatctccaccaccgccctcgtgtgtttgccgccgtccgtccatcaccggccccgacctccccgaccccaacctccccgacgcctggattgacgacatcggcctgcaccgccgaccgcctcgacctcttcgccgctgcctctccgccctcgtcttcgccgccgccgggatccaggacgcctacggcctgcgccgccttctccaagtacgccaccaccctccccccttcctccttttttcgatggatgaattgcattgtttagatgaatgaaatgtgatttgttgtttcgattgttggtgctgctgtgtagatgaattaaatgtgatttgttgtctgtagatgttttggatgaatgtaggggctagattttggatgaatgcaatattagaggaattattctattggtattagaggatcttagcatgaattttgctgcagtggatgttcttttctttatggataagaacagattatctacacttgttgatttatatacccttgttatctatgaataggtgaattgcatgaattattgtttatatacatgatttatatacccttgctgtctatgaataggtgatttgcatgaattgttgtttatatacatgatttatatacccttgctgtctatgaataagtgaattgcatgaattgttgtttatatacatgatttatatacccttgctgctgctgttttagaaattattgtgggctgttttattatctacacttgcccctgcttgataaattaattgtgggctgtttaagaaattattgccatgggtatgataattttttttgatgccttgctgtctatgtttgcccatgctgctgcctatggttgccttatattaaatagccagtgatgaatgctcaagaacagaaatacctctaaacttgttctttttttaatgcataagaacagattatctacacttgttctttttttttatgtacacttattcttttttgatgaattgctgttgctgctgctacccctgctgcccctgtgccccttattcatttttttatgcatagattatctacacttgttctttttttaatgcataagaacagattatctacacttgttctttttttatgcataagaattgcccctgaatgcctgattttgatgaattttgatgattgttataaaatgaattgatgctgctgctgctgctgctgctcttatagaatgagtgttctttttaatgcataagaacatattatctacacttgttcttttttttatgtacacttgttcttttttctggattgataagaggagactatctacacttggttcttttttacgctttactttgggttgcttttccctcctattagctgatttcctcttctttttcccttcatgcaaatgatggtaattgatgcataatttctgagcaaaactgaggccatatgtttcatagtataccccgtattacattggttctaatgttatttagtataatggtaggaaatttataagctttttggggaaaattagaccatgacaacgcccggcgcaaacccgccctccccaacacctgcaaggatacaggaaaagcaaacccagccacggagacagttgccgaaagtcatccctcgacaacggcggtcgaacaatccaaaattcatgataatttataggataatttttcaccatatgaccacaaaattttagctagcaccccttagcatatgttgccttctgtctgcgctgcagaatcgccccaggaataacatacgtcgatgtcggacgggacaagtgcaagtaggtcgagtagaaatccccggtcacaaaatatatggccgaccacattgcaagttataagagaggttgacgctagtggtaggcccacggcgccgaggactgtcattggaagatggtctaactgctgcgggctggcggcacgtgagaatttcgggatcctccataaagatatcgacaaggtcacaaaagccgagaaagagcgagcttggacggcaatggagaaatggttcacatttccggctaaagcaaaggataggctcaagcggaaggcattccataagatgggcaaagcttggaagaattggaagtcgaagcttttcaccgagtttgtcaacctgcccggcaatcatacgccgttcgatgaataccctcaaataaccgaagcagtgtgggaggaattctgctctctcaagaacacccaagagtttagggaatcaagcgaggcacatcgcctactgcagcagcggaatgagcacccgcatcggctgggcaccgcagggtacatcggcaagaaggcaatatgggcccaagaagatgcagccgctgcagcagcaaatgtccctaccccgttttcagacatccctgaacaaagagctcgcaactgtgcgcgggaaggggtaaggtcaacccagacggctctgtcacatttgagaacaaaagtgatgccgtcgtctatcaggaactggtgagttcactacttaacctaactaatttccgttcgtataaagtagaagttcgtataaacgactcttttttttctagttgggcttggttgctgaacaagcttcacaaagcgaggttgagtccgcgccgaagaggcgcgaagatgacatcctcacaaaggggctcggaaccaaagaacatcctggccggactaggggaattggtagcgatgtgccctggaagcatggactcccgcagtacagctcccaatacaggaaacggaaagtctccaaggaagaaagggacgctcgtttgaaggccgaacttaaggttgaggtcattcaagaactagaagctagcatgaacgctagggtggaagaaaggtttaacaaggtcctcgccaacatgaatataccccgaggcacaacacctgctgtgcatccaactcctcgtgcacaacacgacgcgagtccgtcacagcataggagtagttgtgcatccacagaggtgccggcccctggtctcccggtcgcaccactagctgcagtggaccacatagaggtaattgatgttatccgatctatatctaataaaaaacctttacacgttccaatattaaattcaaactttcacatgtgcagggcgtagcacagtgtgtcctactggcgagggtccacccaactttcgctcccgaagtcgctgagggcatggctttcaagccctcggttacagacaaggtccactgcgcatacctgctagctgggtatgccaaggtgtccaacgatacagtaaaggacacctggtcaggctatccgctgcccgtgccccccaatgatgaaatcatgactttgggcgatgcgcgcaagacgttcatacaatggcccaaagaagacatagttgtgaagatgactcctcgtccaagtcgaccgacggagcttacacctcccaagtctaagctatcaattgaggctccccgtggaccggcattgtcagtacctcattctcctgatggagctaatatggacttggcagatatagctcaaagcttggctctaataaagaccacaagaaaggctgatagctccccgccacttatcaagggccagaagcgtgaacgcggcaaggggaaggtcgggaagttggcaccggagccaaaaaggggcaaggctgtgacgtcgatgccggtgagcaaagcggggaaggtcgtgagggcgccggcccaatttgagctaggcatgctattggtggaggacaatgtgttagccgtgatgggtattgcttgccgagagctacataagcaatacatgaagctaagcaatgccaagcaaaaaatgagggtcatccatagttggacatcacgaccaccaaccgttcctatcatcgcctgcctatataactataggctttgatgacctcttcgacctttttaggatccggaagttggacactggtcttctaaaatgctactccttgtaagtgcataccttctatacttgtgatatgattggactatatctcctaattaaattagttctaatatgtaaatgttttaaggttgtgttggatcgagagtcgtcgccttggtaatcaggttgggttccttgatccatccatggtgaacgaggttaatttacgacagagcttcactgaggtggttgactatgtcaaccggtgtttatgggcccatcaagacaaggagtacatcatgtgcgcacacaaccaagagtaagaggacaatacccttcgtgtatattgtttttgaagttaaggttcttagtactaacgctacataaccactgcgcaggcgacattggattctcctagtcatcgtacctaagtggagtagggttacctaccttaactccaataagtccaaagattatgatttcactgaaatcaccaaggccttaaatatggcttggggcccatatgtggaaaagggtggtaggcacaaggagggcaaggacgaactttatcatgacaccaagttcgcatgcgcacaacagatcgaagaccaatgtggtttccacgtgtgccacaacatgtcaacacttctaagagaggtgaaagatttcgaccctgaggttgttgctaatggcgaataagctcatttcaataccaacattgctattcaaaacgtgctaacctcttatttattaaacagaaaggtagaactggcttcaagatctcacccatcaaccccccccccccgctatcagaggcgaagtgtgcgccttcattcttgcagaaataatgaacaagaaaggacgttttcacgtcaaatagactcatgaatttggctagataatttattgtgacgtaaaaaagatgtttttataatttcttgtgatgtaaaaaaatatgtttttatcgagtgcaatgtaatttactttcatatgtgcaatatttatggtagtttactaaattgtcatcaaatttaatcaactacgatttacgttatactattcatttattttctcctttttttttcttattgacaggtcgtggaggtcgaggacattatgactttaatccatttggtaagtatatatgcggttctatgagcaatgaccgaaattgtggctttcaagaggtgtgaatttgctgtgcaaaattgtggcatttgaactgcatatgtgaatgatgtcaatttttgatatggatctgtgttgttggggatctgtgatatttgagatggatctgtgatgttatattggaggggtgactcgaatatatctgtgatgtatctgtgtttcagagggcatggctagcaaatcctgaggctagccaatattgagcatttattttttttctggaattaactcatcagtgacgggttggaacaaaaatccgtcaaaggtaaactcacctgtgacggactagcaaataaaggcctgtcagaggtgacctacctgtgatgggcctttacttttgaggccgtcacaggtagatcacttgtcacagcttctatctacggagaccatcacctctgacggcctttatttaaagggccgtcagagatgagtcacctgtgacgggtcccaactcgccctaggctagcggagaccaacacctctgacagccttctagtaacttgcccgtcagaggtgggtgtcacctgtgacggccggccacccgtcaaaggtgggtgtcacctgtgacggtcggccacccgtcaaaggtgactggactcatcagtgaccactgatcactgaccatgcgcgaagccgccaaagatgagggtttgggcccgtcacaggtgaccttggccagtgtagtgtagattagatggggctggtcatgggctgaagattagatgaaatattcctttttgtgactatcaacatgcatgcagttagctgattattaatgaagagttaactgccatgatgcctggaatttttagaagtgcattttcaggtgcctgtcatgcttttgacacaaatgaatacattgactttgccatattcttttggtgtgcagttttctgatatgtgatgtctacgggccttttgtttgctgcaccaaggatgcaaggaaacgtcttgtgttatacctgggaaagtgttgttactatatactccctcaattccaaattgatctctatatattttataggtacaccaaaaccaagaaaagctaataactctctcatactatatttactctagcaacaaactctatgcatgcaccatccccactatttcctagctaatagcaaatcaagatattgcatgtgggttataaatacttgtgtgcatggatgcatgcatcaatgtccatttactccaatgcacaaataacgaatatacttaatgaatgaacacaaatatatagatcatttagcaataacctaaaaaaactatatgtagatcaatttggaatggaggaagtagaactcttaaggaaaccaagctcaaattaatattaatgatttagctttagttaacatagttttatcttgttcaatttaatacttgttattgtgagagacatgtgcgtgttctaaactcaatgtgcattggcttctaatgttggttgcctgttctttttccaatactgtaacaattatgacatggattttgtagctggtcttcagtatcatttttaattttccaaaattttcatagttttctaggcttttttatgtatttttatgcattttcctgaaaattcagatttttgttgtgcagtatttcgaaatttctacgtgatatttgaattttttttaatgaaattataaaactgaagtgatatctcacggctcactattattgaaacacaccaatacacaaagatcccatggtggaggggattgacgaggggattgagtgttgggaggggatccacccaagtggtgtacgttttccctaggaaaaaaatcctccccacatacttatcaaacaaggtctccctagtagtgttttccctggaaaaatcctccccatataccgaacaaggtctcaatgagtgtttttgactaggaaggctttaccatcccggtccttgtaaatttatgagctgagattacaacagtttgcgtatctgttcatctagagctattcaatctcgtgtttctgactaggaagactttcccatcctgatccttgtaaatttatgagctgaaattacaatagattgaatatctcatcatctagaactattcagtctctagacgaactttatttagccttatcgatctgttactattaaatggtgacctctctctctagtggagtaaaggattgggggtctttgatattgctccgtatggctacgctgcaacctgcagttgcgttataaatacgttaattaacttgcaaccagcagtttaccaaacaaatataaacgttttcttttttgacaaaatatatataaacgtatttgcggcatcaaccgcagcatcattttctatggctggctactgtggctacagcgctgcactattgcagcacggccacagccagtgctctaacgagcaggtccattcgttacttcgataattaagctaatagatggggtaatcattatcataaaatccaaaaatgttgctatcaaaacaatttggctcatatatctcgctatttgaccgcctctttgttacttcatccgtttcacaatgtaagtcattctagcattttccacatttatattgatgctaacgaatttgtctagattcattaaagattcattagcattaatatgaatgtggaaaatactataatgacttacattgtgaaacggagggagtagaaccatagccacattgcccccatccttcccaaaatagtttgtggcagtggatcgacacttccatttttttcatctttcgtagtggattggacaccggaccgaccggtactacgtactctctggtttgtaatactttctccactccatttcatattataagatatctttatttttttaagtctattttttaagtttaatatatttatatagaaatatagcaatatctgtaacaccaaaatagtatcactaaatataattttgagaatattttatattgtatttgttttatattaaaaatgttgttacgttttcatacaaacttgattagaattacataagtttgatttaggaaatactaataacccttataatataaaacggaggagcactggtcggcttaaatatacaccaatatcttacattttagatggaggtaatataatttattttgtttggacttggtaaaacattagagtaacactttttcatatttaaatgaaataaaacatttaaatatatgtccaaagaacaacagcgtaatctattaaaaaaattaggggtgggtagatatgttatacacactctttttggcttcacacacacactcggacacacatctccaatcttgagcacacagccacacacacacacaccatatcgctcaagttccaatggaggtacaggaactagtaccgtcgccatggtcgtcgtcctcgtccttcctagtgctcgtgctggccaccttgctcttcgtcgccgccttcctccggcggcgacagggagcgcggcgcaagtacaacatcccgccggggcctcgcccatggccggtgatcggcaacctgaacctgatcggcgccctcccgtaccgctccatccgcgacctctcccggcggtacggcccgctcatgtccctccggttcggctccttccccgtcgtcgtgggctcgtcggtggacatggccaggtacttcctgagggccaacgacctggcgttcctggaccggccgaggacggccgccggcaggtacaccgtgtacaactacgccggcgtgctgtggtcgcactacggcgagtactggcgccaggcgcgccggctgtgggtcacggagctcctcagcgcgcggaggctggcgtcgacggagcacgtccgtgccgaggaggtgcgcgccatgctgcgcggcctgagccgccgcgcgggcgccggcaccgccgtggtgctcaaggagcacatgctcatggtgacgctcaacgtcatctcgcgcatggtgttcgggaagaagtacatcgtcgaggagggggagggttcgtcgccgacgacggcggaggagttcaggttagggttttaaatctccagctatagctgccgttatcttcggctataataagtttgagaagggctctagctattaatttgctctcatttataacttagccgctatatatagctccatttagcctggtcggtattgctgctgctataaactatttgagaagactaactgctaaatatcttagcccgttattcaaaacgttggttggttcaggtggatgatcgaggagatcttcttcctcaacggcgtgttcaacatcggcgacatggtcccgtggctggggtggctggacccgcaggggtacatcgggaggatgaagaggctgggcggcatgttcgaccggttcctggagcacatcctggacgagcacgtcgagcggcggcggcgagagggcgacgggttcgccgccagggacatggtcgacctgctgctgcagttcgccgacgatcccagcctcaaggttcccatccagcgggatggcgtcaaagcattcattctggtataactacttgtttcattattaaatatacttgacgttttatatatacttttatatatcaaaaacagaggaagtctatgctacaacatactgtttcaattcatccaagagaataaagcatatgcagtttttttttaaaaaaagatattaagattgtggttagaaatggttgcgtggttggttgagataggaagatgacggagaaattaaattaggagaggttatggttgattaagatgggagtatgtgctagtaaaagctttgtaagcatcttgaaaaaaaaataggtgaaaccccgcacattgctgcgagaatttactatgataacaataaaaaaataacttgtaagatagctagataacatcagattaagtaaattaatgtggtttataataatttaaatttaaatagtatgtagaatggtgattcaaacgtaaaaagtaaggttgtatgactttatggaagaagaaaaatagagagatagtttggacgtagattaatcatctaaaggttaaaaataattgatgtgatttgacttaattagaaaaaaaaagagaaagataatttgtaccatagattaatcatttaagcactaactaagtgagaatgaactatataagtatataggatatcattaaacataataaagatatacattgaaacattatgtgaattatgctggatgataatttaatatgtttgtatttgaaaagctcttaaattataaaaactataaagatatagcaagtttacatgatgtttaaatgtgatgattgttagtggatgatgatgtggcatcttgttaattagtggatgatgatgtgacatcttgtttagtgaatgatgatgtagcatctttgcatgttaagtttaaggagttagtgggggataactttatagtaagataggatttaaaactccaaatgttctaataaaagcgctagtaaaagcattgtaagcatctgaacatacttacatcgaccattaacaaaactattgaatactccgcgtgtttgtagcaagaaatttacaaaaatgttttggacagctcgtagaaaaaaattttgaaaatcacagtaaaaaaccaatttataactcatatattctttttttgacggtctaaccatcaaatgtaactataatatatttatagtgtaattatattataactaatatataatcataaatgtaatttagatgtaaattatatgtaactataaaaaacaagttagctcgctgatagtgatgggtgcctacgactaaaagatcacggattcgagtcttggcgcgtgtaagtggtttttgtttctcttgtcacatgcaggaatctcagctactccgttctttttgaagcagaataaaatcatgaatttatatgttaattaatgtggattgcacgatagtatttgtcatcttgtaaataatagtacatggattgttgtgatatccaaattaatgatgcgtggcggctgcaggagctgatcacgggcagcacggacacaacatcggtgtcggtggagtgggccatgtcggaggtcctgaggaatccgtccgtcctcgccagggccaccgacgagctggaccgcgtggtcggccgccgccgcctcgtcgccgagggcgacatccccaacctcccctacctcgacgccgtcgtcaaggagagcatgcggctccaccccgtcgtgccgctcctcgtcccgcgcgtctcccgcgaggacgccttctccgtctccgtcgccggcgccgccgctagctacgacatcccggcgggcacccgcgtgctcgtcaacgtgtgggccatcgggcgcgacccggcggtgtggggggacgacgcggaggagttccggccggagcggttcgccgccggcggggagcgcggcggcgtggacgtgaaggggcaggacttcgagctgctgccgtttgggtcggggcggcggatgtgcccggggttcggactggggttgaagatggtgcagctgacgctggcgaatctgctgcacggcttcgcgtggaggctccccggcggcgcggcggcggaggagctgagcatggaggagaagttcgggatatccgtctcccggttggtccagctcaaggccattcccgagcccaagctcccggcacatctctatgatgaataattcatgcactgacgggccgcatgcatgtatgctcgtatgtgcgctctctctctctctctctgagttcatagttatattttactgcagagtacttgtttatttatcgatctacacgcagatgataaacggagtacagtataatgaaaaaaagtttttctttttttttactgtacctttagatggtcctgggtcgtctactagttcagatccaaagaccagcgatataatttgttttttttaaacagtagacggtaggagatctaccggatatattagaagaagagagttgatcctgtttattaggaaaatcaggtcaaaaaccatacaactgtacagcttactaaaaggaaaccggcaaaaaaccttacacaaaagacacgaaaagcatgcgataaaactacaaaccacagtagtgaccgaggggagagcaataccttcaaggcgaagcctccaaggaggtgaacaacgacataagccactgtcgactcccgcccaaagaactaggctgggttttcacccaaagggagagagagtccacaaggcaacacctccaagaaggaaacggcgcccgcaggcatcgatgtcgccgatcctggaagaccagacaaggctttcgcttaagattccctcaaaggtgtagagcctataagaaaccagagtcaaagtgttaagtgttatcgttgcccagctcatcggctagacccgatgcagcaactccgactccgtcttaacacagaaactctagcattgtagagggcaagcaccccactcaaaactcggcactacgacaggttcatacagacacaggacacttaaagcatcggcgagacccaaaagccttgactacagacacactggaccccaaacacggacaaacacttctcctcaataaccgaaaggctccacgaccgggtctggagacggccaaaagaagagaggagcaccaaggagtgaaggagtcgtggccggcatgaaaaggaactgagagctgaagtcaggggcaacaaagaccactgtgtcttccatgattccggcaaggaactccggctatcgcgggacaatccttacgactgcagcaaccaccaccaacttcaccgccagcgcagagaaaggtacaccagggcgagcagaagagcaactaagaagaagcgatggtgagaggaagggaggaagggatgtggggtggggggaggaaggaaatgaggggcctcagcagctgccggcgatggccggaggaacagagaggaaaagagaaaggaggaagaaagcaaggaagaagaaacgggtggttgcagggacggcttccgcagttgccagcgacagggggggtggccggacgccaaactcgccaacccggagccgactgatgccgcgctgccacgcgggcactggcaatccgccgcccacgctccggcgcccgcacggccgagcatgaccgccacctcgtgagcagacttgcgcgacgatccggccgcctcgcaagtcgccagacgccgcagcagccgccgccagccgggccacctccgcttcacgccgccccacgacaccgccaccgacgcaccgtctagatccggcgacggcgtctagctgggatccctcgccgccgccactccccaccgccggcgaaaactccacctcccccatgcctgagaggggaaaccaccgcggtggagaagtaaattaggaaacaaattgcatgtcatttaataggtaaaatttgttggacaaacgagactaaatcagtcgattaggaggcacttgacgaggcggcggttagaagggacgatgcatcggcggttctgcgtaattcagatgaaggcgacgaccgtagtaataacattaaaggtttgcaacctcgccagcgcagggcaggctggaacaaggccattctactcgactgctcgtccttgccacactagtacagatccttctatctgtgacgggctctaatatgcttagaaatagcgggccgtcacaaggaagtcatctcaatcgggccgaaaagtgcccgattgagatatggtcgcacagacatgttagatgggtataaaacttaagcccgtcacaaatgaccatcatctgtgacgtgcaccaacttgaggcccgtttgagataacaactaggcccgtcacagatgactcatcagtgacgggctatatacttaatctctatcgggcattaactaaagcccgtcaccgatgactatttttccatttttcatatgaaatgtttatatttgtaagttgactatagcaaaataattttacgggtagtaaatgatttcaaatggaaaaaatgtcaacaacaaagttgtataacttatcaatatttacaacttttagtttggtcatttttcaatataacatttttttgaacagtttgaatttgaatttaaaaatatgacaacttcaaacaacattttcaaatactaaatgatttcaatggaaaaagtcatcaacaacaaagttgaataactcatcaagatctaaaacttttatttttgttatttcttcatctgacgaaatgttattaatattattcacaaattttacatatatgtgttatagtttataaaaccagataagagatatgtcaattttataaacaatgttactatcactttgtcgtatgaagaaatgaccaaaataaaagttttagatcttgatgagttattcaactttgttgttgataactttttcagttgatatcatttagtatttgaaaatattgtttgaagttgttatattttcaaattcaaattcaaacggttcaaaaaatgttatatagaaaaatgaccaaaataaaagttatagattttgatgagttatacaactttgttgttgatgactttttcagttgaagtcgttcactgatctaaaattctatttgaactttttaaactttgaatttcaaatttaaaattgtttaaatagagtcagatggagaaatgaccaaaataaaaattttgcacctcgatgagttctacaactttggttttggtgacttttccatttgaaatcatttagtaaccccaatttgacatcctggcctagggcataataggattaatagaatactcataccaacatgttacaattacttttccagaagccaatctctaaagaattttgacgttaagtatgcttggtctggagcaattttgggatgggtgaccgaccgggaaatttgaaagcgtgggtgcacacgagtgagggctagccaaaaaatgaaatttatttaattttggaatatactcatctgtgatgggcattactcaaatttgaacttcctgcgtgggtgcacacgagtgagggctagccaaaaaatgaaatttatttatttttggaatatactcatctgtgatgggcattactctagcataagttaatgtaatgcccgtcacagatgattaatgcccgtcacagataagggtcatctgtataagggtcatctgtgacgggcgctagttgtggcccgattaagataggtcatctgtgacgggctatagtttgactggtcgtctgggtcaaaactatcggtgacgggctttacttatggcccgattgagatagaatcatgcgtgacggccgtttgcccgattgagatagctcttcacatcagtgacttctagcatgtgacggacgccatgcccgattgagatgggacttaccgcccgattaagatgagggtatccgttctagtgcctgctccaaaaatcccgcgttagccgttgcttagcactaggatgggcgcctgcgattggcggcgcggtaggaggggtggtgccgccatgcccgtgctcgcgcgaggggaaggagaccgatggcagatgatggccaagagcacgagattgtggcggtggccggccgtcctcctgcatcgtcaaatcatgatggattgttattggacctgcaaactcagcccgtttggtccatcatgaataagttcactttgactccattactctgaaccgcaaaactagatatcttatctctaaactgttaaaaccggtgcaatttgattccctcgacgattttaacgtggcatgttaaaaaaatcaaacttataatatgaaataaatagtcccatgaaaaaaaattagcagcccactcccaataacaaccagcaacccatagttctaagaagaaaagaaaaaaaataaaaatagcagaaaagcaaaataaaaataaaaaggggcaggcgaagagaggaaagagaagacgaaggagaagggagatcctcttcccgctctattcccttcccttcccttccttgccgacccccgtaatattcccttctcctcctcctcccgcttgctttcctttcccctcactctctctagctcgctcgctcccaccacctttctttgctttctttgaccaccaccattgtccccctccgctccacatgctgtggcgggcgctgtggtggtggcggcggtgggtcgccgtcgcgggcgcggtggcgtggttgttggcggcggcggtgcggccggcgggcgcggcgtggtgcatcgcgaggagcggggcggcggagaggacggtgcaggcggcgctggactacgcgtgcggccccgcggggggagccgactgcgccccgatccaggccagcggcctctgctacctccccaacaccctcgccgcccacgcctcctacgccttcaactccgtcttccagcgcgcccgcgccgcccccggcgcctgcgacttcgccggcaccgccaccatcaccctcaccgaccccagtcagtagtcctctcatctcctctaatcatccaccgccatgaaatccatccatgattactgtagtatcatcggttcattgtcctgcgtatccatccatctctgcttctcttttgcttttgcttttttgttttttgcttggtctccgagtatgtctgtctcttttgcttttttcctgcttcggtattaccattgccacactatactagtgctgctttggtagtagctgcttttcttttctgaagctttggtgttgtttcttgcaacgtctttgccgggttcgtacgattcatatccatctttctttctctagtttcctgtttgctaacttttctttctgttttctagtacgtaatcatgtgataaaccgataaagacaagcaatgtcagtcagcatctttttttgaaaaaacttttcgattgtttcttgtgtgctatctttgccttcccgctggtgataatcctgtagtatatcttcctttaatcttattgttgtagtgattaatcaggatctatctaagctaataatgctcactgccagtgccacaagagcatggatttcccttttcctgtttgttagttgttacattcattgcgcaatctgcaaattattctttgagaaaggaggagggaatgctttcaactccagttcaaatgaattcaactcaggccaatattattttcactattatttatgctccacaaaatcgatgactaactgtagatgagtccatgttataaaactgacataatgaagtgaagtggcagaacatacttaacatggctaatgtaaatctaatgacactactgcaaacacccgaacagaacaaaactgtattagggccatccatgtctattctaagctctttgtatttatgttaaaaatgatttttttcccttggggtaaatttggtgagacgtaaagaagtcagttcaagataccacttaatacttgatttgggggagaaaaaagtatgcatgactcttgtgctagttagaaccattgaggtggcagcctttctactattggtgttaacatgttgattgattggcttaaatgatgtttcctgacggagaatttcagataacgtattttctacaaaacaaaataccttcatcatgcaagtgcaacaggtgaatttatttatagccatcccaatttatcttcaatcctctttcgaagtgaaaaattgaataaaacacaccataattatacagtcagaaacgagtgatctacatggacatttttgtgattgtacatgcactcaaggtaagtttgtggtatgtatgtcttcaacaaaaacattcttaaggttctaagttctagacgttgattgctacctagcaccttctatatttctagcctacatgtttacatgcaattggcaatgtaacaaatgagttggatctgtaatggaagtattggaatcggaaataggtcttgaaattctcatatctaagttccctttcttctgatatagacatgtccttagtttttcctttttgtttctcttttagttttcttagtgcattgaggttgctttatattacatctactgtgtgcatccaatcatccatgctttcttgttatcttcttgagatctctcaaggtgcatactattttaactctgtgtgtacttctctctgtttttttttttttttttgcgaggtgaactgtgtgtacttactctgcttgttcctgtatttcaggctatggatcatgcacctacccagcatcaccaaggtacacgcatcacatattatcagtttattgatctgctccatatggagtacatctgctgaacgttcatctagaaatcacatctcatataaccaagcaaaatagtcttttagaagataaaattgagtaaaagcgcagcagcatacagagtgtctgagttgtatagatactagcttttagagctctctgatattcagttatttcacttcacagctattcttaactcccaccacaatggacagtgctcacttaattgcatgaattagacctgtacatcaaaataataatgccagttggtgtaactaatgggatttgaaagtaaacaccttttgtaaatgcattaagtccttaaagtgaaccaagtcagatccaagaaaaaagtttcattacagtgctctccttacagaaaatttctggttttccaaggacacagcctaatacacattgtcagtgtttgtacagaaaaaatcgtaatgatggtttattttttggtttagtatataactagttgggtggcccgcacaattgcgcggctagcacccatataaaattatatatttttaatataattttacttcaaatttattaaatagttatctcattgtcttaaaatttttaaagactaaaccttattatcctcgtgtttctattttttttagtttttaaaagtcacaacggttgctaccccttacttctgtcatattattctttatttgcttgcttgatctaccactagtttctatttattctccttggaacctttaaaaattggatcgaaaaacttataggtttagagtttattatcctgttcggcatcttttttataatttctagaagtcccgtcgaacactgccattatactcatctacgaccgtccactgcatcttctatttattgtcattgctattttaaaaattgaacataattatcgtttaggttcattttttttactttctagaagtttcggcaaaacgtcagcaactttgtcactgtactcctctacggctcacctgctgccgcccttctttattgtcgttgagattttaaaatcaaacaggattatcattggggtttttttttatttttttagaagccctaacctttaaaaattggaccttatagtttttaagtttattatcttgttgggttttatctttttataatttttagaaatcccgtcaaacgctgccaccatactcctatatgacccgtccgccacatactctttattgttattaggattctaaaagtcgaacataactatcattggaattcttttttttttactttctagaagacccaccaaccattggcgactttgccattgtactcctatacaacccgccgctgcctcttatttttattattattgagattttaaaaatcaaatatgactctcattggttttttttttactttctagaagtcgcgccacccgcctcgaccgattgcttcacgacctgtctgttgtaattccttttaatcgtcattacgattgtatttggtgttttattaatagtttttagatgtcccatcaaccgccaccactctgctcctctatagacctgttacttaattaatctcgtcatttgtttcatatggttttttcttttagtaatctttattttttatcaccaaatttagttatttataaattgtattcctagttgatatcttatttttctttttctcatttcagaatttatattatttttcgtattgtgttctttgatatttttatttttattttcagtttagttgttttaaaattgtattcctactttaactctctttttatttgcctaatttcagattatattttattttttattccgaattttagttaatctactattgggttcttatatgtactcttatttcaatattgtttatatttaattctaaattttagttaattttaaattatattcctacttgaactcatcttttcgtctcttttttctaattttgattttctttatttttattccgaattttaattaatatggacccttcttccaatattccttatttttaattccgaatttcagttatttttaaattgtattcctacttggacttttcttttcttttttttttgctaatttcagattttattttatttttattccgaattttaattaatctcgtattaggttcctatatggactcttctttcaatacttattatttttccgaatttcagctatttttaaattgtattcctacttagactctttctttttgctacggattttatttcatttttatttcgaattttgattaatgttgtattgggttcctatatgaaaatttctttcaatattgcttacttttaattctgaattttagctatttttaaattatatttctacttggactcttcttttcttttttttttctttttctccgattaatgtagaaatttctagcccccacagcgaacgtggtgccttctttcaagggtgttttaataatataatagatagatagatgttagtgaggttagcttgttaggatacacactacagccagacaacatggtttaacctgagttagaattcttgttttgagtaactcgaggaatattgtccaagggattgactattgatcaatccatgtatactcaaaagcgaaggggggacaccacaaaatagatttctgattgaaacaccaagtattcacaatcaaatttgatgtttattcgcaaacagttgtgtgaactctgcaaactactacaacattacaaaggaagtttagtatgaagctgtagttcttttctagaaaagaacctctgttcatttttaaatgtatttttgcctatcttttgtaaaatggaaaagtattttacgaaattgtattagaaatggattcactttgtgtagccgtgcattttatttattaatcgatgttttgagaaaaataaactgcatttatttttctgaaaaaaaaacatgtgcattttagcccttaatcgaccgacacgacacacatataaataagtttttattattctactgtgctttggattcaccagaaatcgtaacattcaaacctgtaatgttgctcaatcgcattacaaagcagatcaacagaaattacgttactgatgactaaaccgtaagacagttgaatataacaaaaagaaatagtcagtctgctgatcaaggtgagatctctgttttttttttctgtgcagcactgcagggcagtcaggatcaaccggcggcataccatcaccgccggccgccgacggcggtggcctgagccccccggacctcggctccagcgacgactctggcgccgccgcccgatcccgcctcgccgccgcgccattccttccccggcttgctctgtcctgtctcctcgtgtacttgctgcacacgcagcggtggtgatgaagggtgagagatttatatagcattgcatacattgttgcacaaagcggaatttgtaagaaaaagaacaccacatttttgttgatgggagacttggagagtagtggctcgtgtcgtgggcgtacgtagctagccgttggtgagaacctgcccccgttcaagctgaaaggggggctagagtgagtggcaacttggatcatgttggattcatatattctcttttgtttgtcaatctgtttgttgtttgagttttaagatttttcgtttagttttctagttttgcttttgcttctagttgtctagttactccaaaatatcaaataattctattttttaagtgtataataattaaaactgaattaattttgcgctaatggcttatacttattttgcatgcccttacttaatcctcatattcatgggttgcaaacaccacctaatgtgtgaaaccagcccaccacattgggccaattggcaggcaaattccttatttctcatgacccaaaaggacaatagatgtcaaataagattgtgtattttgttttctgttaaaatgatagtgtcaagggagcagcttagaatatgttcgccaaataggttaggaaatcatatctgcatccatttcaattttttaatcccacttctcataattcatgtcgaaacaagatttcggcaatactaaaaggggtggctatcaagctgaaaaagtggatgggttaagagacaaggaattttatacaagttcaggccttcttaatcaagaagtaataccctactcctgtccggagattgatccgccgagtatattattgatcgtatgatctgggtaaaaaaacgtgcccctagagacacccggacccttccttatataaaagaagaggtccgtattacaaaatacagtccatatccctaacggaataggtagttacaaataaaatacaatcgtaaccgactaggatctcaggtattaccttgacatacaagtttagaatttaacccgagtcattttaaagatattctatctatacatggcaccccatacccagtcggactatacatgccgtgtaggtatggggtatccataatctccacagtagcccctaagacctttacagtcaacgaaatagtcttctctcatgatccaaaacgataatccaagtactccgacttcttctcccctgatctcccgagtaccaaaatcaaagactgtgaaggtctgaaaatagaaaaaaccaggtgcatcgactagatgcacctaattaggtgtagcccccgactatgtgattagttaaaaaactaaacatatagtcaagatgcaaacaacatccaaccgagtggttttataaccgaatatcatacagcaaagaatatgcggcgttcaataaagcatccagccgaatgctttagctttaatatatcaaaaatggagatatgaagaggcctgagtgagaaacactctaaagatctataaatccacacatatgataagaatccgagtaaaaactcttaaaaagatccatcaaacgtggtataaatgtgataacataacaggtgatgagtctaaatagcctaggctatgactcacgccataatcaaaataagcatataacatgccgagtaaatgactgtattaaaaccagtcatctcaataaaacccaaacagcctttgcagcctaaaaaggtgtcacgcccggaaattcactagtaatttccgaacttatttgtgcataaaatcctcgtccaggaatcagccgaggtacacaaactgacaa

SEQ ID NO: 7069 - DNA, 26558 bp, Oryza sativa
ccgaggaaataaaaatttttgagtatcacatcggacgtttcatcggatgttggaagaggttttcggatacaaatgaaaaaactaattttagaactcgcggggaaaccgcgagacgaatcttttgagcctaattaagccgtcattagtacatgtaggttactgtagcatttatggctaatcacggactaattaggctcaaaagattcgtctcgcgatttccaccataactatgtaattagtttttttttatctatatttaatactccatgtaagtgtctaaagattcgatgtaatatttttggaaaaaaaaattttggaaactaaacaggccctttgtctaggagagacaaaaccttattcctctcctattcactcaaacttatgaacaatgtactctcctaatgtaattttgataaatactctagatctataaacttatttattgtagatggtatatttgataaaatttattctaatataaagctggtgatggtcgaggttttaccctttcatgagttgttcgtcgttttatcagtcgtataaaaaagatttttgaaacttacttttaaattgatctagatatttccccctaaaaaaattgatctatatattatttcattgttttcttcttcttttttccatccttgcatgttaaaccactaagagtaggtgaaagtttgcttaactgttcaatcaatccataatttaagggtttgaccaaatttcgttctaaatgtcaaatatttatgatgagagggagtttttggatcataaatatttggcatttatgttgtcttttaaatatggtgtttactattcgtcttattcaaatatgtaaaagtacaaggcacaccaaaagtatctttagtaataaacaagcggcaaaaaaaaaaggtactacctcaagaattatatggagtatgttcagattcgcagtacttccatccgattctacgttcttatttgacagatgtagtaattataatatggatggttaaatttatgcctaaagtcaaccatcaaagggtgtacatggagcattatgttggttcatcgcgttaaccaaggagtacatatggaaatttgggcaaaccaaaaggtactccctccgtttcagagtccctttgaaacacatgattgtcaaaagacgggaataggaaaaatatagaaatagattgtcatgttcattggattcctacagtagttgaaaacatagcaaagtttcaaaactatcgtttgatagtcacacatgaaaaaggtaggatttcaagacacaggaagaagaaaaaaacatgagctaagacatcatgctaattttcttccaaaaattctctacaatagtccattatgtacgaatttcaaaggaattggcaggaatcaatcctttgtttcaaaggatctcatatgattatttcctacaaggtatacatccttttgaattcctatcttttttcctttgtttcaaacggggtctcatattgtaagttattttgatttttttctaagttaaacttatttaagtttgaccaaatttatagaaaaatatagtagcaattttagtaaaaaaaacaaacatattataaaaatatattcaatgttagatttaatgaaattaatttggttttttagatgttgctaattctttttataaatttagttaactgcgaaaaaaggtcaaaacgacttatgatatgaaacggagccatatcatgttcacttcaaaaaacagcaatataatagagatagaagaaaggtgcttgtcgatggagggtccgtgcagaagcgcaaatatctgtcctctatgatttgctcatgtgtcgatgatgaaattcaggatgtgtcaacatttgtctcatgcatagcatgctctgcatccactgcattcagggttccagcctttcattatcagagatactacttccttatgaacctgtatctgaactttttgcgagatactatactactattaagatgacaaactgatctgatcggaataacatgggcacgacagctacagtatacataccattacagagtctttacgccacttgttcaaggaaaccttttcaaagtcaaaacagaaaagaaaaataaaaggtgaaatccttcttcgatcaccctgtttggaacttaaagggttgaaattttggatgcagcatttcacgtccagacgaatacggcccagcgtttcagaattcagagggttagttttctgcagcatatttaatttacctcagatattcaattgatgaaacaacatgaatcatgcatgtcaacacctgctgaccgctgagaacaaaaacaataacaataatgtattcgcactctaacacataagttattcctccatcttaattatttattttacagtgtggaaaacacatctatctcgtggccggcctcagcctggcactaacatactatttataagttgttggtaaatcctcctcctgacgaagaagaactaatactaatgtagtaataaccgagaagaagcaaaaaagatgcatggaaccttggatgcatggttccgattatttgcgtgaatgcgcaggcattgatcatccgatctgggttgggtccttcctaataactcaatggtacaatcatgccgcatgcatgcgtacgtggatattggcgattaatgatccgggaacggtacatccggggcggagaagacggtggcggtggcggtggcggccggcgacgacatcaccggcacgaacggggcggcgtacgcgcagagagccggcggcaggtcggaggctggtgcacgcgcgagcagtgggatctccggcggaatgaagtggtgcgtcgttggcagtggcggcgcggcggatcgacaacgacgtaggagtgggagtgggacgacggcggtggcggcgcgtgtgcgtggtggtgggaggtgttggtgcagctgtcggcgctggaggaggaggaggaggagtcgtggtgcgagtgcgaggccgcggtgcgggcgctgtcgagtccggtgagcctctgcacgatggacatgaagtcgcgtgggctcgtgcggatcaccttcggcgagtgcgtgtatataatcactggctgctgctgctgctgcttgtgttgctggcgcgacggcggccggtgagctgcggcggcggtggcggcattgttcttgttcttcgtcgtcgtcgtcagaccggaggcggaggaggtggaagagttggaggaggaggaggacgatgcggcggcgggtggctgcttgtggatgaggcgggagcccctgtggactttaaacggcggcgcggtgttggtggcggggaggggcaggcgtggcgaggtggggctcattgttgccggtgagcggccggcggtgagacgatcgacggatggaggcgccgaaggagaggggctatacgactataaacaggtgagtgaattgcgggatatttggttgggtcaaggtgcggtgcagagccataagcggcatgcgtgtagctcggacggacacctttgcttctcttctcctctcttggttgcgtcaccacggttgcgctagctcttgcatctgtgttgccatgtccaccagccacctgcaaaatgctactaatcgttttcggccccgtgggttttgcctaaacttttcattttgtacgtctaaagtatgtcgtataaactttatatgcgtaaacgaatcagtgtcctccaccttgacaaatcatggagcaaaatacaagcgaccagcaactatatacttagaaacggactcgtatagagttttggcccaacataattttatatggtgaaattttaaggttctccacaggtcttccatcctgggccccagggcgtggcctaggggtggaattttgaagtgctccaaatagtacatcgatacatcatatatagatggtgggaagattttaaaagtgacaatgaagtgtcaacagttttgtgttgggcatggcaccaagtttgagaatgcaaactattctaccgaatattgagaatgcgctatcattgaatggcatctccctgagacccaggtactgaatcgattgccttttgatggtgggagggtaaaattgtactcttgcatgtatggagcatgtacaaatgtagcgcccgttccgtcgtggcgcctagcgggaaaattatctcttaaaaaccctaattgtgaaatttgcttccttgcttgttgtctagcgtccgtgccatctcaagatctcaaatccctgatctatcgtcgagttcaattccgaatccaaatccttccaaatcgaatccctccgcaaaagtctattttgcctccccagggtcgatgggctgaatttctctcggcccatctccccctccctcccggcgctctctctctctctcttcccccgctccgcccgcgcgccgcgcgcgcgtgcgcgagagccgcgcccagcgcccctccctccgctccgcccgcgcgccgcgcgcgcatgcgcgagagctgtgccgtccgcgccgcccggccccgctgccctgccgcgcctgcagccgcgcagccgcccggccccgcaagccagcgcgcgtgcccgagccgcgccgctcaaatccgccgcgcctcccgttgcttcccgcgcgcgcgtgccgtggtggccgaccgcctggtcgccgccgtcgtcagcgcctgcccgcgcctgtcgcccgtgtcgccgctccgctccaaaccgtcccgccgtcatcaccgtcgtcatcgcctcggccccgcctctccgcgcgcaagccgccaagggacggaggcagagccctcctccctctgccgcgacgcccccgctcccctcctccttttcccaaagaagcaaggggcgagcccccctttctctccctctttttccccttttcctcccgccggcgtcatcctcctccctccgccctgtcgccgatttggacgcgagcgccgagcgccagctcgcgtcttgaccgcccaaagtcggttcccaaaccgacattgccgccctttaaagcccaggcgccctccctctcttctcctctcgttgtctcatcgcctccacgccattgccgccgcccccgtgctctgttcgccgtcgccgttcgtcgttgcgcgtgtcggaggagccggcacgagcaaggacgcggaaggggactccgggcgcgccctctccttcctcttccccggcccgaggccggagagattactcccgcgccgtcggcctctcgtcactgcgccccgcccgcacggtagtgcctccctccgttcttcctcctcgctccatctcccccccttagttttcggtggtagcacgagtagcctccccgtagctagccggcgccgccccgaccgttgccgccgctcgccgtgtgctcgccgccgtcgccgcccgagctcggaagcgccgctcgtcgccggcctcgctcggcgtagctccgcccaatccgacgccagcatcggattcccgtagccgcgtggatgctctcgccgccgggaattggcccctcgtgacctcgtcgccgttttccccttttcccgccgtcggttgccgccgccgcgattcgccgccgtcaagctccctccggcgaatccgagccattggctcgtctcccctcgtcccgtgcaaccacccggtgtgctcgttttcgcctgtatcgccgcggttcgctccgccgctcgccgctcgccgctgtcgtccgccgtccgttccggccggcgtcgtcgtctacctcccgccggcctgcgtggcagccacgtaggcgccacgtcggcgccagctcggccaagaccgggtcgagccgaccccggtcagccgctcccctcggccccgctcgcgggcgcggtccaccgcgagccgtgaggctgcgcgtgggcccgccgcatccgcgtcctccgcgaaccgcgcgcgtgcaccgcgtccctcccccaaaccctagcgcgcgccgcgtgcgcgttccgcacggtgaaccgtgtcaccgacaagcgggtcccactcaggaccacgcgaggtgagcccggtccaccggctccctctctcctccccgcccgcgcgcgcgctctgggccgccttgttgggccgaccgacccatttagctcggccgagccgccccttttctctcgggccgcgccctagcctcccgagggaagtctaattttccccctccttttcttttcttttctttttcaaaaaaaggatttaagtaaatccttttcctttagaccaaaaatccaataatcttagaaattcaatatcttcccaaccgtaagtccatttgactccattcaacttccaaaattcctcaaatctcgagatctatttaatggcacgcttagaggtcattaatagggctttattttcgccgtttgttgagttgtcccgttttgcgtatagtttcggagcccgaagacccgcagtgcgaggatttcgaggatcaagctctagatctcgagcaaggcaagccacctttgaatatcttgagcctatatttcaacttaattatgttgcttgaaagattattatgcattgataggatcgcacttaatctgcttgtcccgtctgcaaggcagattgacggacctacctaatttgttgcatttgatccttcctttgttaattgttataccatgttcccttgtaaccacccagttgcgcctcggaaatcatgcactctgcacgagtatcgacggccgccttcaaacttaaaatctgaaaaacatcttgggtaaaacttgggttttataaaagacttggaaaacccgacacctgggtcggtgcttgcgaactaaatgaatttccaaaaccgcggaccggggaacgtaccgggtgtacggtttcccgctcttgcacctaaggaccgtttccttggaatttcatccgaacataagacaagtacgaccacatgggtggaatgggacacccctggctgagtaactagcttatcaggggagccttgatgccgagagacatgtgaattcatcggggtggtgtcggggaggacccctgggcttcctggcacagtatggtctgggacctaacctgttgttggtctgggacccctctcgtcggcatatggtaaacctgtgtcggctttggaaatgccttatcatgaaagcttggaggtctcccgacgtggctgatccccacgggctgggtgatccgggttagtaatgtcgtgtgggtaaagtgtaccccctctgcagaggttaacaaactgttcgaacagccgtgcccacggtcatgggcgaatgtgaggtgattcctagcgtagttttgtttaactgctgcttgtgaaattgctgttgtggaaaggggttcgatgtttgaaaaatctgtagctgatggaatcagctaggcccgggtggccgtttgaatgttgttggcccgggtggccgtttgaaaagctgttggccgggtgccaacctcgtttcaaaatctaaagactgatacattgcacatactccgaccggacgagacgcactgtctcatccgtgtcgtttgagaagcactcacttagttgtttcagaaaagagttcaaataaaatcaattgcaaaaacaccagcctctccttgaagcctgcattaaacacttatttcccctggcttgctgagtactcccgtacttacccttgctctatataaataatcccccccagttgctgaagaagatgaagcggatcccgctgacgaggagttcttccaggagcaagccggctacgatgagttttagggtttcgccctagttcccaagtcgcgcctgtgatgtttggtcctagtcctggcttccgctttccttttgtaatgcagttgtgagctcgggatctatccgcagcccaacatgactgtactcctactctataataaagagacctctgttgctgtgatattctgtcttcctgtgataccatcactgtttcctgggactggtatcgattaacaggttaatttggagcgtcacgggctagttccggtcgggactagttcggggcgtgacaacaaattagagtggaacacctttcatccaccgtaattaccgccgcaaatcgagcgatcctagacctagaagtggcaatgacgacgaacctagcgtggcgaccttggtagaggtgtgtcgatgcgtgaagccagctcaactactgcccgattctagtacaacagaggtagtggccgtgacggcaatggagatctctctgatggtgaaggcagcggaccgttgttggcgccttgaatctcccatcctccgttgcctgcctcaatgtccttccccggtggtgcctcaattacttatcctttggtgctctctccatcctcctgcagccatcctgttggctcaatgatctcccaccttcatcccgggctctagtacaacgtcgtctccatcccttcccgaggtcactcctcgatctcgggtaattctctaatgttagcaatatcactgaaattttccaaaactcagctattgagttgatggttggcttgcttagcaaagatatactcgattcctcctcacttcttttcttttccctcttttctttggtttcttgtcctcaccaaatgattggaatgctatccatgccaaacctgcaacttcatccatggcagaccttgatcttcaaccaaaacaactttcatgtcggccatggcatctagacttagcgtgtgcgcgagcgccgacttaacttgttggactgtgatggcctagcatcgatgacaaagatgcagaaaggcagcgccaccaattttggtggatggagttgtgccctgtactcggtactcttcgacccgtaatcaaatttgttccgatcctaccccctatcaaatcaacagttatatatgaatgatacctcctaatatctcgtacctgaagtaatacgtacagtcaatgcttaagttaataactgtcacatcctgattttcgtttcaggatttataaattatctaataaattattaatagaatttatattaaatgttctttaatttacaagtgaagttaaatgtgggaaataaaatttcctaaatataaagcatggttggatttaatttttattaaattctccatgattaattatactctctgaaattttctcggatttttcggagctcaattcctaaatgatacaaagaacagtttagtaattagtaatcaattaatgatctaattataattatgttaagtgcttttcttgtttaaaaatccttaatttataaattgttgtctaaaagggaattattagaaatgatcttaaaagcctagaagagaagatctaatattaatttgttaaaatctcaatataaaagtgggctagataaaattttgttaaatacttctcttgtttctatagtttctagatttttctgggatttatttgagccaaggatttattcgcgccgccgcagccgtgccctagccgcgcgcaagccaccgcccttccaaattccgtcgctcctttccatctccggccgaatcgatagaggggaaatgatcctcgtgatccactctatcttttcccttttggaatcgtcggctaatttcgtttggaaatccttggattcgagttcgattcggatcgatctctctcctccgaaccctaatctttccttctcgtcgccggtcgccgtgggccttcgccaccaccttccaacccctatataaggacccccaagcccgccgctacccgttgccaccctcgccttagtctctcgcagccggtagagctctagcgccgtgccgcctcgcgccgccgtcgtcgccgccgctccaaccgtgcgccgccgtcgctccagtcgtggtcgtcgctcggggaggtcaccgccgtggtcgccgttgtgtcgctgtcctcgtccgccctccgccgtcgctgtcgaccgccggaacaccgccgtcgtcgtcaagccgatcgtcgccgccgctcttcctcgatgccgtcgccgtccgttgatcttccgccgttgttttggtcaccggtgagttcgccgcgtcgccctctacgtgctggtgccctccgttcgtgccgtcgcgccgtcgttcgccggcgagcttgcacgctcgagccgccgccggtggtaacgtcaccgctgacgtcatcgtcgtcgtccatccatgagccgcggtggatccgatcgatcttggccgtccgttttggataggatcgatctcggccgttcgtttccgtgagccgccgccgtgcacccggttcaccgtgaaccctagccgctgacgcaataatcctcttttccttttcaaaaataattcattattgcgtcataattcaataaaaatccatataagtgttttaatccgatttaatctttaaaaattcataactaattcatcttagctcggatttagttggttcaagtctctaaatttttctaaaattgagatctacatgttaaaaatatccacatatactgttcatgcttgtttatgtgctgttttggtgttttgctcctttctgtttagattccgacgtttccggagagttcgttttcgcaggagaagaatttgaagagttccaaggccagcaaggcaagtcacacagatcccaaacaaccctttgagcatgttgatcccgtttaaagctattgtttctattcaactattgcatttattttcgaatatcattgggtggaattaacctattgtttgttatagcccttttgttcttgattactttattccttgataccttgggttattataacttgactagttgggctatatatattggttcagctagatattagatatggctgcttagccatgcttagaaacattagcacactattgggataacttatgactcactattatttaatgatggcttaatgatagctcacgatggccaatcgtgattggttaattaattacttgccaactaaaacttgataatggtgggttgtgagcacatggttttgagagtcgtgctcatgacaattaaggaccggttcacgattttcggttgtgaaacattaaccgtgccaaccacaagccagcgtgggcaacggctttaccttttgtatagcatggttcattatggagcaccagactgagaagtggcggagataagcccacgggggtcgctggggagtccatgccttgtttataagggggtgactatgatccaggaacggtgcactgtggtggattgtgttgtgcgaggggtaatgtcacagctcctttccgaggtaccgtggtggtattgaggcgcatggtgacatgttgtggggctgtgtcttgtgggtacagtggtacacctctggccagagtaaaactattcgaatagccgtgcccgcggtcataggcgggtctaacaatgtctttcgtgattagtctcacacttctcaccataataaatgatgatataattggtaataatttgtttagctcctggtttggagatagatctgtgcagccgggtatggttgttcaggatggttgggcctgtgcagcatgggtgtgctgttcaatattgattaatattgatgattaattactctattgttttataattctcaaatgtttgctaaatgctgcttttgcaaatgagccctatattataccatcctttggtatccatgtgcacttgcatatttgctgtgtggcttgctaagtatgtcatatgctcaccttgcaataatcaatcaaacctcagttgaagacaagttgcgaaggagaagacgtttggcttataccccagttgagctgcctgtgggagtggagccggagcttcgctagaccgtaattccgctgctgttttcttttcttttttaagtatgtaacgttattattatgatggatttgtatattaaattgtcagtttgtgtacctcggctgattcctggacgaggattttatgcacaaataagttcggaaattactagtgaatttctgggcgtgacaataactaacccacatttttagtacctctttacatgtatcttctcttatggatcgttagattctaagtaatctacggctatcatgcctctcaagcaccttacaaaactggcacattattttgattaattcatccattttgaccaagaagatgtagaagaagattcatcatcacattagcttccgtcgtaactagatcatgaacgctaaaaattagatcatgaacgctaggcatgtcggtaacttcagacaaataactggttcttttttctgcctgcgaaatgcaaataaaaactcattgattcagagaaaagttgtttaactcactgctcctatctgatttttttttaccacaaaagaagcagtcggtcatacatataaattttcatataaacgaagcaattaaaagattactctttgacactacagggttgttcagattgatgtcattttaaatcataccttttttttttggtaaagttgctaaagatgtgtatacacgtagggtaaaagaaacactatcctgaggttttcttcagttcagaactgtgtgagtaacaacaattgtcggttcagaacttctcggggacacttactgaagtgtagtggtagtgtacagacacattaacattcatcttcaaactacaggatgagtccatagttccacactagtatataagcatttcgttacattgttgttctgaactctgaagagaggtatgttcggaaatactggggaacactttggccgagtttagttccaaacttttttttttaaactttcaacttttccatcatattaaaactttcctacatacacaaacttctaatttttccgtcacatcgttccaattttaaccaaactttcaattttggtgtgaactaaacaacccctttactgtacagatacattctatacatctttggtcaatatagtatgggccaatagtttcatactgctacatggacatttcattccatagcagttctgaagatatttcttttatgttcagaactacccgggagcatttgatgtactgaagatattcctttatgtacagagctacatatacagtccattacattatcgccgtatttagtttcgaaatatttcttcaaacttacaactttttcatcacatcaaaactttcctacatacataaactttcaacttttctgtcacatcgttccaatttcaactaaacttctaactttgacgtgaactaaacacagcctatatagcctatatagctctttctgaatatagtagtacgacacgctttcaaaataaaagaatatagtggtacgactttgagtaaagagctttatacattatatatcccatgctgtgatcttcactcatatagtagtactgtgttatccatgtcaatattgtcacttagacatatggccgtgtttagttcacccacaactaccttaaacttccaactttcccatcacatcacatcacatctaaaaattttctacacacataaacttccaacttttttttccaaatttccaactttcccatcacatcacatccaaaactttcctacacacataaacttccaactttttttttccaaacttccaactttccccaaacttccaacttttttcaggaactaaacacagcctatatagttaggccccgtttagttccccaaaagtttttcccaaaaacatcatatcgaatttttgacacatgtatggagtattaaatatagattaaaagaaaaactaattgcacagttaggggggaaaccacgagacaaattttttgaacgtaattagtccatgattagccataagtgctacagtaacctacatgcgctaatgacggattaattaggctcaaaatattcctttcgcggtttccaggcgagttatgaaattagttttttcattcgtgtccgaaaatccctttcgacatccggtcaaacatctgatgtgacacccaaaaaatttcatttcgtgaatgtggagattatggataccccatatctgcatgacagttatactttagtcggatatatggtaccaaatatagatagaatatctttatgaggactcggggtaggttctcaacttgtatgtcaagaaaatacccgggatcctagtcggctacgattgtattttatctgtaatcccatattccgttaggatatggactataccttgtattacggatcccttcccctatataaggagggtccgtgtgcttcttggggcaagattcttttttctcccaacatacaatcaataacacactcggtggaatcatccccggacagaagtagggtattacttctttaataagaaggcctgaacctgtataaaattccttgtctccaaacctatccattttcctagcttgatagccacccccttttattattgccgaaatcttgtttcgacagttggcgcgccaggtaggggaggcgtcaagttctcgccgactaagtacgatgggtttcgtttctggcatcaacgacttcgccttccctcccgggcaggcgttctgattcggcagcctcgacttcatcaccaacgacttcggcaagatctctttccttgactcggattcaaaccagtcggggagaaaccaggtccccgtgccgttcggtattccgaactcggccgaggcctactccaagatcatctctcctgagtcggtttcaagccactcggatgagatccaatctattcctccacgatcagatcaagacgacgggtcctatccctcaatctagatgaaacttcctgatgacttggccgccgtcttcacagccaaaacatctcccactcggagatctaggtgagctccggcatcggccccgatccagtctagatccagggaggttggcattatactccaacctcttgggacagtcttgacggaagagttggatggctacctcagctcccccggcgtcagttctcgaccaaccgagatcctcgacaatgatgacttcggctaccactacgaccacggcgacttcggcaacttcaacgacagctatgaggataactacacgcccctcttcttcggcgtattcatggctaacaacgaaacggaagaacagcgccgagcctgagaagcggaccaagatcgcgcacggcaagaagctgaacgtcgccgactggaggaagagcgacagcaacaggagcgagaacgattacagcgtgagcaacaagatcgcgaacggattgcaaaggaagctgaagatcgacggcaccgcgccttggaatctgggcgccgagcgagagagctcattgggcaacaagacgtcgacgggagagcggtctttcgcaccccccagcagaacgcggttgcagcaatcactctcctcgacaccctcctcaaggaagacgcactcaaccaagccgatcatgttgtcaacatcttgaaccagacgaagaccatgatcgctacgtcagttccagccaactccgcaagcacccgcaccccgactggtagccgagtccctcatcatcagccaagcctcagtgtcaccggcacaggatctagtcgcaggagcaggggtcacgacgaacgatctgttcactcgcttcccgaacgtcacagggagcgccgagttgaacggcctcgttctccacctcgccagcgtcccgtcgaccttcgtgacacgatcaaccagcgccgtgcagcacgaggtcaccggcattcaccaaatcgctacgacgacgacgtggatggagtagctgccttcactaatgacctgcgtcgagtggattggccagtcggcttcaaaccaactggaatcgagaagtatgatggcaccaccaatccggagtcttggctcaccgtctacggactcgcaatccgcgcagcaggtggagacagcaaggccatggcaaactatctacctgtggccctagcggacttcgcccgatcctggctccacggactaccccgtggcacgatcggatcatgggcggaacttcatgatcacttcatcgccaacttctagggcacctttgaacgccccggcacacagtttgacctctacaacgtcgttcagaagtctggagaatcccttcgagattacatccgacgcttctccgaacaacgcaacaagatctccgacatcaccgacgacgtcatcattgccgccttcactaaaggcattcgccacgaggacctagtcggcaagttcggacgtaaacctcccaggacggttaagcagatgttcgaaaaagccaacgagtataccaaagccgaagatgctatcaccgcgtccaaacagtcgggcaccacttggaagccaaagaacgacacgccgactgcaggggggagtggaagtaacaaccacaaggatcgcaagcgtaagcccgaagaacttgtggcgaccacctctccatcttcccgacaacgtccccgcgtcaacaccttcgacaagataatgaactctcaatgtccgcatcatcccaattccaaccacatggccaaagattgcttcgtctacaaacagttcgcagagcaatacgtcaagaacgcacgcaaacctgcagacggagatcagggcacatcaaagaagaaagatgatgaagacgatgccccgactggttttcaagatcatcgcaaagaacttaatcacatcttcggcggacccctggcttatgagtccaagagaaagcagaagctaacagaatgggagatcaatgcggttcagcctaacacgccccaatatcttcggtggtcaaaaacagcaattaagttcgaccgctcggatcatcccgaccgagtggtccacccggggcggtaccccctggtactagacccagtggttcgcaatgtcaagctccgacggactctcatcgatggtggcagcgcactcaacatccttttcgctaagaccctggacgatatgcagattcctcgcacggaattaaagccgagtaatgcacccttccacggtgttatcccaggattgtcagctacaccactcggccagatcactcttccagttaccttcggcacccgggaaaattttcgcacagaaaatgtttgtttcgaagttgccgatttcgagacagcatatcatgctatacttgtgtcacgcccggaaattcactaataatttccgaactaatttgtgcataaaattctcatccaggaatcagccgaggtacacaaactgacaatttaatatacacatccatcataataataacgttacatacttacaaaagaaaagaaaaacagcagcggaataacggtctagcgatggcttcagctccacttccacaggcagctcaactagggtataagccaaacgtcttctccttctggatcctttttcttcaactgaggttgattgattattgcaagaatgagcatatgacatactcaacaagccacacagcaaatatgcaaatgcacaaggataccaaaggatggcacattatagtctcatttgcgaaagcagcatttagcaaagagttaagagtagtaaaacagtagagtaattaattagaaattttaatcaacactgaacagcacacccatgccgtacaggcccaaccatcttgaacaaccatacccagctgtacagatctaactccaaaccaggagctaaacaaattattaccagttatagcatcaataattattgtgagaggtgtgagactaatcacgaaaaacattgctcaacccgcccataaccgcgggcacggctattcgaatagttttactctagccagaggtgtaccactgtacccacaagacacagcctcaacatcatgtctaccatgtgtcgcgatactggaaagtacccgaatagaggctgtgacaataccctctgcacaacacaactcaccacagtgcaccattcctggatcataatcacccccttataaaacaaggcatggactccccagcgacccccgtgggcttatctccgccacttctcagtctggtgctctgcaatgaaccatgctatacaaaaggtaaagccgttgcccacgctggcttgtggttgacacggttaatgtttcacaacagtagctcgcgaaccggtccttaattgccatgagcacgaccatcaaagccatgtgctcacaacccaccatcatcatgttttagttggcaaattaattaattaaccaatcatgattaaccatcatgagctatcattaagccatcattaaataatagtgagtcataagttatcccaatagtgtgctaatgtttctaagcatggctaagcaatcatatctaatatctagctgaaccaatatataaagcccaactagtcaagttataataacccaaggtatcaaggaataaagtaatcaagaacaaaagggctataacaaacaataggttaattccacccaatgacattcgaaaataaatgcaatagttgaatagaaacaatagctttaaatgggatcaatatgctcaaagggttgtttgggatctgtgtgacttgccttgcaataatcggtcttcaattaatcttctgaacactcccgacgcactcacgaaccttcgaaacgacggaaacgacaagctaacacgcaaaacgaggaaaaagactaataaaaaccaaataaacaatacatataaagtaaacaaacatgtaaatcataattttagatgaattatgagacttgaacggcctcattctgacttcatatgaatttattacgaattttacaagatttaatctaattaaagcccatttaaaaagaattaaataaatttaattctatttatggataattttaatatgtagatctttattttatataacttttgcaacttgaaccacattaaactgagttacaatgaattagttatgaattttcaaagattaaatcggattaaatcctttatatagattttaattgaattatgacgcaataatgaattatttttgaaaaggaaaagaggattattgcgtcagcgggtcgggttcatggtggaccgggtgcacggcggcggctcacggaaacgaacggccgagatctatcggtccacggccggaccacgggagacgacgacgatgacgtcagcggtgacgtcatcaccggcgacgactcgggcacgcatgcccgccggcgaacgacggcgatggtgttccagcggtcgacagcgacggcggaggggcggacgagatcggcgacggcttggcgatcccgatggcggctttcccgagcgacgacgacgaccggagcgacggcggcgcacggctggacgaacgatggcgacggcggcgcaaaagctcacggggatagggcgctacagatggcggcgggcgaaggcgagagtggctgcgggtagaggggagctcgggggtccttttataggggcaaggaggcggtggcgaaggcccacggcgaccggcgacgcgaaggaaaggttagggttcggagggagagacgaatccgattcgagatcgaatccacgagtttccaaaccgaattaggcgatgattccaaaggagaaaaggtagaggagatcgagaagatcatttcccctctattgatttcaccggatcgagaaaggggcgagcgaaattggaaaggcagcggcggcgcacggctagggttcggccgggcgacggctggaggaggaagacagccctgccacctgtcagcgggcggacgcgcgcgcgggcggctgctgccggactgggccgactgggccgagggagagagagagaggttttgggccggctttcggcccaaagccaaaagagactttaaaaacctttttaaattattcatgaaatgcaattccatttattaaaaatactttcttggctcaaataaatcccagaaaaatctaggaactaaagattcaagagaagtatctaacaaaattttatctagcccaattttatattgagatttagcaaattaaaattagatcttctcttttaggcttttaagatcatttctaataattccttttaaacaacaatttataatttaaggatttttaaacaagaaaagctcttaacaattataattagatcattaatgatcaaataattactaaactgttctttgtatcatttaggaattgagctccgaaaaatccgagaaaatttcagagagtatacttaatcatggagaatttaataaaagttaaatccatccatgctttaaatttaggaaaatttatttcccacatttaacttcacttgtaaattaatgaacatttaatataaattctagtaataatttattaaataatttataaatcctgaaacaaaaatcaggatgtgacaacttggacgaccggctttagccaaatttatggccgtcccacactacacctacatgatgatgaagatgcctggtcctcgaggggtcatatcactacggagcgacatcaagtaggccgtcacatgtgacaaagaaagctgcgagatggcccaaacccatgagacaactcttgctcgcgaagagatccgactagctgcaaccacggcaagcgagggagaagtgcctgcaaccaagctgacgaagaccgaagaaagtgatgccaagacgaaaaagattcccctagatccctccaatcctgataagactgctgtaataggcgctgagttagattgtaaataggaaagcgcgctcatcacatttcttcagaataataaagatatttttgcgtggaaaccattcgatatgcctggtatccccagagaggtgattgagcactctttacatgttaaggaagacgccaaacccatcaagcaacgactccgccgttttgcacaagacaggaaggatgcgatcaaggaggaattaaccaagctattagcagcaggcttcataaaggaagtctttcatctcgactggctggctaacccagtcctggttcggaaaaagacggggcaatggcgcatgtgtgtcgattatactgacctcaacaaatcttgtcccaaagacccttttgggttacctcgcattgaccaggtggttgactcaacggccggctgcgagttactcagcttcttggactgttacttgggatatcatcagatccgactaaaagaatctgactgcttgaagacctcgtttattacaccctttggggcctactgctacatcaccatgccctttggattgaagaacgcaggagcaacctatcaacgcatgattcaaaggtgtttttcaactcagatcggtcgcaatgttgaagcctatgttgatgatgtagtcgtcaagaccaagcagaaggatgacctgattgcggatttagaagaaactttcacaagcattcgtgctttcaagatgaaactaaacccggaaaagtgcatcttcggagtaccatcagggaagttgctcggatttatggtatctcagagaggcatacaggccaacccggagaaaatcaatgccatcctcaacatgaaaccgccaagctcccaaaaagatgtccaaaagttgactggttgcatggcggcgctcagccggttcgtctcacgactcggcgagcgggggatgcctttcttcaagctgctgaagaagactgacaatttccagtggggacccgaagcacagaaagccttcgaagacttcaaggaactcctcaccactccaccagttttggcctcgccacatccacaagagccactactgttatatgtgtcggcaacctcccaggttgtgagtacggtcctggttgtcgagcgtgaagaggaaggccatattcaaaaagtccaacgaccaatctattttgtcagcgaggttttagccgactccaagacaaggtatcctcaggttcaaaagttattatatggtgttttaattaccgtcaggaaattatctcactattttcaaagtcactcggtcacggtggtcacatcgtttccactcggggatatacttcataatcgcgaagcaaacagacggattgcgaagtgggccttagaattgatgtctttggacatatctttcaaaccacgaactttgatcaagtcacaagctttagctgatttccttgccgagtggaccaagtgccaagaagacatgccagaggaaaagatggaatattggactatgcattttgatgggtcgaagaggcttacaggcactggagctggggtcgtcttaatttccccgactggagaaagattgagctacgtattgtggatacatttttctgcgtcccataacgtggcggaatacgaggcgctactccatggattaaggattgcaatctctttaagcattcgccgattaatcgtccgtggagactctcagttggttgttaatcaagtcatgcaagagtggtcttgtctagatgataatatgactgcttatcgacaagaggtacgcaagttagaagacaaattcgatggactcgagctcacccatgtcctccgacataacaatgaggcagccgacagactggccaattttggttcaaaacgggaagcagctccttcagatgtattcgtcgaacatctttacgaaccgaccgtgcccagaaaagagacaactgaagccatggatactcaaggcgtaagcatgattgaaaccgactggagagaacctctcatagaattttttaccaaacgagaactccttcaagacaaaaatgaagccgagcagatttccaggcgcagcagactttacattattcacgaagctgaactatacaagaaaagtccatcaagaatactgcagcgctgtgtatctttggaggaagggagacaattgttgaaggatatacattctggcatttgtggtaatcatgctgctgcacggaccatcgtcggcaaggcttaccgacaaggttttttctggcctacagctgtgtccgatgcggacgagattgtgcggacatgcgaaggttatcaattttttgccagacaaactcatttgccagcccaagagttgcaaaccatcccgttgtcctggccgtttgctgtctgggggcttgacatggtcggcccatttaaaagggcagtcggcggttacacgcatctctttgtggctatcgacaaattctccaagtggattgaggcaaaaccggtcatcacgatcacagcagataaagctagagattttttcatcaacactgtgcatcggtttggggtacctaattggatcatcactgataatggcactcaattcaccggcggagcatttaaagacttttgtgaagacttcggcattaaaatttgttatgcctccgtggcacaccccatgagtaacggacaagttgagcgagctaacggcatgatactgcaagggatcaaagcacgagttttcgaccgactacgcccctatgctggcaagtgggtagatcagctgccgtccgtactttggtctttacgtactactcctagtcgggctaccggccagtcgtcgttctttttggtttatggcgcagaagcaatattgccgagtgaagtggaatttgaatcactacgatttcggaacttcaacgaggagggctatgaagagggccgagtagacgacatcaaccgactagaagaagcccgagaagcagctttaattcaatcgactcgatatttgcaagggttgcgtcgttatcataatcagaatgtccgatcgcgagcctttttagtcggtgacctggttctgaggaaaattcaaacaacacaggatcagcataaattatctcctttatgggaaggaccgttcataattgctgaagtcactcggcctggttcttatcgactcaagcgcgaagatggtactatcattaacaattcttggaatattgaacaccttcgtcgattttacgcttaggcatttcgtttgtatctttcctctttgactgctaacttcaagtttttcctcgaagtttttagtcagggggctactataataataatggagtgtgatttttatcaattcagtttgcttacttgatgtatcattgccctgtttgatttcttggcttagtcaatgaggactgaaagttttttaacaacttttgtgggttttaggctcaacaaggtttgacaaaaacttttaagaaatcaggagctaagctaagatatcaagcacagcataaattcatcagtattgtacaaattgtgcctccatcatcgttaatcatcaaagttatcggtacattaatcggtatcagtcttttcatcatcagaattttcaggaccagtcggtcgaagatcgttgtcctgaaatctctcaactacatcagcagcaattttgtcagccgcttttttcgcatcactgatgaggtcaagagcagcttcttcgctcgtcccgtctgcaaagccatcaatggcgtcaatatcaactctcggataaagggatttagtcatcgccaacgccatacttgctcctatacttccagcttctttgatgttcttgaaatatatatccgagcaactctcagcttgtcgaaaatttcagaaacatcaagtgcactcgggccgttgttattgaggaacatcgcttgaacaattggggcagcagtgttagcaacctcatcccgggctccttcaagttttttgatcttgccaaccaggacgtcaaattgagcttgagatttgatcttgcggtctgcatcgacagattcacattaataagtcagcatatggaggataatggattttgaggtattgattgttgataccttcaacttcctttgaagccaggtctctttgtcttgccagctctgccttgttattttccagaatttagatctgcttctctagttgagatatcttggcagcttgcactacattaacttcggttaatcaggattacagagataacagcacaaatcagttgggcagagtttgcgcaaaccttttgatgagccactcagttcaaaattggattcctggagctcagcaattcgattcctcagatcatgctcatttttcctggcaagctcttttgtctcgtgcagcagactcctggtggcttcgagggtcccgagatgagggactagcttctctaaggtcgccgttttagcttcgttcctaagatgaatcctctgcaagacagtttaattagcgcatgaattaaatggcaaacaagatggttgagatcaggtaccagagggcttacatttacaatgcgggttgcctgaccaagtgccttcttcagtaggcgtaactcttcgtcctctttttgcttatttatcatgatcccttgaggctgcatgttgtcatcccaccacttgaccagaatcggagggcgtgaatcctcagctgcttgtatgcggggaatttcttcatcatcaccgatcattggtcctaatgtatccactgacagaggttagacaattggtcagagttatttgggtcgacatggtttcagacaaagtgttttacccgtaatgatttctggacgaggacgagtgggttcggatgcctttaaaggagatccagatctctggtcattgctggcgtcttgtccgcgaaggctgtctgcttgagctccaacttctggaatctcttggcttggccctgcgtccgactggtttctagtcgggggctcctgattaaccctggcttcggcttcgaccgactgattcccagtcggtggttaatcaccagattctacattatcggttgccggctgattgtcactcggacggtcctcggcagatggcctggtttctttggaagaacttgcgtccacgctagtcgggtcagagtctttcccagacggatctatgtcagatggtttcctgcaagtttgattatcagtattattgccgcaatggatgcgcatcaatgcaagagagatcgttgtatgagttgtacctggaagacttcctgatctttggcgcggggcgactggatgttttcttccttggagtagcctgttttggtagtttcttggttgtctctcggtctccaggcctcctggtagtatcatcggcttcgtcatcactcagaaccagcttcctctttcgagagtctgactggccgactggatcaaaagcacttggttgagtttcagaccgaattcttggtcctccgctcccttgcccagtttggtggcggggagatcggcgttgagcgattgggggatccgatttcatcaaagcaaattcctgggtgcaatatctttcattgttaattgattcaataggaagacaagatcatatcttgaggaaggttgaaatgtttgagtgcataccggtggaggagggttgaatgcgttgaatggcacgacgggtagcagatgtgaatagctgacaacaatagcgtttgagaagatcttgtacattctttctttcatgaccttaaagtcaagagaatctggatcttcccgatttggatcatgcttgccatcgaactcaaaagctgtgcgggatctttctttgattggagctaaccgacacttgataaagtgccgggtgatctgctttccttgaagaccctgttcttttagctttatcatcctctccatcagttctactgcctgagcagcttcatctcctataggcaatgagtcccatgtgtcctggtaaaccggaggaagacaacagtactcggggagtgcgggctcaggattctgaacatagaaccagttcacatgccagcctttgtttgaggttttgaagggcatggagaaatatttttggctcaaggttcctctgagttggaagccagctcccccaacaacgcacggcttgcttttgtttggctggggcttgaggaagaagatgcagcggaacaaggcgaaatgaggcctaatgcctag

SEQ ID NO: 7070 - DNA, 52881 bp, Oryza sativa
ctccttgctcagtatatatttcttgccactcagaacatttacgttggtgactaaaggcatggtcacccactctataattagtgaagcaattaatagaataaggcacggtttgattagcaattcatgtatgaaacaacacagtttcatgacatcaacttcagaatactgggaaaataaacgaaactcaaccttcacctttgagtacatgtttgatgcagtaacaaattaatatagttttacaacaaaaccattagacccaataggtcaaattctgatgcaatagacttgctgaacagaactaagatttgttgtttgcataagtaaataaaatgtctgtagagaaccatgtttgtatttctacaagtgtcttggagcatagcaatatgatgaagtttattttgaaacattatcaatattttcaggatggtgtagcggccttgaaaaatatattgcggtgtacctgaaaaaaatatgccaaactcaatactattagaaaagactatggattggttacattttttcccttcaaataacataatgctgcaagcaatttactgggttaatctgttttgcctcggtttcccttctttttattagtatttttttatctcacaaagtgtacatgaatctttaaattctactacatttcaatataaatattccgaagcaacccgcgcaggatatcatctagttttaagtggtggaagcataagtaaaggtctggtcaaggatgaaactgaatacttgttccactgctgatgcattccaatatcatgtgcgtctcaattcttaacagaaagctattctacactatacagtttactctagacagctcagcaggagtcatcagtcttgaacttttttgatatcaagtgccacctagtcaacttaaatgaccttggaatccaactattcgcatccttcccagtaaccatgacgtgactcaaggggtatacatcatcgtggccacgttgttaactctttttaatgaaagaagcatgttgttacttgtattctagatttgccaaaggccgataaaccaggcctctcaatttctaaaatatagagcagatgcaaaaactataactcttgacaattggcacgctaagtcaaattaagccataaggggaagaaaaaggcacaaaatgcacaaattaagttatgtgactgaattactaaaacaagtacagcaaaaaaccttatggagcttcagggactaatctgcgcagctggtttttttgctttctgaatagtttcaccttccttgtatctcttgactcttcctgctaagcaagaaaatattaccacaataatatcagtaaataaaaatgtgttacatatattatccattacagattatatatacatgaacgcaatatattcaggtttggcacattagcatgatggatatgatcaagaacaagggtcagtttttcccccacagtaaccagaatgaggcacaaactgacattgtcgccacttctcacttctaatacaagagcaaagagcagtaactagaatataaccatataatacttgctgtaagacagtttttaatatggaagcagtaacatgctatcatacaaatgaagttacacacagaaatgaatcttaataggtcttgcataactagaaatggaccttacatgacaaaattacatatatacacaccaaaaaaaagggacaaaaaaaacaagaggaaccaaattatccacgtttcctttctttgcagacctgagtaattcacaacatacatacagatgatgaaatgcttcagttatactggcaatcccacttcttggttctttttgcaacaaccaaacagcgagaagagccaggtccagaagcttccccgatctgttttcttctggtttgttcctcttgcagcattcaaatcattcatatacttgaccacagcctggcatgcagaagaaacattgttaatcatttaaagaaagcgaaggactaagtaagcaaatatggcagaacggcagtataatgtgtacctgagcccctaactttacaacttctcttggtggaaattcaagtggagtctcatcagcatgaaatacacgtagcctcgaaagacacctgaacgaatctggcagtacccgtatctggttactgcttatgtccagctcctctagcatctcaagatttcctattgatttcggcagtgctcttaagtctgcaaaattcctgctgagattcaacttcacaagacttgtcgcaaagcaaatgttctcagggattacttcaacctcattaaaactgacatccagctctctcaatctggaaagtgaacccactgttgtaggcaatcctttgattctgttatagtgcaatgtcagtatttccagcttctccaacttcccaatggcctctggaagggcttttaactgattgaaatccaacctaagctccacaagagatgtgcaagatccaatagtatagggtagctcctcaagctcatttgtctcaacaattaatcttctcaagtttgccaattttcctaaacaatctggaagagccttcaacatatttgagctcaggtcaaggtttgctaggctcgtgagatttccaaatgatgaaggaagagacttaagctggttggcatgcaggtcaagatcaattaggttggagagttccccaaacgcgtcgggcagattgatcagctgatttgagtgtaggtcaagctttgtcaaatatctaaggctgccaattgttgatgggagtgccatgatcctattctcggaaagatcaagctcggtaacatcttgcaatttgccgagtgaaacagggagccactcgatctggtcgaccagtttcccccggaggctgagttctgtgatccctttctttgctgatgactctatcaggcttgccacttggataaggctcaatttttccatgtcagtacctgcagggatattgacaagtggaacttaggataacacaagtactgacatctcaaaaatgctgatcacatttatggtaccgttacaaatttgatgatcactacttgcctaagcatgattaaggcctacattagatagcacctccaaagtcaacaaagcaaaatgactaattgctcatgattcatatcgtattcagacaaataattatgctattgcctaactggtaacaaatgaattaacaatatcagatcaccaggcacaagagacaaatgatacaccaggtccagcagtgaccaacaagggaatggtcctccaactaccgcaagaaaattaaaaattaaagctgggaccaacaaacgactaatgcattatgtcaagaaaaaagaaatcacaaaatagcacgaaattcctttgaagaaatggatgtgatgtgacaattggctgcagaggtggttgttcacatcaaacgctaactcatagcgaaaggtgaaaaatcagttgcggtacactggtaccttgtagacatcaatcgtgtaatttgctaaaccaacaagcagaaatacagaatcatcacaaactacgagaccgctcctctatgtttccaattatagtactagtgaaacaagaataggcaatttataaacagtgtgcaattaaatggcaactagttgaagaaaatcaaagcaacactaacaaatcagtacgccattacgtcagttgacaattatttctagtgattctttctatataaaaggtagcaaccacatcgtaatggaaatattacgcccatatgcatgacatgagcatccaattcgtgcaaggtagtgaaatttaaccggaaaaaaaaacagatactgcaaaattatgtcgggtccatagaacacggcagcatcgaaaccatcacacatggatatatagtagtacaaagatttttaggatttcgtgattccgacaaaataatactgtacttgaaagcaaattacctgcagagacatcacggcgtagcgaggagatgggcttggactccaagcccagggcagcgagacccttgcttccgcgctccatctccgcgacggcggccgcggccgcaaccgccgcctccttcttcctcagctccatctccaggtccacgctgtccgcaccaacaccaacgtatccatcgccggtggttccccctcccgcttcggcggcgtcggaggaggaggagaccacccgcgacgccctctggatcaaatcgtcgaacaccttgaagcgcctctcgagctcgacgacgtacgcggcctccttccgctgctgcagcgcgcggagccgcacggcgttgcgcctggcctcccgcagcacggcgaggagctccccgtcggcccgccccggcgccgccgccgacgaggacgctgaggccgaggcctcctcccgcgccacctcatcgaggcgcgccgcctcctccgcgtcggccgaggccagcacggcctccgccgcctccacctcctcgacggcggggcgcggcgggagctcccggtacagcctcgtgagctcctccaccgcctccgccgccgacgccatggcgcgtcgcgtgccctcgatcgaggagagagaaaacgacgagagatgagagagagagagagagagaggagtgggttggtaataaatgagatgagatgcggtgcaactgcaagtgggagtggagttgaggagtccgccttataaaaacagcaaaccagagggtccctcccggttgcgaagaaaaagtcttctcggtataaggagggtggggttgagattgggaaggaagtagagggggtaaagcgcaaaatgggctaggcggctgggtggggcccacgggatgagctggcaacgcatcgggatgtgtcaggtaggatctggaacgaccaccttttcccaagattacccaccatgtggtcaccgctgtgtccgactgtacagtactctctccatccacaaaattatccatattacttttgtcaccaagaccaagaaaaaattaaatcacattgaatgttacaaaatcaaggagtaaatgcaagcatacaaccaatgagtatttagatgactccttgagttctaataaaacatttaatttatcttttcatttaaatcttaaatgtataaagactataaatagaaacaacttatttggaaaaacttaaatgtgaaatatgtataacttttgtggacgagggagtatattgcaggagtaattcccaagtcccaacccaaattactgtaattaattgatgtaggaatagtttaattattgacctactagtacgggtagaggtatcagagcaagtttaatagtatagccaactactagctctaattcatctataactaatctaatagctcattcataatagttatatactatgctattaatacctggtctcacctgtcatacacacactgtgtcttagagtccgtgctacaactggctataaatctgtagctcgctgctcttctctctcttcatttatctcttagggcctctttgaattgcagagtagaaaaaacgaaggaataggaaaaacacaggattctgacaggaattgaagtgtaaaacaaagaattgcaaaacacaggaaaaacataggaatggtcgtttgattggagcgtaagaaaacgcaggaatctctaatcggatgagagagatagactcaaaggaaattttccaagaggttagagctcttgctaaatttcctccaaaatccacatgcaatgtgccattccataggaatttcataggatttggaaagcttcaatcctttgaatcaaagggccaaatatgaaaatttcccataggatttgaatcctatgaaattcctacataaatcctttgattcaaagaaccccttaaaatatatttacagctggcttatagcttgctattgtacctgccctcacgagtttacccaaggctgcgtgctctacaggggagtactcctattccgctagagtagattgtattactcctagagtgccttcgtttactagagtggattaaattagtgacgtaggttagattagtggacgaggaaactctgttggagtttgtcccatgttcttttctgtctatcaacttgtgctacgtcagcaatgctaaacatgggcttatatatagtacatcacaccacggggacagggtcggcatatataggacaagctaagctgtttgggttcgttggtgcgaccaaccccttcacataaacgacgaccacaggccggttttgccagatgggaggtaacgggataattcactacccaaatacaagcccgtttgtgatttatttcctacttagtattattaatcactaagataaaaataatctttattgtaatagatggaaaagtaatccacttcatttgctccacttatatagttctagcagtgacgaacacagctcctgggcagatcggatggctgcccgggctccgtcactgtcgtcttcattatcgttagccgttgatacgtaaagaaaaaaaaaatcgatcactactagtcatccgaactttacgacgatgctatctccatcactgatgagttgcagtttttatctagggttggtgtgtaaaggaacggtaagagtggaatctatgaccatggggaatgtaaccaaccgatcaaagtcgatggttggttagttgcgtggaattccggccatgcaagcgagagtagctacgctggctgcaggaaattaaagaggaagaggcagcatcagccatcatgcatttgacagcatcgacgatgcagtgtcaaagttggcaatgtagggggagcgagcatcccttttactactatctcaaatgtcattatcaatgtgcggaatccgacgataacgaataatgccggccggaaatgaatggagtacacgcacagtgcagagttactttcgagtcgatcataaaagtagtagtaattaaattataaaaactataaacatatagcatgtttgtactttaaatgtgatgattgttagtgaatgatgatgtggcatctttgtatgttaagcttaaggagtcagtggagaataactttatactaagcttgtcagtggatgatgatatgtcatctttacatattaagcttaagaagttagtgtagataactttataataggatacactatacttggtaggagtacgatagaaaaaaatgattatgggcgatgatttgtaaaaaagggatagagattaatggagatgcgggggatcgaaccccgtgcctctcgcatgcaaagcgagcgctctaccatttgagctacatccccgattttgtttacttctctgtatcacaatttataacaggttcatgtctattaacttatcttgccgttaatacgcaaacaagcggcggaggcccattggattggatcgttagtggacacaacctaaaataatcgtcttcggattagtcaagccgagcagcaaccagcaaataattcaacttatcctaccctagcttgcactaccatatgtactagtttaatcgatcggacagtcgtgcatatatatatgagtattcgatatgagcaacagcataatacagatgcgagttatccacccactagcaagaatcaacctaacgtacgtgcagtacgctttcctcccactagtctataatagtgtactctacttcctcggtctaaaaaatatagtacaacaaatttatataaaggccccgtttaaatcccctgtcaaaaatttttactctgccacatcgaatgtttactacagtaaatatttattaataacggattaattaggtttaataaatttgcctcacagtttacaggcggattctgtaatttattttgttattagtctacgtttaatacttcaaatatgtgtctatatatctgatatgacacgccgaaactttacatccctagatctaaacacaatcaaagttatgtatatccatatttgtattaataggatgtgtcgcatctagacatagttggtttttttacggacgggagtacatgcaagttactatctatcacgtactaccatggagttcgtacgacccaaaaacacgcaaaagtatacaacaattacttccaattttctcgagagaacatctagatggatgcgacatgcatgagacgtgagggatggattatggatagcccctgcctggccccctgtcttgattgatgagcatacatcgtcagcatgcatgattggagaagatgctagaacgtgatcccctgggaggtacatcttccgtcttcaaaataagtctacttctaagtttaaatttgaatataatatatgttcagatttaaattcagaatttcaaaaatgatttttctatacggagggagtacagtatagtgtaaatttgagcgatttaacggcatgctgcgatggcagcctcagcctccagtggctgcgctagccgacggacaattaatttgcccttctagaatcaacccttgtcaaatgggggcaatccgtcccttaattaatagctgcttaattaatttggtgattaaaaactgccgtttttgctgcttaaaattcatcttcttctagaatagaatactgccggcgccgccacatagagtactactagtacgtgctagccaggggaggctgttttgaaacttcgtccaagtcaccaaatggatcaaacttcttttaatggctttttccagcacagcaaacaactgctactatgcacagctcaaggtactcctcctatgcacagctaaaggtactctgtaccactagatctcagcatatctgtaatgtcgttgcagattggaacagcaacccaggtggtagagcaagcaaagtcgttggtatcgaacgaacacacgcacgtgccagcaatttttcccagcttctattgtcagcagccaagtgcacgccttgttaccggtcttgggcctccagtccagtccagtccagcagtaatagcggcccatctatctttcgacattccttccttgcatcccagatgcagcacatagcagagaattaaagttagcaatctggattccaaagttgcaaagtatttgggctgccgatctggaaattcagatggaaaatcaaagcacaaccacaacgccggcctttgcattccaagtccaacttgcacacagacacctgacaagtgacaaccgccaacatttcacaggtgtgcttgtgcaatatactgtatatgccacctggcataatgtcaaccactagaaggcaaaagacgacctgacggctgctccaatgtcaagcactgcagctgccaaaaaaaaaaaaaaaaaaacaactataccttcgtgagcttaacctccgcacaagtccttctcaagagaaccggccatgggccgacgattgtcgtccaatcaaggcacacgagcggcttgccaacttctttaggtctttcccaacttccatgtgacttcattcaataatggtccacagcagcgcaaagtcaaggcctcatccttgccttcaccttgtgtgagcatatataatatatcagactcaggaaaagaagtccctgccttcaccttgtgtgagcaatatatcagagtcaggaaaagaatgaaaaatatgtatcgtcttatgacttgtgagttgctcaacatagagaaaatattgtcctctcagttcctgatttttgggacaccttgcaccacctgcctgcagcaagttgaataaatctcagtccaaaacaagcggaatggccttaaagtgagggcaaggtttggaaagagctgcagtattataagtgtaggagttatgtaaaagggatcaaaatgttcattcaagaatacctctgaacaaactgaacaagctaaggtagagttaaaagaaggttgccaaagcagaaatattgcatagttggatgcaccaaactgatgtgcatcgagtcatcgaccaaactaggatcttcaatgttatgcataatcttcttaggcagaatagaagctaagaataaacagcattgataagcaaagcagtttatttgattaaccatttcagtatgctggacaaaacaggtcactggatcaacatttctagtttccagaaaatatcggtctatgacattagttagcctgtatttcttgttaaggaccagtaggttttacagaaaagctccacagcagccagcttatttgataatcctttacaagactaatgagatataactattaatccaatcgaaataccatcagatatcttcaccaccttacaaactcaaaaatttaaacaaaatcctcaattaactattgataattttatatttgaataaggaaagagaaaccatgacaaggttagatcttttttggcaatcttttgtacatagaatcagaccactcaactgtatcaaaatggtactgcaagtgatcaatgcaatcaatgggtgtctttcattgatatagtttgtgaattgtttgtaaagatttcacaaaatatatacaagcaagctatcaatttttttccctatcacatgcaaaggaccatctatcactttaaaggctatacacgatagcaacattcgagaaagcacacgaggctccttttttgcaacatagttgaattacaaaagttaagtgcgtatatggtttcttctattattgcaggacagaactcatataaaataaccttatgtggggaggagcatcacttgcttcgagcatttggtaccacctattttgcattgccatcttgtaagaaacctcagcatccaccaagagtttcaggccgcaccaatggcttgtgctccagatcccagcaataacaagaatagctcgtcgattcttcatcagcaagtgaagaaaattagcaggattcctttttcatggggagcacatgcatggggtataggaagagaagatccaagaagggctattcatgctctcaaggttgggacagcactcacactggtctcactcctgtacatacttgaaccgttgttcaagggagtgggaaagaatgcaatgtgggctgtgatgaccgttgttgttgtgcttgaatttactgcaggtaacgtgcataatccattagcatcaggataataataataatatgtgttcttcccagatgtagcttttcttgttccaaataagtgattaccgaaattcatgttcctcacaagtgactgctgaacaacaggtgcaactatatgcaaagggctgaatagagggttaggaacaatcttggcaggatctctagcatttataattgaacttgtagcagtacgatctggaaaagtattccgggctctgtttgttggatcatcagtctttctgataggtacgcaccttgtaaagttctttcttttttttttactgcaagatcatagcttattgtgttggctttgtttccttgacaggatttgctgcaacatatttgagattcttcccatccattaagaagaactatgattatggggtcgtgattttcctgctaactttcaatctataacagtatcaagcttccgtcaagaggatgtggtgcctttagcacgagatcgcttaagtactattgcgataggttgtgcaatatgcctattcatgagtctttttgtattgccaaactggtctggagaagacctccacagttctacagtacgcaaatttgaaggattagcaagatcaattgaaggtgggtaaatagtagataggagcacttatatgttgcatcttaaataataagagcataggtgcataacaagtatcaagaaccttaccaaagaatgattgcagcttgtgttactgagtatttccaagatcaagacaaggatgataaaattcttgataagcaggcatcaagagcttccattcacattggttatagagcagtccttgactcaaaatcaagtgatgaaaccctagtaaggaactatccttttgatgatacatttttttccttttctcttgcaatctctctctataaagtgatgatgtgcagattacatactgatttcaatattggtaccaaatcgaccaggcacactatgcaagctgggagccaagacattcaatgcaatgttacagttatccatggcaaaagtatgtgaagattggatctgttcttaggcactttgcatatactgtcgcagcacttgatggatgtctagaatctgagattcaggtaactgcatcagcccaatttctcgtgcatcatcctgttgtatatccttagcaactgacatataaacatgaatatgatgtataatttcaatcaagaaaattctccttgaatgaactgttctgacatggttgtctctattgatgttgaagactccaccatccgtcaggtcactattccgaaacccatgtactagagttgcacgagaagtggtcaaggttttacaagagcttgcagtaagcataagagatcatcatcgttgtgcccctgatgtgctgtctgatcatcttcatgaagcactacaggatctaaactcggctataagatcacagccacggctctttctcggctccaaacatgcatgtgcaaatagtcatgtgctgatggaattaaattctagcaagcatacagccacaagaactactctaccatcattcaagactgatggcacatccctattagaaaggaggaatacaaaagcagaccaaccatcagaacggaatgagcggggcacattaaggccaacactaagtaagatagccatgacaagccttgagttctcagaagcacttccattcgctgcgtttgcttcattgttggtagaaatggtagttcggctggagatggttattgaagaagtgaaggaactggagagagcagcaaattttagagaattcactggacatgactatctgaccattgatcttacttccaatgacaagatgagaaacccaaatggcgtaccattagacagccacacaatttccactgcagctgagtaagtactgaataatagatcaaatcagtagatgatcactctgaagcagatatgtatttctttttggactaagaaaatatggcctgtgaggctgtgattcccaataaatgttgttagaatgacaactcataaaaaaacaatattaaacctacaggatgtttatcggagttggatgatgtaaaaaaaatttcagcagaaagtactcatgcttttccccagaatccagtaggtcatgcctttgttttctgaataaacccttctctgatgcatgacatgttctactacgcacttgaatgatcatgagattcatgaaacaatttccttcctaacatctggagcacagtctaaggtataacggccaagtcttcctgttcgatagaggttgagtaatttcatagcaacaagtttacgcacatcctcacttagatcagcagaaaccctgaaagcctcctgcaaggctataaactggcattctatcaaactctttaattcattctcattttctaaataccccttaaaagatgatatactatcaaaaagcacttggcgaacagccttcacaacaaaatcctgcaaaaatacaaaacagtagttactattctatccatgtgatgcctaaaatgtgacctcaaaaggatctaaatgagatatgatcattgcctttcagtaataataaaaatctgcatgatgatgggtacaagactgaattgtgctctatggaatatcttgacgcgcttacttgggtatgatctgaagcatattgccttttattatggtgactgctggatgacattgcatggctgaaagaaggcatatctcctgcttgattcatgttctcccacttcttgtatgtctcccttgagttcaaaattgcaagcagaaattgggcaatctcaaactcctgcatcatggaatccttgattgctcctgtaatgaagtttgcatacatcagtaacaacttatagtcacaagtcaagccatggattaccattgtagctggtacctgtcaaagctagtagaggaccagactcgtcattaaaaaatacaggagacaaaacaccaggagtgtctaatacatatatatttggatgactagcaacctgaaaaataagaagtttgaatcttgttaagatttggaatggcacttggcaattagatagccatacaaggtgatgataacagcttctaaaagatggtgttcacaacaaaatacaggcaccagagctatttccgcactcagcattgctgtctctttatgaagaaaatataggtgctatgcgatttagagttgcccaggtaattaatttgttacaatgtccataaggaatacaaagacccctctatccatttcctctaaaaaactaaggtgttatgacagtcatgcagcatggtcttatttccctcattctgctgggtcgaacagaagcaatgcattatatcgaatcaaattaccttgtaaccacttatgtccttggtttctcctggatggctgctcacaatggcatgcttgagctttcccttctcttaaagacagagcaacgaatattacacagttgtgtgaatcacagttagtgcaactacagtatcaacagtaataagctgcctcacctgctgccccaatcctcccaattcgatgcatggcattgacgattgctgacttcccaacattaggaataccgaccaagaggacggttccagtgcaatcgctctcaccaagtttaatctccctgatctttgcccgcacagcattcaacagctatttcacagttaaattagcacccaatcaaatcagccgctaatgtaatcaacaggtaagaacactagaaacagcattacctacctccttgatgccctccctgctgtgcgaattaagagcgacgcaggagcagctcgtttgcttcatgtacgccatccacttctggagaacaccaacaccaatacgaacaacgctcgcgtgtgtgtatcagatcagaactgatcacttacccatctcggggcagtcaaaatctgctctagttacagatgagggttgggattagggttacctcggtttgagaggggtccgcgaggtcggccttgttgagcacgacgaggcggcggcggtcgggctccggggagcggcggcggagtggcgcgaacgccgaggcggcgggtacctgcggggttagactcagcaagcaagcgcatggggggaaaacgatgcttgactctgtctggagcagcggaagacaatagagaggaggtggagagcagtgggcgccatacccgggcgtcgcggacctcgaggacgaggtcgacgagggggaggcggctgcggatggcgcggtcggcggcggccatgtggcggccgtaccaggcgccggagagcccccgaacggcatcgctcaggcggcgcgagaaggcctccgtcgccgccgccattgctgacgtgagccaaaggcatagagacaaggaataagtccactttgactcccttaaaagtggcccaaatctaatccatggcccttaaccgcaaaaccggatatctcgaccctcaaactattgaaaccggtgcaatttgactcccttggtggttttagatggcggtttcgctgacgtagcaatattgacctaggatgtgggttgacgtggcgctcaggtggcatttgaattaaaaacgcatacgtgggacccgtttgtcattcacacatattaaaaattgtggggcccactgacatgtgggcccacatgtcatctcctccctctcttcttcctcccctcttgacctggaatgatggtagagagcagtcacgcgaatccatccgtcagctcacgatcgaacgcctttgcgtggagctgcacgtccggctgcttcgctcctttgttatctgggcctaggcccaacaagcacaccatcgtcagcccgttgctcccctttttggcgccgtcttttcctttttggcgcgaatcccatctgcttttcccgcgagtgaacgtgaggcgtcggcaagagggtgaggcgatcggcttctccgtggagcacgagggtgaggcgatcagctgcagtaaaaacagagaaaacaagatcatgctcgcaggtttgcacagtcttcatgtgtgtgtgtttagattgcaacaatcttcttctaatttgtttgccatcctctcctatgttagcctgtgtggaaatagtttaacgaaacatcaacttgcgattcatcaaaaaatagaagcaggatatatgagatggaagaaaagaggtgtgtaacccatgcttgtttctttctcccaattaggggtgaaaacggtaacggtaattaccggccgaccggcgttcgtttttgactttctaccggccgagccatatggaaatggtaatcgaccgaaacaaaaatggaaatggtaaaaaatatggaaatgaaaacggaaatggttttgctgttataccgatcgtttccgtatttaccgtattctcgcggaaattaccgtttcttataatatggtaattaccgtattctaaatatgtcgatattataggacatgtctatacttgacccacagcttatagattgaatgactcttcaataaaatctctaacttttgtacatggctaaaatgaagttaatttataatttatatagtataagcttgaatttatgtatatatatataacatacttatgtaaagttaaatatatgtttttatagtttaatgtttccgtatttgttaccggtttccgatctgtaccgacatgtttccgtccatattgttccgtttccgattttccgatatttccgatatcgttttcgtttccgactttaccgtttccgatttcgtttccgagaaaaatatggttacggaaatggttgaggctgttttccgatcgtttccgaccgttttcatccctactcccaatgcgtacagatatattttagttgcttatcataccaccatcaaattaaatattttgtttgctgtagggatgggttttcccctagtttgttacctcaagttggcatggaattcagcagtacagatgaggcttggatgttttggaatagctatggaggtcagaaagggtttgaggtgagaaaacggtacacaaacaaaagaaaatcagatgggaaggttaggtcctgcagatatgtttgtgcaaatgaaggccatagaaaggaagataaaagggatcatctaacaaagtgtcctacagctgaaactagaaccgattgtcaagttcgcatgggtgttgtactagatctagagaaggggaattataaagtggctgatcttgttttggaacacaatcacatccttcagttgccagaaacctcgcacttgatggtgtctcaaagaaaaatttcagagttacaaggttttgaaattgagacagccgacgatgcgggaattgggcccaaagcagcacatgagttggctagtatccaagttggtggctcacttaatctcagatacactcttcgtgagcacaagaattatttacggggcaagcgccaacgagagatggcatatggtcaagcaggaagcatgctcatgtattttcaagataaaattgcagagaacccgtcgttccaatatgcattgcagatggatcaggaggaacaaatagcaaacatattttgggttgatgctaaaatgctcactgactatgcatattttggtgatgttgttagttttgatactacttttggaacaaacaaggaaagtaggctttttggtgtatttgttgggttcaatcagttcagggaaacaatagtttttggtgctgttctcatgtacgatgagacatatgagtccttcaagtggttattcgagacctttctaaaagcacataatggcaagcaacctaaaacaatctatactgatcaagattttgcaatgggaaaagcagttaaggaagtattttcagaagtatggcatggtctgtgcactttccatattatgcagaatgctgccaagcatctagctgaagtcgacaataaagaggaatccagtacttctcccgaacagatagttgaagacaatgagaaagaaccaagtattctcgcagattttagtgcatgcatgtttgagtacgaagatgaggaaacatttgaacaagcatttaacaccataagggcaaaagcgagcaagcaaagttggttggatagtatatacagggttaaagaaaaatgggctgaatgttacatgaaggatgtgtttgcattaggtatgagaagtacacaattgagtgagagtctaaatagtgaactgaagaggcatttcaaatctgattttgatatcatttgatttcttaagcattttgaaagggtggtggaagataagaggaaaaatgagctaaatgctgaatttgaataaaggaagaaaatacccagaatcaaaatgaggacacctatgctaatccaagctagcaagctgtacacaccaattatattcgaagcttttcaaggtgagtatgaaagatccatggtagcatgtagcacggcattggaaggcaaaaattgctatcttgtggcaattggcagtcttgaaaattgtacctttgagaaggagtacaatgtttttggtgatcctttagagcaaactagtacatgcagctgtaggatgttcagtagaactggaatatttgtgtagccatgctttaaaagtccttgatctgatgaatatcaaatctctcccaacacaatatgtactgaagagatggacacgtggagcacgtagtgggacagtacaagacaaccatgggcgaaatataatagagaacccaagattaaatgagatgcttcgctacaaagatatgacccgcaaatttctcaatttggcacttagagctgccagccatctagagtctaccttattagtaaacaacacactggacatccttagcaagtaagttgaagaagaaatcaatgcatgcactgatactatggttccggtcactgctcccacaaatgttactcctccaattgatttggtgagtacagcatgcctaaagaaaaaggaggtgcaaacaaaaagctcaaagcggaaaagaaattggcttgataagatgcacaagtccacagagaaaggaagtaagaagggaggtaagaaaaaggaaaaaggatcaaaggtatgtgattacataaaatgtatttgattctcttttactgtgctcagtgggaacatgttcagtttatttttcttttatttgaaggaacaaggaactataaagaagggagggaaaaaaaaggaaaaagaagcaacggtacaagacagtgcagcggtgcaaaatatttatcctaatacttctttgcccatggaagaattgtctgaaccatacatggccatcaataccttctctcagatattgacggtaatatttcaaactaacacaccatttttctataccatagatggccatcaatacattctctcaattgtttttctgaaccttttattttacaggggccaattacagatgatgttttggctgatttctagtagcatggacagttgctgcaatctgaaatataacagattgtttagggggatagcttttgcttttgtcgaagtgtaaagttcagggaattgcagaattgcatttctgaatagcagagcattttgtgcatctctgaacttgcaacattcagaattaccttttattcaattccaaacaatttacaacacaatgacaatcacaagttacagtcttgctagctctagcacaaatgtcacttcacaagcaagacaaccttcctctgttactcactgaaaatttcagacatagcacacgatgaataaaacacactggaaatttcagatatatcgactccaatcactgctatcctacagacatcattttcagatatgtcgactccaatccctgctatcgtacagacatcttctagcttaattggaatcacggctgtggcaaccctccagcgggtcctatccattctgagacatgctacaattgttgcgctgcctgacgaggccatgctgctgcagcagaagctgtaccgcggcgtgcggggcagccgcagtggggcaagtgggtggcgtagatccggctgccgcagaaccgggtgcgcgtctggctcggcacctacgactcggcgacggagtagcgctcggcgaggacggcgacggagcagcgctcggcgggatggcgcggcgctgctctcggcgaggacggcgccgctctaggtgacgacggcgacgggacggtcctccatcctcgactgcaagtccggatgacgtggtggcagtgaaccctttccttatccatagaagcacttgttgggccgagccgctgaggcccagtgtctgagaggagtagcgttagatccatcgttcgattgcgggtggacgatgggattcgcgtgactgctctctaccatcattccaggtgaagtcagacgatctgattccctttctttctctttctcttctcgccccttcggccggccgcgggggtcacaggacaggctgcagtggtggcgggcgggggcagagcggcggcggcgagctcaccttccacgacgaccgcgtcgacctgcctcgccatgacggcgcgcgctggtcaccgcccaacgccccagcgctgtccgtggcgcgtaccgcgcaggccaacggcatgtggttgtggagctcaggggcgtgttccgcatcgtggccagcgcggtgcccatcatgagggaggagtcgcgccgtcgcgcgtccacaactacggcgtcaccgacgacgactgcctcgtccacctcgacctcggcttcaagttcgaggcgctcaccgacgacgtccatggcgtgctcggccagacttcccttcatctatctactctactgatttcatttgatgatgattacccatttaccctcatgagttactgactgacatggacgaaaattttataggacaacttctcgaatgcctccactaattgccaattagcagggcagataatctccccaacaaccaacacaatcatgatgcactgatacacggtctgaagctgcatggactggaccgccggcgactccttctccggagcggcgtagcgcctccgcctccgcgcgattccggcaaccgcggagtccttcgcctacactcgccgcatttcatgccctaggaggctgccgtctcggccccccatggccggaaccctccacgaccccaactccgggtcaggaggcgaaaagcggcgcccactcctactactactcccgtggtcacgctgttcgcccagtacgtagccgactcctcctccacattgcaatccgccgccgccgctctgtcccccacccaccgccgctgtagcctatttcccccgcggccggccgtaaggggagagaagagaaagagaaagaaagaggggaggaagaagaaagagagagggaggggatgacatgtggggcacacatgtcagtgggccctacaattttcaatatgtgtgaatgacaaacgggtcccacgcagtggcgggcccaggtttttgaacttgtgtattcgaaatgagaaggggtaaaaaaaattgttcatacacctaaaagcctaaacatatcaaagtgccaacataataacatatgaaatacaaaaatgaaagaaaatgataaattaggaagaaatcttacaatttagagattaacttttcgacgcttgatattttgaaaataatcgatgatgtccttgtccttagcttgcaaattgaaatttttttaatgaagccccatcttgtttctccaaaaaagagtttaaatcaacagctggcccttcttcttcatgtttcagttctgaaaattaaacaaatttgataatatggtatgaactatgaactaccgtccagtgtccactagaccactacaaactaagcaagcaagtacattctcactaaatcagtgaattgcagctcccaatcctaaaattttcactacatttattcaaatttgtgtactcactaaatcagtgaattgcagctcccaatcctaaaatcttcactacatttattcaaattttgtgcatgtacagatttagtcactcactgtgttgtcactgttgtgctgctcctgtcctgcgcggcttgctgttgctgtcctgctcctgcttctgcggtcctgccctgcgcggctgagccggtcagccggccaggccaggtgccggcagccctcagtggcgcagccgcctaccgccctgcgcccggcgcggcgccccacatcccacgaccacgagcacgagggcacgagtcgcgcggccgggccggcgccacaagccccgcctgctcggcggcgcgccgccagccgcacgcctgcgcaactgtcgggatggatggggaggcgaattagggttagatgggaggggaattggggatatgtcgaaatgggctgagatgcaaggttgacaacggcccaattagaccgcgggctgagaggaaagggggaggggagtgggaagttttggcccaatagagaagaaatggtgaaataaggtccaatatgagcagtttaaggtttcttttttaattttttaaatacatatacgaactatagagtatatatacctattttttgtccaaaaatcttgggtatacatctgaatacccttgaatatacactgggcccgcccctggtcccacgtatacgtttttaattctaatgccacttaagcgccacgtcaacccacatactaggtcaacattgctacgtcagcgccacgtcagcgaaactaccctccaaaaccaccaaggagtcaaattgcaccggtttcaacgggtcaagggtcgagaattaaattcgggtcacttttaagggagtcaaagtggacttattcctagagacaacaaggtacaaaaggccgaaagacgaagacgaaatacattattgaatgggctttatgggccgggactcatcacgtgctagatgggctttatgggtcgggaatcatcacgtactagtatcagctgtattgctcatcatcagttgttctcagaatcttaagcattctgtgatgcaaattgtgacctgattttgacttgcagaggacagattttatacggaacgagaaaagttaagaggaaaattcgaaaaggcagcgccgtcctctcctctaatgtttgtttgtctggccatacaaatcaaagattcaagagatccgattctattcttggaatgacggtggccatttttgtgttgcggcagtagcaatggcatcttatcaatgctcttccttcatgttaacattaacaatggtctccccttttcatctttcgtggcgcctcggcaaggcactgcttcactccttgctgctgcgatgttcctaacctcacgtatcaatatcatcacaatttcttactgctactactgtaatcattgtcctttcgttgctgttacttttggttaaacctgctactagctgctatcaagtcaaaaagaaaactgtcatgcatctgtgacctgtacagagtggatacgttcaggctgaagatattccaatttaacttccccctactacactgtaaatctgtaatccatttcaggctgtaaattggaatatcttcagcctcaccgtatccacactgtaccaaagagtaaatgtaatatctgactaatgtcaggctaagcacacagaaaacagaaaacaaaggcaagagcttatagacatactatgaattggaacttttataatatatatattgtatgaattgaaactgcactgtttgagatgaagattgatctaccagcaacactaccttttagcttacagatcagtgttacaagtacattaactgaagaggatacataacccagctctgctgtatgatgctacagagaagatgtattacagccagtaactaaaagaaagctcatcacctctgtatccatacagattataggcatatttatgcatatataatagatgacatatgtctgtagtggctgacacgtggggccccagttaggaatggctcaaaaatataccgccatgtgtaactaacccgggagcacacgtgtcatggttgactcgttcagaagacggacatgttgtcgtcggcggccgtgaaccacgccgtgaggtcgtcgccgtcgctggcctgcctgcacagcagcggcgccgccgccgcgttccagagctccccaccgccgccgccggagtagccgcccagggtgtcccacttgagctcgtgctccgacacgcttcccatgacgtcgccgtagagaggaggcgctgcctgcgtgaagccggcgtcggagaagaacgggtcctgagtctgaggcatgcacagcggcggcaagtcgaacccgcacgcgtcgccgccatggtacgggacgcagctcggaagcagctggaacgggtcgccgccgccgccgccgacgaacatctcgtcgacgagcgggctgccattgttggtgggcgtgaacgacggcgaggcgttgccccggctgctgagctggtgttcgacggtgacaagggacgagctgctcgacaccttgctgatcattcctttcgccttcgccgccggcggctcgccatggaggcccgcctcgtgcctcttgatcacgcggcacagcgcgtacgccccctgcaccagaacacatctcatccgatcagcgcgccattgttgccgtcgcagcaagcaaagcaaaggcaatccggagaaatgaactcacgatgaagttggagacgccatgggcgaggtcctggcagaggcggtactcgtgcatgacccagtcggtgcgctcgccgccgggagcgcgacccttgtagaagacgagcgtcttgcggaggccgaagacctcgccggcgcaggcgatcttgcgatccttgccggtggccttccagtacccggtgctcgtcgccctgttcgtccgcgacccgttcggatacttccggtctcgtgggcagaagaagaaccactccaggtcacgcttcggcaagaacgacttctctgcacattttcataatcattttcttcttcagaatttgatttgatcatatttattatcattttatgtcaccaaggcgaaaccaaattgcaagagaatatccgaaaagtttggctttgcggttgcaggaggaattcattcttgaatactaaaattaaaaggtgtgtgattaaaaagacttatcagcaaccggcctagggaggaaaaagcccagatgcccgtgtaaaaaggtcgcttttatctgtctagaaaatgagaaacgcctctgggaaaaattctgcatgttcctttccaattttctaccacctgtttctctcttttcaggaatagatttgcgaaaaaaaaaaggctagcaggtcaaaggctttgcatattgtttagctactttccacagttaaaactgttttcaccaaaagttaacaatgttgacacgaccaaaactcaactatgaaacaacaacttgtgctaaatatatttgatgcagaatttcaactaccaaaaatgaagtaacatgaatcaaatggaaaaattgacaaaggcacaaacctggtagctcccatggctcgaacttgtagagatcaatgacagggatgacctcaagctcgatcttgaggctgtcgactttcctcttgaggtagtagccgaccaattcatcgtcggtcgggtggaaccggaaacccgggggcagagtcatggtacccatgatcaaatcaaccgactgaatttcagacaaatgtacacttgcaaaacctattcaaatatcttgggcaagcaagcgcaaacctaattgttcaatcgaaggttaacaatggaaagaagaggcaaacaatactactaatcggagcaaagctagctagctagctagatgtagtgtcaatttgcctaaatgctaatacttgaggcagattggcacaatttatcacatatatatggttgaatgcttgtcaattagaggcggcagaggcagtatctattgaagattgggaagatccagaagtagaaggtcttgagctgctcggaatccagcggacaggtgttgatgaagctgcctccggagttcaagatcattatcctatggtcaatcccctagctagcaagaactaaacaaccaaggaattcagttcaggctccttgatgaacttgaactgaactacgtacagagatatcaattggaggagcaattatggacgagaagaagaacaagaagaagagttgagagattcttgctagctaggtgctgaccaattaagaaataagaggaggaataggagagtgtttgggtttcgttttgtgaattgggggagttgggaaggtgacacggtaggggagtttatatagaggggttgagaggagaaaaagctaaggtaaggcggcgatgatgttcgtacgagcgaagcaattcgaagcgtcctctactctaccacggtagttgcaactccaagtagccgcaaaagacattcacacactactcgagctttactactgcatcttccattctctctgattagctcctgtccaaaccgacgtgtcaggttgcctctgtgattagggcagcgcctaatccactgattgatcagatatctgggcatgattaatgacatcgcttttggataatggcaacactgacatatgtaatgcatggtgatatattcttcttcttctctgaagaatcatactgtcttaccattcagggaaggggggaagtacgtacatgcagctagcaagcagcctctcccaaaagtgaaattttgtttcatatgcgctttgttttgtctatgaattcttgtctgcgtcacccttgatccgtgcttagccgttcggtttagttcactgatttgattttcttcggataatatcttcttttacgggtgttcagataagtttcgtggccgaatttactatgtttttacagctcgccttcatactaaacatttccgctgattgatttcccgctgaaactaattacgaattcagtttccagtacatcgaacacgtacgtcatgtgtaccgattgtgaattcctatgcatagtcagtactgacagggaattccagtggcgacgattcttcttgacctatggttattctgaaattgttatgaattgacctctcctactgtcctagtacatgatacacgcctgcttctgaataagctctatcacttgactagatatttttttctgcactgaagtagtatctgaaatggtatcaagttgtgagtgcccaaccgacctaatcatcaggaattagttcctgactttctgctcctgttgcgatgttcacttgcacagttgcactgaatctacatctgacaacagaggttggtagagtctcttgattacatcttgcccttgataatacatggttttttaaaaaaatcttcgatttgaagagaaaatcataattaaacaaagtgttcagagtcattaggacgatggacgaaagcacatgtgaattctagtcagacggattctgaaaccagtagctgtagtattctgctgtattgttaagtcgattagacatgaaaaaaatatatgcagacaatgtatctgtacaggtgatatggtgcagcagtatatctccttaatttcaaacagctttacatcgacgcgtagtataaagtactgcaagtcatgttcattacgatctcaatgttgcaacttgttctcctgccgacagccttcctagccacaaaaataacacaacaccgcaaattctcaggctggtccatagttctgaaaaactataacaatgagaacttccaagtttgcattactagatttcctccctattctcaggctggtccatatttttgaaaaactaccgtttgactggtttgaatttggcgcggtatcataattcacagaactctctgccagtgacgttttctttttcaaaaaaaaaaaaaaaacttccggcttctacaccaaactaagggtgtacacgaccatatttgtggatactgggatttaaactttagtgaacggacttgtgcactcaccactctagcacaccaatgatgctttcccataatgatgttttgtaagtccaactttccaatgaattttgagcatacacttagagtttatcagttagtataataaatataaaatacttaactactatttatatcccaaaatatagcaagttttagcctttcgcatggctattaacgagatggataaaatgacttatttgtctttcggggtggatgccatgtaggtctggactagttgggataataataaagcagagatgtggtatgagtagtttaatagtaaaaatgaccttttatatatatgcactatgttgttatatttggataaattttgaactatattagttattatattttaaaacggacggagtatttactaaatggaggctagtcttagacaagaaaaggtagattgtgaaatggcatctagcctagtggttgctgtgatctgagggtgtgtttagttcacgtcaaaattgaaaatttggttgaaattgaaacgatatgatagaaaagttggaagtttatgtgtgtaggaaagttttgatgtgatggaaaagttggaagtttgaagaaaaaatttggaactaaactcgtcctgagtagcaccttggtcctgaattcaaatctctataggaacgaattttagattgggttatttgatggctaagcttcctatttgataggctaattttctaatttaaaaaggctgcatatatctggttggatgtaaaggccgggtaaaaaatacacttctcaaaaaaaaaagaaaaggtagatcattaaggccattctttgatgacatcaagctaaattgactgctgcatgacccagctttgtatagtcactttcctcatagctatcttgcacttgcactttaaagagcacatttttccatcgtcattggctcacaacatgagcagccatgctccacatggggacaaatgtacttgtcagttggcattgctcaccaaacaccaaatctgagcaaaagcctgagtggttcagtcaaaacaatctccatcttatcactactttgtcactgtcaggatagggagttggacctcaactgcttgcttacccttgaccaaatgctagtgcttaacttcacaaggaggttcaaataggggaaaaaaacttcatgaattcaggttagctggtttatgactaactaggttaatttcaagctaactgaaagctagcctttcggtaattagtagctcatgtactgttgtatgctgaatactgtagccaacagaacagcttgatcaagcttgaatggatcatcttcaggtatgcagaaagaaacaagtgtagcctttgtggaagtgaatgcatgacccactgatcatgagtcattagcttttgattagtttaattaacaacatcgaggactagagcattagctgcatttgtcaaggcagaaatggtttaaggacagatggctcaagtgatctctctaattaacctgaccgttcttagatatgaacgctggtggcctggtgggtgcccacctgaagaccaggattgcttttataagcagatgtaggggcctgctagttatgaactgcttgacttgagcatccctggctgcatgaccaggcatcttgcaccatcagagctgcatcagcaaagccgcactaaggttggcttcttttaatccctagcaaaccctcccactgcttttcatcccttcctgttgatcttaattatccaggtattgttaaatcaaatgctatagagtagtagcattgttagcaatgatctgacacaacttgattaatttctgaattccaagtcgtcctagctagtatgaaacctctctgtgaacttttttgacacggtttatttgttttatacacctctgttgttgtatgatcaggcagggcatcagcattggatctttaagtggcactaactaagctagtatactagctgctgagctggaggtgagactgatgcatgatatatgcatcatcttatcatgactgcaagtctgcaatgtctttaacttatctttaacagattacattacctcaggggaaaaaaatatgcagttcagcttaactgttgtaatcaagaatctcattatgttcatatccagaaatggtaggacagcatgcatgaatgctcaatctttaactttcaggcgacctctgttcacctgaagtcctgaagacaagactcatgctgggtgtacagtaagtcagtagtgaatcaatcataatttcgagtaaattatgatcatgtctatccatgatggagactaaatagtaccgtttattagtcgcagaataattcgattctcctgttaattaagtaattaaggagcgcaaaaagtttcttcaagtcggaagactctgcactgtgaagtgttgcttggataatatatgttttattatctgcttcctttccagcagctgagattagtgggttccacgtaataattgttgataaattcaacattttcattggcaaaaaggcactaactaaactaactaactaatgtaatttaagatttaagaattaatgttatgcatatctaggacaagagaaaaaatattcagaggtgggcggcacaaaataatgtaatataagtagcaaaagcgagttttcagttaaaaatgtacaaaaccagcaaagctagtgcaagagagacgtttagaatcttcacctacggagtatgtgctaaacatatcctgtctagtagtgattagcagattaattaactaccatgtgatgaaatgaagaatctttgttagtggagcgacggggcacaaaacactcacaaggcatacctttcctaattcctacactaatgtaatgggatcctgaaaaacagcattagaaaactagaaaagaaatgcctttgcgcatagtataaccagcatagcttagctaggcagtgatttgcttctcggccaagataccaaagcaaaggagattcaaagcttaacgggggcctctcaggaaaggaatcgccaattaattgacgaaggcggttcggttttagtagtaggcgacaaaactcgcctttcattaacccaaaaatagtctcacgcctatttcgttgtaaatcagagaaaactgattactagtaatagtattaattaggaaactttgtaacttacaatttactggtaagaatatactgccgccataaaagggagaaatttctctccatatactataaccataagaaaattactatgcatacaactcaattgtccacgtacgactaaatttgatcaacggttataaacgagtgcagtgcgtataaacaatgattgatatatggctgcatatatctcattgtacatgagttgtacaactgaattgtacgtatagcggtactatttttataaatacaaatcactaggtaattttccccgctcaaacctattccctatatatctcttgtcatcctttaccatagcaaggcacccaccatgaatacattgtgccagatgggcaaggacggacgtgtggccagtggtggagttggacacaggtctaaaataaagattgctggagaagctcgataaagataaccaaacacaacatatatataccattgccatatttatattactattgcacctctagtattataaaaattgaagatgtttatgttgatactttggtacgtcatccgtatttaagtcggtttttaagtttattcgcttttgtaaatacatatggagtcgtataagaaatcctttaaaaaaacccgtatgctaacttggaacttagagtcgtactcttaattgctttagaattcttgccgggccataagaaagcaacgtacataatatggatgtcatcccaataagacttccaaattagatatcaatactatcaaaatgaaaatcccacatattttttaaacaaaaaaatataacaataatatattaaaatagctttcatgcattgcaacgcatgagcttttttttctagtaaaaaaaataaagtacaatcaataaggtaagacataaaagaacatccaagataaaaaaaaaatagagtacaactttggagtcgcctagcctatttgattgctatctctatggcatcaggcaagcgggaaacacattgcggtgtcacgccccgaactagtcccgaccgggactagcccgtgacgctccaatttaacctgttaatcgataccagtcccaggaaacagtgctggtatcacagggagatagaatatcacagcatcagaggtctctttattatagagtagaagtacagtcatgttgggctgcggacagatcccgagctcacaactgcattacaaaaggaaagcggaagccaggacttggaccaatcatcacaggcgcgacttgggaactaggccgaaaccctaaaactcatcgtagccgacttgctcctggaagaactcctcatcagcaggatccgcttcatcttcttcagcaactgggggggaattatttatatagagcaagggtgagtacgggagtactcagcaagccaggggaaataagtgtttaatgcaggcttcaaggaaaggctgttgttttcgtaattgattttgtttgaactcttttctaaaaagtctaagtgagtgcttctcaaacgacacggatgagacagtgcgtctcgtccggtcggagtatgtgcaatgtatcagtctttagatcttgaaatagggttggcacccggccaacagcttttcaaacggccacccgggccaacaacttttcaaacggccacccgggcctagctgatcccgtcagctgctgatttttcaaacatcgaacccagtttcacaacagcaatttcataagcagtagtcagacaaaactacgctaggaatcacctcacatccgcccatgaccgtgggcacggctattcgaacagttcaatgacctctgcagaggggggtacactttacccacacgacattactaacccgggtcacccagcccgtagggatcagccacgtcgggagacctccaagctttcatgacaaggcatttcgaaagccgacacaggtttaccatatgccgacgagaggggtcccagaccaacaacaggttaggtcccagaccatactgtgccaggaagcccaggggtcctccccgacaccaccccggcgaatccacatgtctctcggcatcaaggctcccctgataagctagttactcagccaggggtgtcccattccacccatgtggtcgtacttgtcttatgtttggatgaaattccaaggaatcggtccttaagtgcgagagcgggaaaccgtacacccggtacgttccccggtccgcggttttggaaattcatttagttcgcaagcaccgacccaggtgtcgggttttccaagtcttttgtaaaactccagttttacccaagttgtttctcagattttaagtttgaaggcgaccgtcgatactcgcacagagtgcacgaatatcgaggtgcaactgggtggttacaaggggacatggtataacaattaataaaggaatgatcaaatgcaacaaattaggtaggtctgccaatctgccttgcagacgggacaacagattaagtgtgatcctatcaatgcataatatttcgcaagcaatataattaaattttaaatataggctcaagatgttcaaaggtggcttgccttgctcgagatctggagcttaatcctcgaaattctcgcactgcgggtcttcgggctccgaaactacacgcgaaacgggacaactcaacaaacggcgaaaataaagccctattaaagacctctaagcgtgccactagatagatctcgagatttgggaaattttagaagttgaacggagtcaaacggaattacggttgggaagatattgaatttctaagattattggatttttggtctaaaggaaaaggatttaattaaatcctttttgaaaaagaaaagaaaagaaagaacagagggatggaaattagacttttcctcgggtggctagggcgcggtccaaggtaaatggagcggctcggccgagcttaacgggccggccggcccaagacggcccaagcgcgcgcgcgcgggagggaggagagagagtccggtggaccgggctcaccacgcgcggtcccaggtgggacccgcttgtcagcggctcggctcactgtgcggagggagtacgtggctcatgcgcgcgggcggggaaaggacgcggtgcacgcgagcggtccgtggtggacgcaggtgcggcgggcccacgcgcagcctcacggctcgcggtggaacgcgcgcacggggagggactgaccggggtcggctcgatccggtctaggctgagctggcgccgacgtggcacctacgtggcggccacgtgggctggcgggaggtagacgacgacccggcctcgaatggacggcgggcggcggcggcgagcggcggagcgaaccacggcgatacgggcaacagcgagcacaccgggcggttgcacgtgacaagggaaggcgagccatcggctcggattcgccggaggttgctcgacggcggcggattgcggcggcggcaaccggcggcgggagaagagggaaacggcgacgaggtcacgagaggtcgattcccggcggtgagagcatctacgcggcttcgggaactcgacgctagcgtcggattgggtggaactacgccgagcgaggccggcgacgagcgggtgctacggagctcgagcggcgacggcggcgaacacacggcgagcgacggaaacggtcggggcggcgccggctaactacggggaggctactcaagctactaccgaaagctagggggaggagatggagcgaggaggaagaacggagagagacatcaccgagaagaggaggggcgctgtgacgagaggccggcggcgcgggagtaatctctccggcctcgggctgaggaagaggaagaagagggcgcgcccggagtccccttccgcgtccatgaacgcaccggctctcccggcgcttggcgatggacggtggaggcgaggcagagcacgggagcggcggcaacggtgaggaggcgaatgggagaggaaaggaagggaggggggagacgggtttaaatgggcggcaatgtcggtttgagagaggggaaccgacatgggcggtcaagccggcgagctggcgctcggcggtcgcggccaaagcggcgacagggaggatgacgccggcgaggaggaaaaaggggaaaaggagggggagaaagggggcttgcccctttgccgattcgggaaaaagggggaggggagcgggggcgacgcggcagagagaggaggggcgcggcctccttcccttggcggcttgcgcgcggagtggcgggggccgggcggtgacgacggcgatgacggcgggcggtttggagcggagcggcgacactggcgacaggcgcggcagacgctgacgacggcggcgaccgggcggtcggccactcggcgcgcgcgcgcgggaaacaacgggcggcgtccgcgcgggcgcgcgcacgcgaacacggcgcgcgggaagcgtctttgcgagcggggagctcgcgcgaggggaggggcgctcggcgcgggcgactcccgcgcacacgcgcgcggcgcgcgggcggggcggagggggaagcggggagagaggcgctcggggcggctctcgcacgcgcgagcagcgtgcgggcggggaagagagagagagagagagagagagagcgggagagcgcccggggggagagggagagatgggccggggaagaggggaagatgggccgagcgagattcggcccatcgacctcgggggagacaaaatagacttttgcggaggaatttgattggaaggaattggattcggagttgaactcgacgatagatcggggattgagatcttgagatggcacggacactagacaacaagcaaagaaacaaatttcgcaattagggtttttaagagataattttcccgctaggcgccacgacggaacgggcgctacatgcggactatggagcaaaccggcagagtcatggttgcatacccatgcaaaacacggtgatggcacacatattggctctggtagctagtatagtcatttgcaccacgaaggggatgagcgttgagagacaagcaacggaaatgaacagttggggactcagggcgaaggggagcgtaatcatgaaattgaaagatgaaacaatgattgattgcctcatgaccaacctggagtaattcattgatttgattggctacttatgggttggtggttgatgtctaacatgtatggtccagtactaaaggagggttctggaggtggggggcgatgcggatcgtagttgggttggtcgacccacctaccttaccaaataggtaggtttgcccttgcgtacgacacgaacagagggatgggtcaaatgggagggaatgactcaaacgccaaagggatcggaggttcggctcacttgggaccgcaatggaataactctataggaaggttggggacttaagcatgaaatgactaaaataaaaaatattcttaattttgtggaaaatttctaaaatgttcttgtttatactggcaatactacaagtaaattactatactgtaaaattcctcattattattattattaacctgaaaaattcagttcgattcattctgatgaagatctatatcatacaaaatgtgtgctcaattaattctcctccgtcgaaatggaacctacgaagaagaattaagatcgattgatctgctaggttgtacacgtgagatatgcatttgattacataattaagtgaggcagctagatgcatgtcagggggaggcgtgttcctcgcacatgaatgtgtccctattatggatgcaaccatttttggattgtttggggatggtcggcaagagataaatagatagataccgtcaaacagtgacatacacacgcagttcaagtggtaagtggttacaattagtcaagggggtgaatagtgatataacgatcgggacaccctaattaactcctcgttcttgttcacgcatcggcagtatatttctgcaggttattgccatgccctctctcggtcagctcatctcgcttaccaactaagtaactgaacaacaggttaaatgtactaagcgaccaagcatatatacgcaaaagatcgttgcaatatgctgtacagcaatggaggagccagggatcaggggatggcgacggcggcgacggcgatccttgggtggccggaagaggcgacgacgacagagacgcggaaacccgacgagctagcaaggtagcggtcgaattgagagggattgatggacatggacgtgaacgctcctaattaacctaaagcatgatttcacattccaagaattgaagttgcgcgacgacgacgacgacgacgacacaccactcaccattccgaaatggaatctggagtggacgacagagagggtgcttatatctagattagattagaggtgtaaagttttaacgtgtcacatcgagtattatataaggtatcatatgtgatgtttagacactaataaaaaaactaattacagaatccatcagtaaacaacgagacgaatttagtaagcctaattaatctggcattagcaaatatttactgtagcaccatattatcaaatcatgaagtaattaggcttaaaagattcatctcgcaaattagttatttttttagcatatatttaatactacctccattccaaaatgtttgacgccgttgacttttttaaaaatgtttgaccgttcgtcttatttaaaaaatttaagtaattgttaattctttttctattatttgatttattgttaaatatacttttatgtatacatatagttttacacatatcacaaaagtttttgaataaaacgaacggtcaaacatgtttaaaaaagtcaacggtatcaaacatttagggaaggagggagtactttatataggtgttcaaatattcgttgtgacagggcctgactgtcgtgctactctcccgtttccaaatagaaacattttacggtattcagatttggtatatacagacgttgtaaacattggtcggccaatccttcttcagctgtcacggcaaaatatatatgttataaatatttctcggacactaatttcaatccactgcaaaattattcgcatgtctagaatcctaccaagagaatacccccatttttatgttattgaagtaggattgacgaataagaaataaacataatattatttattagtgtcgcataaaacccgaaatggggcgtggccaagtggtaaggcagcgggttttggtcccattactaggaggttcgaatccttccatcccagattttttctgatgaaacgaaagatgaaatcgtattgtattctgcacgagacataaagtttattaaagagaatttttttctcttataatcaagcttttatgacatcaactacgtacttattaggccttgctgaattctggtgatgtcgtctctcttgaaaacttaattatgacaaaaaaaaatctctgcaaagttcctgccttttgactttagaaaataagtccgcaaaaaagttcatggtattctcaatcgaattcctggaacgcctggtaataaggtttgactagtgactagtactatatggtcttcaagtgctgtactatactactatacattttacacggtcgaacaggtcctcgcaatgcaagtgccaaaattttaccaaattttataatggcattgcgagccagcaagtcgtatagtgttggagcaataagtctatgatcgcaatgcatggtcggcgcatttggctgctgaaaagagcatgtctatatattctctgaaacagactaactggagattagcagccaatatatatgcatggagaagaaaaaggttttgggttttgagaatattagaattcatgtcactttctggtgtgctgcactttcggcagaacagtcctgcatcaatcgtattctttgattggctcttcatttttgtttggatgcgaatcagcatgatcactcatcagtcatcacatattgttagtgtgtgtatgtaacaaatcttattatgtttgatcaaacgagagaaacatcatatttattatctaaaaaagataaaaacatcactatagtttgtcttgaaaattaaatacccttttgtttttaacaacagatctttttttgggcaggcaaacatgcaacatagagacaggttcattttgttatctgtatggaaccaataagctttaaagccttttacatcaccaatgcagtgattaattttcttatcattcttgttgtagtattgaacgggagaggtgtgttgtgccgcgcgctctctccctctcttgatttcgtgcgtatacttctcttctcacaagaaaaaaacatgttttgcacatcgacatggttttcaaagatgtatctgatcactaatttctactgtgaaatatttatgagccccaatccaaagattatgatattataaaattactttttcagcaaacatatatgcccctctgttctaataagcccttgtttagttttaaactttttctttaaactttaaacttttccatcacatcaaaactttcctacacacacaaactttcaacttttccgtcacatcgttccaatttcaaccaaactttcaattttagcgtgaactaaacacaccctaagaatcaatttctagctataaacagcttggatggacagtgtagaaacgatctgtttttttttaactttttggttctttttgaaaacttatttcataaataaacctctggataaaacttattctagaaatgaaccctttttgcgttgccgacatcatcggtatcgtggtccaatatgatggtgtcaacgacattgaccatgtcccgcgctcgaaactaagttattgatgtgaaaaagataccaatttgtaaataaaaattctgaaaatgaccctagtagtaataaaaaaatatttacacatagcacctcggcgccaatagcattggaccctttacatagctgaggtcttgttcggttaatccctcccacaagaggagggatttggaggggatttattccacacctattatggtgtggaattattcccccttaatccccattattccccctcttagggattaaacgaacaaagcctacttagatatcgtcgtgctgaaatacggcaccaatgacgagttgaattatggcaccaatggtgataatatcacgaaaatggtcatttttaaaataagtttttagtctatttataaaataagttttcaaaaagatctaaaatacgaaaattacagtagaaacgattgtcctgcattcaatctaaatacttgaaaataaaacactgatgttttagtgtttttatactttaactaaaaacatactttctctgttagaaaaaataacttcttgctatgtatttgaaagttgattttttcgggacggagggagaacagtacgtgatgtgcctcatgactaaggtcatgtttagttcacaccaaactttccccaaactcctaactttccatcacatcacatcacatccaaaatttttctactcacataaactctgaacttttttttcaaactaccaactttccctaaacttctctccaattttagaaacccaactttttttttaaactaacaactttccttaaatttctctccaatttcagaaactaatcacagcctaagtacatacgtggagctgtgaaaggacgaaggagatggctcaaacatcacagctttatacacatagccaaatgacaaggcagaggtagcaaacaaatcaatgagtccagagcaagttccctctttttctacgcacttttatcgttatctcggcactttctgctgttacaagtcccgaattcaaagcgtccagtcattgcagccaagctaggatgctcttcgtgttcaccggaccccacacatcgcgctcacgcactttcatttttctgactcatttttttgttcttttcctccgcatgttaggacaaaatgtagtttttccatgagggctttagcttttcatttctttttttaaaaaagaaacaaaatgtccttttagccctgttccctatgagtttaaaacttttcttttgaaatgcttcaggcgcttaaaatcttccatgtttccattcgttacatttcactattttacattaatcatggaaaaactttggtaagcagcaaaatacaatggctgaatagatgccaatgcaaaccgaaattgaggactggaggtctcatcagatggttcaagcatataggcgatgtgtaattgccaaacgagaaaaaaaaatttgaaaaccatcaggttccacatgatgcaatgcacatcactacaaaactgaaccataccttcaaaaggttaaagcagcaagtaacacatcaagaacatggtagaaatgaatggaatttagatggctctagtttattctccatcctaggctaatcacaaggaacccgcctttcttcacactatcatctcacctggggcccaaagattccaatggaaaacgaaaaaaaaaggtgaaattgtcagaaaagcatccccttaattacaatcttctcatctcatcaattctctcgtctctagaggagcactgcaacgcaatgatcagcaggtgtttgctcacatcacccgagaaacaaagtgcaactcagactcaaaagcgtagtataagcaatgcctctctgccttttgccttccaggtcacaacaacgccactcatttatcgacatttgggcggagattgcacaataaaacagtgcattttcaatcccactcctagtagtgcaacagtcgtcccaatgaacactcatcatcatcttacctttttctgttaaaaaggcaacaacagatttgggggtgaaaccatgacttgttcccctaacctcgccagctattttgcttcttggcctcaaaagtggctccatcgtttagcatatcttgtgcgtcagtttccatgccgagctttgagagagcaagggcttgtaggtagaaggcagttggccactcgggcatgcagacctgggcctgcattgcgtcccggagagcaagctctgactgcccattcatcaaataggagaaacttctccgggcaaaaactgtggctgaaggcactgacatcattccaacaagctgcatcatggcaaatgagcttgtcataccatagggcagaagatattcataacgctcactatatataagtcacataaggaccacataaggctactagtggctagtagcactcgagctaacgggctgagggccaaactgtttcagaaagttgaactttttgaccagttagggtcctttcctattataaagctccaaaacaacttgtgtcaaacaaacaatcgtgaagcaaaatgtcaacattgcaaaggtacggtagcatagcctaggtaagagaaaacaatgataccttggagtagtagtcaattgcagtcttgaaatccttgtctctaaatgcaatgtcaccaaacttcttggtattcagcatctcttgcacttgctgagtccattcttgaaaggacagcttcagtttttacatcaccataaacatgcacaaaataaaactagcttatcttaacaaaccaaatgaatgtgactccataatttctgaaatatttcagcaagtggggacagcaagagaagagctaaggtacataaaatgaggttagcttttgaaattataaacaagcatgaatgtggtggttggtgaatgcaagtaatctctcttcatagcaagaaaatagatcatgatgcacaatccatgttttctagggcatttcaagaatgagtaaattcagtgtgtgatatagctcagatgcatcatagactaggaaaacaaatgcaacaactttacagcaagatagttacctcattttctgcaccttcttcatctttgtaacctgttttgagcaatatatcatgtactgctgtaaggtccataccggaacaggccttcccaaggggagaaagaatagttggcaacaccgccgtggcttttgtaatacccatcaacacatgtgatgctacctagaatgattgatataagaaataaatggtgttaccaaatgcaatgaaaaacattagcagccgacaaaaggctgtcaagttatttacctccttttgcttctgaagaggcccaacagaagacaagagatactttatattgggtctgtccctcgcttcaaattgcaagcatttcgacgcaaggtcaactagttttgaagcatcttcattagcatactgcccttctaaggaggaatccatgagcaacagtatattcttccctcttatcaaatcaagtgcctggaattccatacaaatcaagtgagaaacctactgacataaacattgatagttgacaataaaatatccttggcataaattcactattccgcagtcatgctctatcagatgcacggcatcctaggaataagttcattgtcacatattctactagaagtctatggtctgttatttgagacaagaggccactgtctgttatacaaatttagtggacatcagtaggttaaaggttaaggttcaaatccgattgcagtccataacactttttatcagttgtcaatgtgacattaaatacagatgcagtgttatccaggatatgagagtaatgataaggagaagcgctgatatatatatttcttgagaaaagtaaggatttaaacgaagcatacatggctaggaggtatgtgcttcccactcaaaagatccaaaagaactgttccatagctatatatcacactctcggcgatgactctgcctgtcatacaagtgtcatgcacaaattgttcggtgcagtcaaacaatgttagtacttgggagtaaatatatagcaagcttgaaataagttgacatgtttcatttttgctggaaaacatcaatagagtaaggtgcccatgagtgcggtaataaggatcatgtgtaaattcctaccagttcgtagaaactcaggcggggtgtaagccagattagtgctataacttttcccatcgcggctgttcttcattagtccaaaacttgacagccgaggatcaccttcctgatagaataaatcatgccaaagttagaattctctcggtagttacagacatcagcaaagcttcagaaagtagtaaattttgatcagaaagcatccgagttcacaggaggaaggaagtgaaaagcaatgcaaaatcagcagaaacaaaaggtgttttgagtggaatgtactagcagcaacaaacatacctcatcaaaaagtactctataagcattcaagtcatgatagatttttcggttctcggcattgcagtgatcgagtgcctgcgcaatgtaatacgcaacccttaaccgcatttcccatggcaagggctgcttatcccctgcagaaaaaaggtagatcgcccttgagtcaaacaagaaagaaaacaaaagggggaagtaatgtggcgagccaggttgtccgggcaagcaacatccatccacataagtagcaagtgctagtagcatttggcatgaagagcacacacaagtcaaatgtagtaatggtgagaggtgttccattaatgcagacgagattcgtggtttgatctacggatcatcaccaagtacgtcacccaagtagttactcctagtagtggacatggatacggaaatggcgaaatgaagaggaagagggtatggtagtagagtacagtggaagagatgcttggaaagggtgtcgttgggcatgtactcggcgacgagcagcctctcgtcgccctcggcgcagcatccgatgaggttgacgaggcgcttgtggcgcaccttccccaccccggccgcctccgcctgcaatgcaatgcaaccacaagagaaaagcagtaatagtgaggaggatgggtggcattgcgagatccggagagagagagaggcgaggagaggtacgaggaactgctgcgggtcgggccaggagaggcgggagaagcgcttgacggcgatgaggcggccgccgtcgaggcggccgcggtagacgacgttgggggccttctcgccgctctcggagacgatgaggtcggcgctgaagcccttggtggcggcgcgcagctcggcgaggccgaactccctgaacaccgggaccgcgcgcttggcggcgtccttgtcgtcgccgccgccgtcggccgccgcggagtcagcgccgccattcgcggccgccgcctctacaacaaccaagcaataggagtagattagattaggaagcaagagcggtggtggtgtggggatggggggttagggtttaggagggcggcaatggcggcggtggggcttaccgggatctgcggggttgtcggcggggagcgcggcggcgtcgttgggcgggaggggacccgcccccgccggcttggacaggaagcaccccattggaggcgcgacgcgaggtggtgagatctagggcgaggcggtgggaacgcgaatgcgagagaatatttggggcggggggaatggcggcgagtgtgtagtagggaagcagtgaagcgaagtggggaggcgaggcgaggcgaggaaggcgaaggggggcagggccgatagaagcggccgcacagaagcagatgatgtggtggggagatccggccggttggtgcgcccgcaacacccagacccagtcacccagagcacccaccccacccacgctctctctctctctctaagttttttaaatctcattttcgaagggaatcaaatttctttgctccaaccaagtggagtggactaagagaaagtttaatagaatagccaactactagcttcaattcatctataaccaatctaatagtttactcatacaatagttacatactacactattaatatctggtcccatatgccatatacacactgcgtcttagagtccgtactgcagctagctacaaatctgtagcccgctgccattctctctcctcatttatctccttaaaatatgtttgcagctggcttatagcctgctattgtaccttagcccgctgccattctctctcctcatttatctccttaaaatatgtttgcagctggcttatagcctgctattgtacctgctctaaggctgtgttcgagcgcaggagaaagcgagaaagattgtttcgctttccgcgcgcacgcttcccgaactattaaacagtgtgttttttgcaaaaaaatttctataggaaagttgctttaaaaaatcatattaatccatttttgaagtttaaaataattaatactcaattaatcatgtgctaatagctcacctcgttttgcgtatcttcccaatctcctcaatccccttctcctcaaatacaccctaagactatgtttagattaagggcaaaaatttttggcgtgtcacatcggatatatgggcatatatttaaagtattaaacgtagtctaataataaaacaaattacattgtcaaatgtttattaaattgcgagacaaatttattaaacttaattaatccttcattaacaaatgtttactgaaacaccacattgtcaaatcattgagcaattagaattaaaagattcatctcacaatttacacacaatctgtgtaattagttttttatatttaatatttcatacatatatgaaacattcgatgtgataaggtgaaaaaacttaccaggagatctaaacaccttaatacttgtactactgtaaaaattattatagaaccttttttttaagagataagcatagaagtactactatctctatttagatcagaatatgtcgttcaaaaaaatatttatatcagaatacaggtctcctttgcagtgaaggtaacttcacacacaaaagaaaaacagaggggattgaaatggttcttttgaaattcctgtaaaatttctatgttccaaatgagtcattgatgtttttatcttagtttgttcatggcatcgtatctatttttctgtatcgggtgatttttcttcagctggcttggtaatatttacatcaaagtataggtcttcctttgcagcgaaggtaaataacacaacccaaaacaaaaacaaaagaagaaggagagggggattgaaatgtttcttatggaattcatgtagtaatatttgtgtttcatgcgagacattaacattctatgggcctgtttggatccggagggctatttaatagccctccgaaattttgttatttatgagtattaaacgtagattactgacaaaacccattccataaccccttggctattttgcgagatgaatctaacgaggtatattaatccatgatttgctacagtgatgctacagtaatcattcgctaatcatgaattaatatacctcattagattcgtctcgaaaatagcctagaggttatggaataggttttgtcagtaatctacgtttaatacttataaatagcaagattctagagggatatttaataccgggaagaatccaaacaagacctatatgtaagtttgttcgtagcatcatatctatttctgcgtgtcagattacttttcttcaacttcaaaacttgtttagcactcttgtactccccaaactaaacagtgtcattgttcttatttgggggagtgaaatcgacaatgtaccaattggtcaatgataatgtatgtctggacagaattggttccatggacaatgatgaggtcaaacatttttgctcacacaaagtctcaaaagtacacactttgacatgaaaaatgctgcctttttgcgttgagtgggattcagattccacattctatatccctttgcatcatccactgaacagattgctcatttgccacttccatggtcttgtttatgatacagcgtgaagttcgtcgatcaagtggccatagtggagaataccacgagtttaattcaggcaacgctgctattagtattactatgtactccatccgtctcaaaacaatcaaacatatgatatcctaatactacgaatctattaaaaattttagtactataatactccctccatctatttttgatagtcatatttccaaatctaaaaaatttatttttgataggcatatttcaattcaacaacctatcatcttaatgatttttttggatttaatgcatgactctccattcttccacacaagattggctatatgggtattgagaaatgtaaacattaatgaatcgcttatttacgaggaataactagtagcatatttaaatggatgataagtagaattacttatccttggtctatttaccaagataaaatatgactatcaaaagtagatggagggagtatatcatactaactagtaataggcttatttattttgaaatggatatattacgtatcggaagaaaagaatatagttattgcggacattatggaagaacagcctcccctgtcgtgttatattgccatttattactctacgatactccctccatctatcagtcatatttctaaatttaagaaatttatttttgataggcatatttcaatctaacaacctatcttcttgatgattttctcggatttaatgtgtgactctccattcttccacacaagattggctatatgggcatcgagaaatgtaagtattaatgaatcgcttgtttacgaggaatggctagtagcatgtttaaatagatgataagtagaattacttatctttggtctgtgtgcctccctctctccctatctccggtatacagtagtagtaactgtaaatttgctcacgacgcacggcccctatcagggtttcctaaaccattgggaccggggttatcgcgcagtaactatgaaaaaccgtacaaaatttatcaaaaacttaaattattttttaaatttatttgaatttaaagaagttatcgcggtatttatattaccgtacctcgcaataaatccagtaaccacggtaaccgcgcggttaccggcggtaagggaaactctgcccctactacgtctacacccgcgcccaggctgagataaacaaaaagaaagtcgcatgttcgcaggcacgacacgtgggcttgccggcgatcctccttttgctgggccccacatgtcaggacgacgtgacaccaccaggccgggacccgcgccctgacacccccacaccccaagtcaactcgctgtctcacaggcagactcccctcctctcgtgcgctgtctccaccaccaagagctagtgtcactcacactgacagcactgcgcctcgctggctttgagattttgatttgcatctcctcctatcctcggtttgtttgttgggtttaagtacgggagctcatgccccacatgcttcatctgctgatcctttcggctgagttcgggagccgcctgaaaacaatgttacctattaatacgtgattaattaaatattgatttaaaaacttaaaatatgaattgatataattttttaaaacaactttcttatgaaaaaaattgtaaaaagacgtgctgttatttactccatacgtcccagaaaaactcaacttctagagtttgaattttgtccaaaaaaacaaatttctacactcctatctaccctcaacacgtaaaacgagaaattttattccttcaataccctttaccaacctatcactcttactacttttttttaataattaagaacattttagttattcttgattcctactaattttatctaggaatgctaggaattgactctctgtgggacggagaaagtaatagttaaaaaatgtgagaaaagggaagaacacaccgtcttggtcccgcctctactctacccaaacccaaatggagtattcctacacagcacagtgtagtacacaccttgttttgattgatggagtactactagctaagctaggacactagtactactccgataccgttatcacgtaggcctagtgcgcctaattaactttgattttagtactagcatgaagatagtgctagcgctgttttttgttttgtttttttgcctttgggaaaacatggttgcagtggatcctatgtgaactgaagctagaggtagcagtggttcagggctcatgacttgttccggcagaaggtgggcccagttagctgggcctgggacaccacatacatatgagatcatgatgccattgttatcaccagctcgatagtactatggcccatcagactatcatggattcatttcatggtgcagccaaggacatcaaccatgatgcacgagagaacacctctactctgctcttcaccaggaaaaagggcagcgagcgaaccctcgtgctaacccaaacttaacactccattaccatctgcttattctcataattcctaaagtaatacttactgactccccggtcccaaaatataagagattttaaagaaatgtgatatattctactactatggatttggacaggctctatgcattcataatacagtcaaaaccccttatattataggaggaagggagtaattaagagtaaaactgacgaaatgttcagtccaattggaaccatgtgaaaattaatatagattatcttattcaattccagagcctacaagtaaaatcaacataacatataataatccaaacttgttccccgtaaaagttactcgtaatttagcacatcaagtaacaaacaaaatttgaacaggtacatccctgtgacggtatgacggtcaggctcattagccctggactttcctcacttgaatgtggtgagtagactcctctctccagatcgacttcactccactctgaacaagggtcacgtagtccccttctttcacgaattgggcgttctgtcaaacattcaaaaccacggttcataagagaaacacaggagtactttgtaaaaggactgaaaaatgatgtcaataatatcaactgtgtcggcagcgtgaagtacatacgcttaccagcaagctactaattgctctagagaaagttccctctgcatcatcagaaaacttcatgtaaatgggaaccacaccctggtagagtgccagacgttgcttcactcgttccctgcaacaacagtttcctcataatggtcagtcctccagagcatctttttcaacttttatcatttatttatttagaatgtttacaaaattgatttactaaaatgaaaacactagggaaaaaagatttggcattgcatgtaggtagaaatccaaaaaaaacttactcatttgtaaatgcaaaaattgtagacgagggccggtagtggctgagaaggactgccatggagccggttcgtgtaaacacaataattggggtgcaaagggtgttcgccatcattgtagcatgagatccaaacattttgcttagttggctttgcgaaaattcctcgttgagcagagcctaccaaaagaatcatgagaaaataaggtgctaaaattcaggtaacaaacttaagaaaggaacttgatgtctaagagcaggtgcaatagcatactacaagccagctataaacatatttcgaggagataaaagaggagagagaagagcaccgggctacaaatttgtagccagctgcagcacggactccaaaatacatatatgtatgacaggtaggaccaaatattaattgtgtagtatatgtttataggtaactattgtatggattgctattaagttgactataaatgatttggagccagcagttggctatactattaaacttgctctaagcaatgaacatcgaacaatgcaaaagctaccatatggtaaatttaaagttgtgggaataagagatatacctgaggatgtgcaacaagactaggagatgtagttgggttatacaggctggattctgttctctgtgccactgtgtgcatcaccttgactgccttcagtgggaacctaaacacagtaagatgcacaatcaaggtaagtctaattggaaagcagaattctatgcacccacagcaagagcttaaagaaataaatttcttggatgcacatggaggaacataaacaaaaagtaacctgtgtcaggttgaaatcttactttccatgggcagtttcaccagacagcatgatggcatcagaaccttcacgaactgcaattgctatatcagaaacttctgctcttgttggagtgggatggtctatcatgctctctaacatattcgtggcaacaataactggtttctgcatgcttcggcatgttctgacaatctcctcctggagaagtaaaacacatgtgatttaaatgttgttagtgctttattcatttgttgcattttaggcgtgctaataaacaaataaaagggatgtagagagtgaggggggaacaaacacatgttttcttgcactagtaaaattatctacaaatttaaactaacctgcagcaaaggaacttcctcaattggaagttcagcaccaagatcccctcttgccaccatcgcctacaaacattttcagagattcagtatctagcactaagcagttacgaaattgtaaaacattcaaggacaaacgaaaccagaaatagaacaaaagaaaacaaggtaacaacgaattaagtgtttgaatttccacgaaagcttaccaaacacacattgcttggctcccattatcatgataactatctaaaggcaaatatatgctgaaaagagatgccacttgccaagatgtttttaatacaaactggttgaaacaaccaatgtccatggtcttacttaccccatctgaagcagcaataatggactggaggtttggtattgaatctgcactttcaatctttggaatgacatgtatatctgcattagcacctggatttggaaaagaacacagaacacaggagattaatcaagttccggatatagatattagaaattccatgtgtgccagagaaaatggttacttttaaggtagtccttcagttcatgaataacttttgcatccttcacaaaggaaacggcatagaaatcaacaccattttcaacaccaaactttatgtcctcccaatctttttctgttaaagcagaaggatgtcagcatcttgtgcataactatctagaggttgaacatgttatggagaaatcaaccgacctgtaatagatggcaaagtcgcactctttccacggacatttaggtggcgccttcctgttcagttccccaccatcaactacttcacacttaaccgtatcagctgttttagacttgacagcgagggggtgcag

SEQ ID NO: 7071 - DNA, 5643 bp, Oryza sativa
gcgccggagcgcggagtgtggaggagcgccggcgcgcgaagtgaggaggcttctggcactatcacggcggctgctccgtcctagccctctcaccgccgccggcctcgcctgccgccgtcgtcgttgacacatgagatgagagataggagagctgatatgtgggcccaaggacatttttgatattcacacgatttctctctcctcttcaaccggaaattattattttaatgggtgcggtgtccaccagcaaatatcctttttcccccaaaagtcatttcgtgtcgtacgctacagctaaaaccgtgaagtcacggtgtcctgtagcaaaattttcctagtagtattatgtatggatgtttggttgtatttaatacctcctccgtttctcctccgtttcatattataagttgtttgacttttctcctagtcaaacttggttaaatttgatttaagtttatagaaaaatttagcaacatctaaaatattaaattagttttattaaatctcacattgaatatatttttgataatatgtttgttttgtgttgaaaatactaatatatttttctataaacttagtcaaaagtttgactaggaaaaattcaaacgacttataatataaaacagagggagtatttttattttcatttttttccttttagattaagatgccaatgtgtaagatagtagaaattaagatagtgtttgaccattgcatacgcacacgtatgaatgcataatgtacgtatacgagtactctagctaataaatttggccttcactattgcttactctagctcatatatttgaccttcagtattgctttgctcacgagtgttccacctacgacctaacgaccttgaacaaagtgtgaacgcctatatatgatgattaatctttgggatattatgcatcagctactttcagcagcttattctttacttcagactattatttactcccaataacgttttaaggaatatattttcaaaacaaatattctattgacttaagctatttgttaggtttgttttcatttacagttacagacaagtagatattttttgatgtttaataatcctgctgaataatctaaattaattaacaatacatatgttgtttggaacgaaatcgaggagaggacaggacactacccaacagcagatccacctcccaaacagatcaggcggtcacctggactccgtcattgccatcacttttataccgaatagctacctataaaaaaaataatcgattattaattcctccgtcccaaaataagtgtagttttgcactattcactttcaacgtttgaccgttcgtcttatttgaaatttttttatgattagtatttttattgctattagacgataaaacatgaatagtactttatgtgtgactaaatattttcaattttttcacaaaatttttaaataagacggacggtcaaacgttaggcacgaatatccacggctgcacttattttaggacggatatagtattagtcgtccagatttaatggtgatgttggctctgtcacttacacttacctagtacaccctgtgtgtgtgagagagagagagagggggggggggggggcgtgcaactgcaacggcatgcgtgtgcatggctctgcgccgcgttggatcgaatcggatcctaagctagctaggcagaagcttcctgatcttgacggatcaattagcctaggtaaaagcaaggataataataaagtcagctgcttacttatagcctatctatcagctcactcatataatggttaattctttactataaatatatgatctatatgtctgtctcatagatttttttagtttctgtgcctaagccggctgtaaacttacagcccgcttctcatctctctcctcttttctatacttgctctaagtcaggccgcccacgccttcttcactgcatgccgatcgatgccgtccatcatatccatccatcgggcttaattttggtcgaaggtgcagattaaggctgtgttaatctgtgtttagatccaaaagttgaatccaaacttatgtttaaattcaaaagttaaatctaaacttagtacttttctatcgtatcaatctgtcatacacaaataatttttcagtcacatcattctcaatttcaaccaaaatttaaactttacgctgaagtaaacacaacctaattatccactcgccgaccctagctagctactcactcgcgcgaggtgtactacgtacgtacagcctacatggagtagccagctagtaactcataaatacatactgtacgtgcataatcatacatactccctccgtcccaaaaaagacaaacactggtttccgtgtctaacatttgactgtccgtcttatttgaaaaaaatataaaaaaaataaaaagataaatcacgcataaagtattaattatgttttatcatctaacaacaatgaaaatattaattataaaaaaatttcatataagacggacagtcaaatgttggcacggaaacacagggtttgcttttttttttacggagggagtacttgtatatggccgagtttggatctaaagtttttcttcaaactttcaacttttccatcacattaaaacttccctacacacataaaattttaactttttcatcatatcgttttaattttaaccaaacttctaattttggcgtgaactaaccacacccgtagctatatgtgtatgttagcatgtatacaaatataaaatcgaatgttgtgttctaggctttctagccagcttactagcagctagatatgtaggagtatacgtcatcctatacatacgtactccggtatatatatatatatatatatatatatatttatagtaaaaaggatatagaaaaaattgttcaaagattagaggatatccaaattataggagaaattcctatgaaatattgggagaaaaatgctatcgagtgtaaaattaatataataaacccagaatatattattaagaccagcccaatagaagcaactccgaaagatatagaagaatttaagatgcatatagaagaactgctgaaactaggagcaataagagagagtagaagtccacataggtctgcagcatttatttgggcgtggaagaagaaaaaaacgaagatttcagaagactactcaaggaggaatccagaagaaggaatccagaaggacaccctataagcataaaggaacaatatagggtgcggtgaatgacatatcactgtgaagagtaaaactttcggtggaaaggcctcgactttagccagctcccgtgaagatacagtagcgaagagataagcaggaggcacaggcgacgccatccctggcctctataaaaggagacgttggccttcactccggagacacacaacaacaacaacgaagacaccattcagagcaaagcttccaagcgcgctctcaccctccattccaccgttcttagtagtagtgactttagcctaccttgcatagtatattgaagcaaggagttgtgtaataacgctgtgtaaggtaagaacagcttgcttgtacctaccttcgggtttcccgaaagggaaaaccgtatgtaagcttatctgtttaatatgaagtaattttccttaagtattcctgcacgtttgttctagacaagtgtttatgctaaggaccctataggagaaacctcttcggtttgttctcgtttttagcctgcatcttgcataggcgtctggagaattggtatccgaagagaagtgttccctttgggtggaactgcctggggagacgataaactcttagctagaacaagtgtgacttggaatatcttgttaagttgcttctaaaaagatagataggtgaggcatacggtgagtaccgagtaggactttacatcatccgaagcaagcttctgaggctgtctaaataggattcgccaccctgcaaagatcctaaagttaaaatatctctcgaagtgaacagtattgaacagtaatttaaacagtaaactgaatagtgtttttgaatagtaatcagccgaataaacagtaaactgaatagtattcagccgaataaatagtgttttgaacagtgtatattgtctgaagcataggtttgtctgaagcataggtgtggtgtatattgtctgaagcataagtgtggtatcagagcctggtaatcatagagaagctaaatttagaagctaatattggaaagttaataaataccaaagataatatcgacataaggtgtagactaagccatactgaagaacatagttggcactctaataatagccaactaaatttaattgtagatttaatatataatttctatataaattggagtaagagacaagaagatttagagcaaaagttagaagatatatataaagaacaaaagcaatttgtagaacaatattcttttcttaataataagctaaatactacattagaattattagaagattataagataaggcaaaataaaatttcacagaatagtgattatattaaagaattactagacaaaatcaactctagtaaaggtaaggaaatagttttggcttcatctggcatagtctcatcttcacaagccattaattctgaaaaatggacatatctaggagtctctttagaagaatagcaagcagagatgataactgttctgataaacaaaaaggcaaatatgatgacatagatgagctgaaagatgttgcacaagtagataagcagctcgaaagatatcaacgagatactttaagggcaataaggcctcaacaagtatactgcatgggattttttgagaataagaatgggctttatagaatatctagagaagtagaattaagtgttctaacaaagccagtagaattaaaaatagtagctaaagaatttgaaaatagtttaaaatattcaggatataagtatattcaccaaggtatgtacataataggaatcaaaggaatgacaagaaagaaattaggagctaaagtgctaataaccttattagataaaagatgggacacaataaacaaagcatctttaggctatctagaaggagatatgaatgaaaatatgttgataacctatatagcgcctgatttaatgatgcctgtaaatgaattcatagataaaatgagttttggtttccaaacaaaaggatacgaagagtttaagggaacaaatttattaataagtatagaatttataggaagattgactaatagaagtgcctccaaatacaaaatcaatgtaaatgatgtgatagaaaaaatgcattctaaaggaataaaattcatgagccctttaataatagactctgaagaaagagcaggagaaaaatggccaattagtgaatttataaaaaataaaaccttgagtcagcctgaaaacttcataagttaccaagacagcaaagggaatgttagtattagatttacaaattataaaaccagagcttcggatgatttggatgcagaatcatctgacagagatattatagataacagaagacatagtatatctgaattgatggaaaaattagaccatgaaagtgaaataaaatattatgaagataaattaagagatatagcagatgaatataataactctatgaaaagtgagtggcctaaaattagagacaaggaa

SEQ ID NO: 7072 - DNA, 21048 bp, Oryza sativa
aattgatggatcagttaaattgtgaacatgattggattagaggaaaaggagattataacattaaatgtgctttttgcatctattacccaagccaagataatagagtaacctgtagtatatgcttaaaacaagcttgtgctgaatgtataaaagcaaataaacaaaaatggagaaaagagatagaattagaatcagatgaaaggatattatctagtagagtacgagttttagaaaacagaataaataaactagaagtggaactagagaatctaaaaattaactatgatattaaggcattaccagaaaataaggatatacaaaataccgaatttaaagagcaagtgataacattaaaagacagtaatactgctaaaataattcaactaaaagatgccataactaattttggaaataaatatatagtaaaactgcctttcaaagaaattttgggaataagaataccggtaaaagtaaaactatcacccaaggtatcatataaaattctagcactagtagacactgggtgtacaaaaaatattattcatgataagtacttcataaaatgtccagaaatagttcatacaattgatgataataaggcagaagtctctacagacatgtccggaataaagaaaattcataatcagctagctcataatgttgaagtatacattaatggaactaaatatataatagatgagattacaataagaaacttatccatgataagtgatgacatgataattggcctaaggtttttacaacaatcggtacaaaccacagtaatacatgagcaaggaattacttttatcccatatcaaaacaatgtgccatatatctcagaggtacgaaagcgtggtggagccagaatcaaacccgacaaccttgaagcacttaatcttgagtctgaagaaagaattaatgaatatgagcttagtgagaatatagacaactattctttctcatcatatcttccaaaatctatggaattgccaggtaagacatcatgggaagatagatatttattaaaagctactaaagattttgaatatatatgcagggaaatggcttcacagaagtctgaatggctcacaaatatgagttcatggagactgccccaactgcctagaggccatggagaacgatttaatcacaatttcagaataacagagctacaacaagggttattaaacctcttgtggcaaacaaaaaacaaaaaagaaaaagctcatgccttaaatggcctggcatattatttcaaaaatttcgtgccctcagatcaaaagataacagaaaaaagggctaaaatacaagatatccctcatcatgaggaaaggttactagattatcgcgaggagaaatcccgtgatggccaagataaacttcccatggaagttgaacaatctatggcaacagataagaataccaaggtattctcagataagattttgatctcagcagatcctgcttcgagcatggttgctttccacataaatatcaataacctattgcaatcttttccacataataaaccatcatcatccacaaaaaggcatgataccattccccaaacaccatacatactgcataatcatcctaatttattccttccacaatatatactccggacccagccaaaagcaccatgtagatcttgtgcctacaaagattcttgcaaaaagaaacttaaaagccaaaatcccatgagtactacatacgaaaatctccaacccagattaagcttcaaaacggaacaaactttatcctgctttgggcaagacatcctcgatcttgtttggcaaaagtttaaggagagacaaatgaaaatattccttggactccaagattatttctttgatctcttagaagggagagaaagaaacccagccatacgagtaatcatatatatgctccctctcttaagactagatgatcaggcaatttctgacccatcctatagattcctggttctcaaagctgagataaatcttcaaagattccggaacctacccacatacaaccatgaagaaatatctctccaaaccattatagatcatggtcttgtgaattccatatatgcaaccctcgatcagatccttcatctgatttaggaaacgctgtgaaagatgtatgcaggagacttggacatggaagatacaggattatcttctcctcaataccaccaaaattcacaccacctgttcgtccagcaattcattatatatatatcatgaagggacaatttaattttcaagaagacggtcctagcaaactatcggatgaagaggaagaaatatatacaacagttgctaatcatgaaaattggagattattttctgaagctgcagaaattgaagaagctatcaccacagattatgaatatcagctggttttccaaaacaagatcacaaggatttttatcagcaaattctacaaccaaagttatgaatacttcaagggagcagggcgcataattaaaccggattttggaaatgaatgctccaagaaaagttactacagaagcctggctcagtggtttcagaaaacagagccatcagagattgacacggtgcaatcagcaccaatgataatcaacgaagataatgaataaagatcttgtcatccccgacaaagatcactattcaagataaggaatctacactattccagataagtatggatcttggtggtcatgggcagccagatgaatagaattctttaagctaaatatgtttttcaatatatattgataatagaatatcaataatttgggcgtggaagaagaaaaaaaacgaagatttcagaagactactcaaggaggaatccagaagaaggaatccagaaggacaccctataagcataaaggaacaatatagggtgcggtgaatgacatatcactgtgaagagtaaaactttcggtgaaaaggcctcgactttagccagctcccgtgaagatacagtagcgaagagataagcaggaggcacaggcgacgccatccctggcctctataaaaggagacgttggccttcactccggagacacacaacaacaacgaagacaccattcagagcaaagcttccaagcgcgctctcaccctccattccaccgttcttagtagtagtgactttagcctaccttgcatagtatattgaagcaaggagttgtgtaataacgctgtgtaaggtaagaacagcttgcttgtacctaccttcgggtttcccgaaagggaaaaccgtatgtaagcttatctgtttaatatgaagtaattttccttaagtattcctgcacgtttgttctagacaagtgtttatgctaaggaccctataggagaaacctcttcggtttgttctcgtttttagcctgcatcttgcataggcgtctggagaatcggtatccgtagagaagtgttccctttgggtggaactgcctggggagacgataaactcttagctagaacaagtgtgacttggaatatcttgttaagttgcttctaaaaagatagataggtgaggcatacggtgagtaccgagtaggactttacatcatccgaagcaagcttctaaggctgtctaaataggattcgccaccctgcaaagatcctaaagttaaaatatctctcgaagtgaacagtaatttaaacagtaaactgaatagtgtttttgaatagtaatcagccgaataaacagtaaactgaatagtattcagccgaataaatagtgttttgaacagtgtatattgtctgaagcatatatatatatatatatatatatatatatatatatatatatatatatatatatatttatttatttatttatttatttatttatatataggacactcatatggggcaccatggtatctaatgcacaaaatcactcaaattttttaaaatttttaaattgtgagtatataactagttataataatttgattcatacctatacttatcaacaaaacaactcaaatttaactttatttcacaatccatgattacatacctaactaattatatgtatggatgctatatacctagaatcaaaatctaacaaaaataagttcaaattcagttcaaacttgctttaaactagttagtaaagtagttaatgttaatacctaagtaattgaaaaagtttcatactcatttgaattgggtatatactcaatttcaataatggtgcccgggcaccatggagcaccaaacaaatttatatatatatatatatatatatgtatatatatacatgtatacatgtatatatgtatatacatgtatatatatgtatacatgtataaatgtgtgtgtgtgtgtgtgtgacgcgaacaataaatctgacctttcgaggcagctatacatagccatatagcaatgactcatatacgcatgcatggattcaattcatggcacgcttccacactttgagctaggttagttatacaccaagtgcatttgtcaccggaagtattttggttgcgtttagatccaaagtttggatccaaacttcagtccttttccatcacatcaacctgtcatacacatacaatttttcagttacattatctccaatttcaaccaaaatccaaactttagatccaactaaacacagcctttgtacgggacgaattaatagtagcttcattgattagattacttgtggtagaacctatatatttaggttcaattattacttgtggtaggcgaccacgatggcggccttgggcgtgccaccgccccaccccccccccacacgtgcctgagggtccagcccactgggtgacaacgacacagcggcggcggcgacatgggaagcagccgggccgccattgtcctcgggggtgggaggggagggagatcgaagggtaagacgagatggccgctgcctacctctccgccacggctgccgcctacataccaagttgagtgtgtgtgtctatatatatatatatatatatatatatatatatatatatatatatatatatatatatggggcaccatggtgcccgggcacatggtatctaatgcacaaaatcactcaaatttttcaaaatttttaaattgtgagtatatacctagttataataatttgattcatacctatacttatcaacaaaacaactcaaatctaactttatttcacaatccatgattacatacctaactaattatatgtatggatgctatatacctagaatcaaaatctaacaaaaacaagttcaaattcagttcgaacttgctttaaactagttagtaaagtagttaatgttaatacctaagtaattgaaaaagtttcatactcatttgaattgggtatatactcaatttcaacaatggtgcccaggcaccatggagcaccaaacaaatttactatatatatatatatatatatatatatatacacacacacacaaagtgcatttgtcattggaagtatttttacaaggcgagcttgatttgattaggttaattgtggtagaacctataacctgggttcaattattaaacttcacacggttgtttatatttatagctaactatttttttaatgacaggtcagtgcatgtcgataggtagagatacatgctttgattttgtcaattttaaaatatgtatatgtgtttatatgggtgagtgtgcatatatacagtacacaaaagtgtttacatttggacgtagcatgttattataacaccagtataataccagtgttgaagtagtaatcatacagtaagagtattgattagtagtagtactactagtatcaattggtagtagtaggagactagggctctgttcgttctggggaggtaggggagattgtttctcttttttcgcgtgcacggttttcaaactactaaacggtgtgttttttgtaaaaaaattttatagaaaagttgctttaaaaaattatattaatccatttttaaaatttaaaatagttaatactcaattaatcatgagctaatggctcacctcgttttgcgtatctccccttctcctcaaacaaacactaggggtgcgtttgaggagaaggggattgaggagattgggaagatacgcaaaacgaggtggtgtgtttgaggagaaggggattgaggagattgggaagatacgcaaaacgaggtgagccattaattcatgattaattgagtattaactattttaaatttcaaaaatagaataatatgtttttttaagcaacttttatatagaaagtttttgcaaaaaatacaccgtttagtagtttgaaaagcgtgcgcgcgaaaaacgagacacaatctcctctgtctccccgaacgaacagagcctaggagtacatgatattgcagtcgcgtgcacgcagcttttaagcagcggcaaccgaagtactccaccgccccatcaaatatctcgtgggagagtgcatcacaaccggccacgtgtcataccacctcgagatctccatcgcaattcctagcttgtcaaacacgtagagctatcccccaccctgtcctgtccccccttctactactagcagtattttacgcggattaccaagctactcagtcagtcagcctgtctgatcacactcagaccagtcttttgcaactgcagctgacatgtgggcccacgcgcactgtggggccacactatcatcgagagagtacggctcgggagctgtacgtacgtgtttatattatgcacttcgtcctaaatcagtcgtcgttttcactttctccatgtaacatttaaccatttattttatttaaaaaatagtacaaatataaaaaaataaattatatctaaaatacttttaataataaaaaagttataaataaaataaataataattttttaatcttttgactaatatgaatgaatggttaaacgttataaattaaaaactcaagacgaaaagtattttgagacggagatattatatgttgaatattagtagtattaccgtagtagtagtactaatatacttcttcgtcccaaaaaaataaatctatagctggatgtgacatattatagcataattaatgaatgtggatagaggtatgtctagattcttaataaaaggatgtattacatcctccagtactaggttgtttttttatgggacggaaggagtactctattaatcgaaagtgtcgcgtctaaagaaaagcacttcactatttgctaaatgaggtatgtcgtgcgcgagagaaaagcatcggatttctacaaacttttcgccatagatatgcatgagataaacaatgaattcgtgattgtttagtactagtaagaaagaagagaaaaaggaaaaagatgaatgcgatggagtgtgctttggaaggataggatggcgacgaaagatgccttctccttgttgcaacatcgatcgatcagggtatagctagcttaattagatagatgtggcagtaaagtctcactagatagatagatagacacacgttcaccgatcgagtagtagtttcgtgtcacgtgtaccgtttcacgtgacatggaatcactttcaccaagctaccaacactttaatttgtttcttttttattttgggaaacactttaatttgttcatgcgtgcatgcatatatgccttcttacatatgcgtacttacgtcgtcggtctgttcggttcagaccgatgtacactccgtctcctaaaagatcattcataacatcccaagatgaaagaaaataatcaaaataccctttaattactatatattgaaagaaaaaaaagtaattgtaatatgtaggtaaagagtattgaatagataaaacttctcgtttattcccgcgtctgtactatgtttttttaacgatggaatcacattattttctgtaagattaatcacattgctaatttgtaagaatgagatatatactagggcaatttttaacgatcacgttcaatcgatccgtccatgcacatatacgcatgcatcagtaactaattgaatgcatgtcacaccagtttgtttcgtacgtatacgtatgtatgtggcttcgtatacatagacgtgtagagggatcgatacacgtatatatagctagcttctaggtccaactaatcaagtacgtacgtacgtactcgatgacaccaacatttgtttgaccttaaacattcaccacaaattaatgtctacgtatgtacgtacgtacgtatttatgtggaccatgtataaacgataaatcaatcacatcgcgcgcgcatgcatgaactacaggaaaaagattaacactagtattacgatcgagctagctagcaagagaacaaattaaaaatcgtctcgtgtcacgcacaacaagacaagttaattggtacgcaaacgtttgcttttgattttccttcgccatccatcgagagatgatcgttcgttcgtcaacttttaattgctgtccattattacgtatcgtgttgaaaaaaagagtttacatggactaattaaatacttaatctctctaagtgcctccagaaatttaaccaaattaactaaaatcaatatatatactaagctggtgtccttttcttctgaagatgaagataatgaagaagttttttacgtaaaacgaagtggtattaacgtatgattggttaagttataattattataaacttgaaaaatagattaatatgatattttagagcaactttcatataaaaaagttttcgcacgaaacgcaccgtttaacagtttgaaaagtgtgtcacacaaatcttaatcttcatcaaactcttgttggagaaaagaacggggcctaactagaagtcactataccgatgtgtggtggcacacacttgacacgcaaaaatagaaaaaaaaagaaaaaagaaccgtacgtacgtgcaggcttgacccaaccgattatgtaagcgtcatatctcgatcgttcaaaggcatagatagatgcagctagctaattgcttggagtattaacaaaatatataattaagaaattccaaaaagagatgtataaaaatggaaatcgtcatcagatggatcggacagtgaagaagcaaatcgcagcaaggaaaaggcaggattaatacgatgcgatgcatatgaatgaattccaattaattggatgcatatccacgaccaagttttaatgaggtaccaaattaaacaaggcaagcaaatcaggaagagattaaacccccccattaaccacacactatatcagtattattattaacgcgtagtaccagccgcccgcctgcctgcctgcctgcattccatttactatttaccacgtacgtgtgcaccggaattacagccgtgggccatccctgtcagcgagaaagaaaaaatcactccacgcgccgttccgttccgttccgttatgggtggctgtgctgtggctgggccgtggcgtcaccgtcacgccctgccccccgagtcgaaaaatttctaaagcaaagcagccatactactactctacctctcgggctctgctcttctcgtcttcctcttcctctccgctacgcagccgcggcgcaagtgcttcctctccacgccatcaccgacccaccaccgcgcgcatccgttcccgtccctatccgccgccggagccctagatagataccgcgtcgcggccatgctggaggagccgctcgccgccgtgctccgcggagacgggaggtaataagggaggggagggggaggggttcccgatcggcggggagctggggtgggggcatgagggcgccgcaggagcgcaccgtcagggatctctacgatcgcacgcgacacaaggatctcgcgctccccgaggtacgtcacgctcacgcgcgcaccaacccctcctccctctactgttgattcattcattcgttcatgggttgattgatgatacctcctccggttcgctggtgttgttgctggtgatgtgggtttcgtcttcccttacccgcggattagggattagggattggggattgggattggtgggggtaggctaggctatgccgattcgaggtttcgttgcgcgtgtaccgtacgaattgtttgtttggccgattagttttttttttttttcatcagggaggcgttggacgcggttttgcgataggtcaatcagaaattgatcgaatcctttgatttcatgcctcctgctatttgttttcgcatccaattaggagccaatcgcagggatttggtgggggtgtcgatgcgattttgcggctggagtttttcgagggttgcctgattgacgcgcgccttcttctgtttgtgccgttcaggaatcagtggaggggcgtggcagtggacgacgggtggaggggccggggcatcgggaagtggtcgccaagatggaggtgagcatttccagggtgtggttttctctgtatatgctgacaatattctgctgggctcagaattttgcgcctgtttgcctcatcatctcatgcccacatgagagaaaaatacgatttcaatctagattattcgtctattctaatgcgctcttggactgcatgcagtttagctgttgtgttgtggtatagatgcttggaggtgattctgatcccacaatgctgtctacaataagggtatattaatatgtcagtagtgcaactcctgcttttggcatgacttattctcgcttggaaaatggcttggcagtacttgaatgctttggcgatctttctttccttggtggattgatgtgacgctttattcatctttacttacttgatgaatgactctgatcatggttttgtgtgctgtaagagagcactggcaattatctttccttgttgtctttataacagtccattttctcgttaagtgcttgtggattgtcattcgtcgatttactttaatagctctgagtagtctaattctccaggattagcaatgtttctgataaatagtttaatcttttcattgaaaatccataaaatacctgaggtctcattgtatgcttgttatgtttatgcagttctggcagggattttttttttgattgtttatgtttcttttttttttcctaggacaagcttacagcaagaaaaagaccagtaccactcgacagtcctaatgtgaagacagaatctggcacttgtaatgtctgttgtgctccttgctcctcgtgcctacaccgaaatattgcactcacggattcaaatatggactgtggatcatctcaaacatgctttgcaaggtcagaaacaaaaaacagttcgtttgttcgtgttgataaagggctccgtaccaaggctaaggggggagaaaatgacgatgaattcagtgctacttcaagccctgcttcctattctgaaaatggtgaaaataaagtcatcgcaagatcatctgttgcagcagattccgaggttgacaagccagcaaaacgtagaaggctagtaaatcacggttctagatcacctatagtagaatgccatgatgatagcaactcatgtgttactggagtatcagcagcaagcaagcttctgttagacaagaaaaaggataaactatctacatcagcatcaagtcgtgaccttactgttaactataaggacaatggcattaacagactaagaaactactgcgccgaagaatctacaggaaagaagagatctgatgttcatgccatgcaccgaagttcatctgatagatcattgcctgccgagtctccttttgcaaccaagaggttgctgcgtacccaatcctctctcagtgcatcacatggattatctcctaagagaccaacacatgaatttgggaatgcacaaaataatttagctcaccaaccttgtgagaaagcttcttcaaacaagaccgtagagcgttcactgggaggaaaatcagatccttctgtgcttggtggtgagaggcacagcatgatgactagttgtggtaccagtaatagggataaaatcaaggctggatctttaacaaagaatctggaaaatggcacctcatgctcaagaaatggaagtctagaacatgctgacatccaatctaatgatgctgtcaataggaatgacaatgataaacaagaacgtaatcaaggttgttcaatggatacaggtagtggtagaaagttgaatacacagaatgatgtgatgacggactctgggaattcagagggcttaatagatgtaagtagtttcctgatccattctgttcattcgtgagtatactgtatactccttcaaaatgtagttcttttatactgtgtttctatgcaaaacaacgttagtttacactaggtttgatatctgtccatacaaaaaaagaattttgggtcacacttggggttgattgattgaaagtgtaacatgtaactgggatttggttggtcttggacacattttcttatcatgacacttaacatggagaggaactgtgcatatcatttgcccttttagagtatgagatgttccttatttcatttgcttcttggctggttatgccactttttcatgtgaaagatagcttgaactggtgaagtttaatgatgaagctttcacttaaaatagtcttccgtgcaatacctgaaataactaattactagcacctagcacatcccactgggtagaaaaagttcgtacatgaaggctaattcctgttcttttattgatcgaaatatggtggtaggaaattggtgttttgtttcttcactacatacaaatgttcttgtgctttcctgcatataccatcatctgattaaaatcaagactaattaaaagtttgctgcatatctgaacatatttggataataggatttatttggctctttgatttacaatgcttccctcaatctgtacagtgatgtttccattgtttcatattatttacctgtctcttttgtgttgtaccccaggttaatgtttgtgatatatgtggagatgttggaagggaatatcttctggctacatgcactaggtgccttgaaggggcagagcatacgtaagttactaaccattttctttgtattactttctaagaaatatgatgtattattatatttaacagctatttcttcacactggaacatcatgcacatattaaactagtttaccaaggatggatattattcacaccaccactcttttaagtcttgtctggcaatgacgcttgtagcctataaatgatcgaatctaggtgtatttgtatcaaatgatctattagggtgcaattctcatgatgcgttaaactaatgcttttaagctgaatgcaagtcctttccatggttttgtttgatattaatttcactggagtatataataaagaggaaaagcaagttatttgggctagcatgctggtttcattcctttgtgttttgtgcggaaaatgtatatgctgcaatatgctagcttttgaatttctgtttattgttgactagttattgcatgcgagtgaagttagagaaagttccagatggtgaatggttatgcgaagaatgctgtcttaaagaagatgaaaaccaaacaagaagcaacggtggcacatcaaggaataaggttttggacgggaagaaccaaaattcagaaagtacaaacaactctaagacattgaaggttgttgtgactgatttggacagtcaacaaatcacttgtggcactccagtaaatgatcccttggctggtagcaatcaaaagttgcatcttgcgtcatctgatctggaagcacggcaagtgaagtgtgccaccccaactgctgaaagactggatgtgaagaacaaaaattcaggaattatgggaaatcgcaagaagttgcaagttgttacatctagcttggaagcacgacaatcctcttgtaggacaccaacgtctggaagcttggataagaagaatcaaagcttagacaagaggagtcaaagttcagaagtgttgttaaaacgtaagaagttgcgagttgccactgatatggaatcacctctatcaaatgatggtgtacggagtccacctaaatcatgcaagagatatgcagaaaatactttatcctctactcccaggctcctgaaggcggacagccctaggaatcatgatgtgttctccagggagaactcatttaaaagctctaacaaaggaagtataaagtcgcctgataatgctccaatgaggtctcaagcagttaatagttccgtgaccttacctcggtcatattccttggggaacttggcaaatgttaaaacaccaggtccttcaccacgaggtttggccaaagtttattggtatataacctgaaattatttctttatttaatttgttttgtacttccgctaaccccttagcttgatcttctaggccttttatcaaagcaaccatctttcaacaactccagtaatgaaccaaaggtcaagcaattagctgaacctgtgttgagcaagttgaagccttcaaaacattcaccaagagatcctagagagtccatccggaaagttatgaaatctgggcctcttaagcatgaggcttcaatttgcaaaggctcaagttcatcaaagcaaaagcaatcagttcattcatctcaaaatgaacaaccgagaatattgaagcccgtgaaaccaacaattttgttagaaaggggggcttcatttaatcttcaaaaaccaaacatttcttcatctccaaggcctgatagttcaataaaatcaggggatccaagaaatgaccaagacagcccgaggcctggaccaagcatacttaaaagtagcaaaaaaccaggtatgttcatcattcctttagtaattattataaagaaaaatgccgtagttcggattttgacaaacttcctttatggcttatcaaaattaggaattgttgaaaataagcatagctccattttatctaaaagtgatgagcaagggattacttcaacaggagttgtttgttctaaagacacctgtgtggtgaaggcatcagatccactaatcccaatggataaaataaaaaatgatagcacagatggtgcatgtgaaagtccactaattttggtgaataacgataatgaaatgtcaactaaacctgaggtgctttccattccacgtgcttcaaagacttgtggatctgatttccaagatattgcgccaacaagttcctcagaagatttgcctccagaagaggtacagtatgaacagaaagttgtggaaagtgatgggaacatctcctgtaaaagtgcagcggcgattcaggcttccgaagaccttttgccggagagcccacaaggctgtctagtggcacaaaatccgtacagccctgacactaaatcgaatgacctgaacttaaagcagcaagctttggttgatcaatcttctactgttggaagttctttgggggctttagttattccagagcagtcttacatctggcagtatgtcctctcttattttcctctctttacccccatgtaccaatttgtgaaatgtttatgtatatattgttttatttcagaggtacctttgaggtttcaagacctggaagctctcctgaaatgtacgatgggtttcaggctcacttatctacctgtgcatcgctgaaagtacttgaaatagtgaaacaattacctcagagaattcagttggtagaagttccacggcattcctcatggccactgcaatttaaggaagtaaagccgaatgaagataacattgctctttatttctttgctaaagatgttgaaaggtaatgctcactgtttcactgatttaaattcctttaccataaataaacaagctgattcttttctgttcttcgtgcagttatgaaagagcatatgggaaactgttggaaaacatgcttgctggagatttgtccctcacagcaaatatttgtggcattgaacttctcatttttacgtctgataagctgcctgagaggactcaacgtaaggcttatcttagctaatatagtcatgttattgtttgaaaaatggctagattactaattcaatttattcaatgattatagggtggaatggcttacttttcttttggggtgtcctttatgccagaaaggcaagtagttcaactgagctgcttgtcaaagggatgaatcatagtccattagaacaaattaatggacctgttaatcaacttgtctgttcccctaagatgcctcagtctttgggcatagatttgaatgagtgccctgttgatgaattgtatgatccagctgtatcagttcaaacggagatggagaatcgtggtgcatctgtaaaccatgagactttgttgaggtccaaccatgaggctgaaaggctgaatttatgtgaaatacatttcccagaaactgcagggactgggaaaattttgttaggaactcctactgcagttccctatggagttcatgttcacacaagttcaaaacgtgaatgcctcaacattaaaccagaatatccaagtgatataataggtgcttacatcttttaattaaatgtagttactgatagagcccaatattttcttttcttgttttacatgtgtattttgttcatttcaggtagcgaaggaacagcgggcagggacaacatggaggaggaagagagctttaccaagaatggagttccatgctttactaagcagcatacaggtgcaaccaccagatcagtatctgatgagatattggcaaatacacaggcacgcgtatcctttcaagaagtatccccacagcattctgtcaggccaaagctttctgatgatccaagtgattcagttttaaaggactttgttttgcctgattctagttccatctacaaacggcaaaagacctctgagggaaaatactctacttgcagttttggagatggtcaactgactagcaaatgcttgtccaagatacccttgccagctgatcagcatacttcattagatgatgtgcaatatattggtagggttccagcagatccctgttctccaactaaaccaatcttggatcatgtgatccatgtcctatcttcagatgatgaagactccccagaacctcgtaataatctgaataagacatcactgaaggaagaagagggcccttctcctctactgtcactgtccctttctatggcctcaaagaagcataatcttaccggttctgatacaggagatgatggaccgctgtctctgtctcttgggctccctggtgtagtgactagcaaccaggctcttgagatgaagcagtttctgccagagaaacctggcatgaacacttcattgcttctctagatatttgagtgtacagttttgtgctgtgttttactttatggggtttagacagggtagtagtatggtatagctgttaaattatggaaacctttggtttatttcactgttctatgcatctggttgttgctagagatgctggtctggtgatggtattaggcttctgcattttgtgtgattatggtgttttagttcccaaacgaactggtatgacataaaggatagatcagaatgtgaagtttgataaatgcaagttttttccatgcttaaattggcacttcctctagcagggaaatccttaagaataaccgaatcagcatatctgttcaatcatctcaacaaatgtacacatctactagtctctcatcgataacagatttattcaacttattcggttaccagttctggttttgtatttttgcttatcagcttgagatgcagagatttagaaattattaaccagcttcatcttgatgtgcccgaagctctttcattttgtggtacttctctttatcctttgacatcttatagaatgcttgcatactgttggcagctcatttgtcctttttttcctgttatgtatttggaaggtgttgactgaagtcacagcatttggtatgagaagggactcgaagattcacccctaaaactttattcaagtataaggtaggtattgaaaagttcattaatgactgctaattgttatctgaccacatctttttagaggttttactttccttctaactatatagcagataataactgatttttgctactatagtggttgaaaaactcagtttgccacctggccaattgtccgtttatgtttctttcctgccattttctctgtctagcacaatttaatacgtagattctcctccctctttttcccgtatgctatatagatttcaccgttagtatttactagtttcagtttcagctgtccaggtttcccccaagcatttttcccaaactatttacgtgcaacatattaaatgtttcctctgttttgcgtttatgtcatcttaggtccctctttttcaaattagaccacagtatctaatgatgttctattcgagaatgaacagcttgtaatcacaacttcaaacgaacttgatcctcttgtgtcctttattctttgaatttcttggtcattgctgcttatagttcctatggatttttattgaagttcctgaaaatgatgagatttattgaagtactcgtttctatgtatatttcgcatgtggacatgttgggcttttgttcaaggtggtcaagcactgaagctgctggatgtcagtaggtcatggtatggactctctatacactttattgaatagcttcatgcctgtatatccattggtttctattcatcatatgtcaatactctagctgctgaaggccatgtgtggtcctgatatcttgtatatgcaagtgaatgttctcactattagcttattttttattcttattgtaatccaatctgcagtagtgtggcacagcatagctgggtgaattatgtataggaagttcgcatgttatgagatgtccttctgttatctgggcccatgatattggttcagaatagggcccccaaaattctgggtattttattttcaagctaggtgcgctgttgtttgttttcaagcattgtgcgtatgcactatgcactcttgctgtactgtttacgacagcagcttttaacgtgttgaaattacacattataaggtcttggttggttagttgatcagtttgttagagtacctatatggaccttttcagctagactatatcatgcttaggcacaaacccaagcaaaacaaatatgcaccgtttgtctaatatatgttgtataatagttggtacgaggtaccttgtcctagtgcttattgtttttgggtagtaggatgaacacgattgattttcatcagctcataaaatatgtccgtgtcccaatgcttcaacgattcatcccaacgatttgtttatttgtcttgtttctaggcttttatgcttttattcttgtatatatatatatatatatatatatatatatatatatatatatatatatatatatatataactttcagctatgatttctgattggctgcaagcagctggcaatgatttgctcgagaaaagaagagtttgcaactgtgtatacatctgtgagtatattagcatggaaagacacggacgcatattagtcggtaaggatggttcaatccttttttttcccgcgttcaactcgtacttggtggttcactagagaatctccgtttgctatacatggaataggatacctgttatatctatgtatttccaaggattattgtgttgaggctctgcgacaatattatcagatgaataccagtagccctgtgctcgtttgttaacgtatgacgcatcagtcatcctttttactttcaattttcgatgagctcttgcttgaagttggggcatcggctgcattgcactcttgctgtactgtttacgacagcagcttttaacgtgttgaaattacacattataaagttagtcggggcatcggctgcattcccccctctcccgcgcgcgcttttactctttgttgttgatgcatcatggggcagagcctgatagactctcaacaaatttgcagtcttcaaaaaaaaaaacaaatttgcaagaagcaccatttaccaccggagcgatcgtttgcatcttgacctgcctgatcggtcttcgattccctcaatatccatttaagtttcattgcgatagttccatcaaatcgaagtgtgcagacaaaattaatcattgcgaaagtgttgaaaaccttgttcggttaatccctctcgattcctttcacatggtgggattaataaccgaataagtcataaagaaaatttagcccgctaatggctcaaagaagatgaacggtccttctaacatcaactaacggcccaaagtcaataaatcatggcccacctaccccaaaatcgaaaaaaacgactactaacggtacgattcaaaatattcaggcccataaaagcccatagtcataaggttaatattttcgaatttgaggacaacgatctcaaagctaatgtttcaaatattaatggttttttattaaagggtaatacccatcaattttcaatgaacgctaacacgtaaaactaatattcacgaatattctgcccaacgataccaatgctaaattgctaatacttgtgaattttgaaaaaaaaatattgaagcttttttttctaaaggtatactcatgaattgtagagagctatagttcatgaaaatttggactgaaagctaaaaattacggatttttttatgcacaatgattccaaggctaatactcataaaattttaggttggaatagaaatattcgtgccttttttttgccaacctttcatactcaagaaagtttggtccgaggcacggaaatatagactgaaggctagaaaatcacgtaattggttttaaggttaatattaatgaattttgtacccaaagatcccatgctaatactcatgaaattttgaaaaggagaaaaatattgaagtttattttctccaaaagttgatacaaacgatttttggctgaagactataactcatgaaattttaggccaaaagttaaaaaacatggagtttttattcataaggttaatattcacaaatttgtgcacattgatcccaaggctagtactcataaattttttggaccagggaaaaggttagtagtcatgaaagtttgttcgaggctatgctcacaaaattacaagccaaaggctaaaatcacgaaatttttggtcatactgttaatactcaggaattctgttccgaatgatcccaaagctaatactcttgcaattttgggctggaga

SEQ ID NO: 7073 - DNA, 19717 bp, Oryza sativa
gtgaagtgagtgcctcggtctgacacaatcttcttgggacagccaaatctacacacgacatgggtcatgtagagttctgctagtttctttccatcaaaggtggttttcattggcacgaaatgagctgatttcgtgagtcggtccacgattacccagatggagtcgtacccgctaggggttcttggcaaaccggtgatgaaatccattccgatctcttcccatttccactcggggatcggtaggggttgcagcagaccagctggcctctgatgttctgccttgactctttggcaaatgtcacacaaggctacgtattctgcgacatctcgcttcattccagcccaccaaaagtatgccttgatgtcttggtacatcttcgtacttcctggatgaatggagtaggcggactcatgagcttcctttaggatgagatctcttaactccttcttggccggtacacagatgcgtggaccataccaaactgtgccttgatcgtctatggagaaatcggtgtctttcttctcctgtattctttttattaactcttttatcccttcgtcgtctttctgagctttccggatttgcgattctagggtaggctgtactgtcaagctggcagcgacacctgactgtactacggtcagccttaacttttccagatctctgcacaggcgatcttggtcgggccgtatttgatctacattacaataggtcttgcgacttagcgcatcagcgaccacattagccttaccggggtggtaatggattccaagatcgtaatccttgattagttccaaccatcttctctgcctcatatttaactcggtctgtgtgaagatatacttaagacttttgtgatcggtgtatacttcacatctgttcccgattaaatagtgcctccagatcttaagagcatgaaccacggctgccaactcgagatcatgggtgggatagttgacttcatgaggcctgagctgcctggatgcataggccacaacctttcgttcttgcattaggacacatcctaagccttgtcttgatgcatcacagaagatctcgaaatcttttcggatatctggcaaggtgagaactggggcagtggtcaaccttttcttcatttcttgaaagctgtcttcacaggctgtagaccattgaaatttcttttctttctttaacagctcggtcataggtctggctagcttagagaatccttcaatgaatcttcgataatatccagctaagccaaggaagctgcgaatctctgacacattcttgggcgggttccaagcaagtacagcctcaaccttgctgggatctacttcgacaccgttgggggagatcacgtgtccaagaaatgctactcggtctaaccagaattcgtatttcgagaatttagcgaatagttgatgatccctgagcttttccattatcagcctcaggtgttcagcatgttcttcctcattcttggagtatatcaggatgtcattgatgaacaccacgacaaactggtccaggtattccatgaagattttgttcattaagttcatgaagaatgctggagcattggtgagtccgaaggacatcactgtgaactcatatagaccataacgcgttgagaaagcggtcttcgggatatcttctgatctgattttcaattggtggtaacctgatctcaagtcaatttttgagaaaactcttgctcctttaagttgatcgaacaaatcgtcaatccgtggcaacgggtacttgttctttatagttacttcattcagggctctatagtcgattaccattctctcagagccatcctttttcttaaccaggagcactggggctccccaaggggatgagctaggtcgcacataacctttactctccaattcttcgatttgtcttttaacttctgctaactcattagctgccattcggtagggtctttttgcaattggtgcggtgcctggtgccagttctatggcgaactcaatctctcggtctggtggcatactcgttaattcttctggaaatacgttgggatattcacagactatgggcaccgactccaaggaggtgacttgtaaacaggttaggatagaccgactcgcggtaggggtgttagaggtaaagcggacttgctttcctccaggtccttgcaaggtgatggacttttcggcacaatctatctgccctttgtgcttagccaaccaatccatccctaggatgatgtccaagctttgcgagtctaggactatcggtttggctaggaagtcaacttcctcaattctaaggttaacttccgggcatatttgagttgcccttatattcctcccagggaaatgtactatcattggtacacgtaaattttgggttttccaaccatttcttttcacaaaagcttgtgatatgaaagaatgggaagctcctgaatcaaacagaactattgcgggtacggagttgacagagaacatacccatcacaacgtctggagcatcctgagcggtctcagcttgaatgtggttcacccggcctcgaccaaagttgttggaaacacgagaaccttgtccacttgcctgagagctaggacgagactgagctgccgctggagtaggagttctggcagtgctgccattagcatgccctgagttggtgttggtaggattctgagggcactgtcgggcatagtggcccatctggttgcaccggaaacactgaactgctgacggtcctagcgatgacttgaaagaggtaacattgtttggcgcagtattgccactaggggcacgctgctgtggctgaggtgcctgacggttcatctgaggacgaggggcgtagcctggctggcggttagcctgagtgaccgactggtggtattgcatgggttgaccgtagcgagggcgaggtgcgcctcgggaagaatttccctgatggttagacttgcgtttcttgtattcttcggtagcctcttttctggcatcctcaagtagaagtgccttgttgatcatatgttgaaaagtggggaagtcatgagcaagcaactggagtctcattccaactgcgatccctttcaagaacttcctgatcttctacttgtctgtgtccacttcctcaggggcgtaccgagccaacttgttgaacagacttaggtactcattgacactattattgccttgcttaagtttgttgaattcctctttcttcatatcaatggcgctttcaggcacatgagctgcacggaaagccgtagcaaactcagcccaagcaatgttagtgggttcagggtgtgcattgcagtaattctcccaccaatctgcagcaggtcctcttagctggtgagaggcgtagagcgtcttctcaacaggagtacactgcactaagttgagttttctatcaacatctttcagccaatcgtcagcctcgacgggctcgacggtctgagagaactctggcggacgagacctcagaaagtctgtcagcttggatctattgttgcccatgtgagggtggccatttccatgcgcactatgctgaaaaccggctatggctgcggctaatccttgcaagatttgtgtctgaactgccattaagtgctgcatgttgttttccacatgaggtggggaagggaggcgttcttctccagaattgtgactagcagtgcggtgagagcggtgagactgttccatctctgcattacgggaagctgtgtgatgcgagcggttgctgcggcggggttgctcaacttctgcgttgcgggaagcagtacggtgcgaacggttgctgtggtgagaccgctcattagctgactcatgattttcttctggctcaactctaccttcttcaaaaccgaagcgggctggcgcacgagcagcacggcgggggcggctagccatctaaactcccagaagagggcggggtaagaatcagataagcacttaggagggcaaggagcaaagtaaatagcaactcagatagcacacactaggcataagctggatttttcaatcataaaaacacctaatacaacgggtgtggacaagtcacagagctacgccgagcttgactgtacgcacaccacctaggagaaccagactaccaaacaacacccacaacaaacacacgcacgcactacctcgccacgactccaaaagagttggcggcgaaacaaaagggcctaacacacggacggctgctgaagactgcctcctctactcctcgtccgtctggctgcctcctgtagtcggctcctcagtcgaagaaacgtcaatcggctgacgcgaagggaccggcggaacctgtcgagggccgatagcagcacgggccgctggcggtgggggagctgggtagtcgaatcggaacacggtggaagaaccaacaacacgcttccgcgcagtgcggataaagtgtgggccacggtgggaggaagcaactggggtgtgtccgggggtgtaggaggggctaactgggtgtgggtagggggagtacactggtgagtacggcgcacgtgagctgggggagcgcgggccactaggagtgcgagcagagccgcgggagctgtgggaggacaggtggctggcgtggcagaggcggcctgagtcccaagagacagtgtcaactgaggtgacaccctcctcggccagacgggcctccagagcggcgtagcggcgggcaagggagcggtaagtctcaaggagtaggtagtgctgagtggcctgagcctccgaaagctcaaccatgcgagtcagcactggctaagactcgctgtacggacaagggtacctggcgtctgcatggccagaaggaaggcgtggaagctgccggaaggcagagcccccgagacggtggctgtagtcgtgggccaagcgacgaagcgcagtccaggagaggtcctggtacgcgatctggagagtgggcctggccacagtaaagtggtgtgggcgaaggccggctccgtgtatacctccacgagggtaaaggtacacagagagctcacagcgagggggaacacggtccacggagtaccccgtgtactcgggacacgagaagccaaggaagcgggcgaggtcacgaagctgagcgacgtggtgaccctcaccaaaaccgtgggaactgaagctggcgttcactgccatctacaattttgaaagagggagaaaagatcagtaaccattttagaaacaaactattaaaaataaggaaaccaaaagaagccttagcttttcgcaagtagttttgaacttagtatccttagggtcgtcctaaacgtcgggtttcgccctagggccaagcctgtgctctgataccatcccttgtcacgccccgaactagtcccgaccggaactagcccgtgacgctccaaattaacctgttaatcgataccagtcccaggaaacagtgctggtatcacaggaagacagaatatcacagcaacagaggtctctttaatatagagaaggagtacagtcatgttgggctgcggacagatcccgagctcacaactgcattacaaaagggaagcggaagccaagacttggaccaaacaacacagacgcgacttgggaactaggccgaaaccctaaaactcaacgtagccggcttgctcctggaagaactcctcgtcagcgggatccgcttcatcttcttcagcaactggggggtagttatttatatagagcaagggtgagtacgggagtactcagcaagccatgggaaataagtgtttaatgcaggcttcaaggaaaggctgttgtttttgcaattgattttatttgaactcttttctgaaaacaactaagtgagtgcttctcaaacgacacggatgagacagtgcgtctcgtccggtcggagtatgtgcaaatatatcattctttagaattgatcaagattggcacccggccaacaactttcaaacagccacccgggcctagctgatcccatcagctgcagattttccaaacatcgatcccctttccacaacagcaatttcacaagcagtagtcaaacaaaactacgctaggaatcacctcacatccgcccatgaccgtgggcacggctgttcgaacagtttgttaacctctgcagagggggtacactttacccacatgacattactaacccggatcacctagcccgtggggatcagccacgtcgggagacctccaagctttcatgataaggcatttccaaagccgacacaggtttaccatatgccgacgagaggggtcccagaccaacaacaggttaggtcccagaccatactgtgccaggaagcccaggggtcctccccgacaccaccccgatgaattcacatgtctctcggcatcaaggctcccctgataagctagttactcagccaggggtgtcccattccacccatgtggtcgtacttgtcttatgttcggatgaaattccaaggaaacggtccttaggtgcaagagcgggaaaccgtacacccggtacgttccccggtccgcggttttggaaattcatttagttcgcaagcaccgacccaggtgtcgggttttccaagtcttttataaaacccaagttttacccaagatgtttttcagattttaagtttgaaggcggccgtcgatactcgtgcagagtgcatgatttccgaggcgcaactgggtggttacaagggaacatggtataacaattaacaaaggaaggatcaaatgcaacaaattaggtaggtccgtcaatctgccttgcagacgggacaagcagattaagtgcgatcctatcaatgcataataatctttcaagcaacataattaagttgaaatataggctcaagatattcaaaggtggcttgccttgctcgagatctagagcttgatcctcgaaatcctcgcactgcgggtcttcgggctccgaaactatacgcaaaacgggacaactcaacaaacggcgaaaataaagccctattaatgacctctaagcgtgccattaaatagatctcgagatttgaggaattttggaagttgaatggagtcaaatggacttacggttgggaagatattgaatttctaagattattggatttttggtctaaaggaaaaggatttacttaaatcctttttttgaaaaagaaaagaaaagaaaaggagggggaaaattagacttccctcgggaggctagggcgcggcccgagagaaaaggggcggctcggccgagctaaatgggtcggtcggcccaacaaggcggcccagagcgcgcgcgcgggcggggaggagagagggagccggtggaccgggctcacctcgcgtggtcctgagtgggacccgcttgtcggtgacacggttcaccgtgcggaacgcgcacgcggcgcgcgctagggtttgggggagggacgcggtgcacgcgcgcggttcgcggaggacgcggatgcggcgggcccacgcgcagcctcacggctcgcggtggaccgcgcccgcgagcggggccgaggggagcggctgaccggggtcggctcgacccggtcttggccgagctggcgccgacgtggcgcctacgtggctgccacgcaggccggcgggaggtagacgacgacgccggccggaacggacggcggacgacagcggcgagcggcgagcggcggagcgaaccgcggcgatacaggcgaaaacgagcacaccgggtggttgcacgggacgaggggagtcgagccaacggctcggattcgccggagggagctcgacggcggcggattgcggcggcggcaaccggcggagagaaaaggggaaaacggcgacgaggtcacgaggggccgattcccggcggcgagagcatctacgcggctacgggaatccgtcccttgcgccggattaggaggaaacgcatcgagggaggccggcgacgagaggcgcttccgagctcgggcggcgacggcggcgagcacacggcgagcggcggcaacggtcggggcggcgccggctagctacggggaggctactcgtgctactacccgagtctaaggggaggaggtggaacgaggaggaagaacggagggaggcactaccgtgcgggcgggcgcagtgacgagagccgacggcgcgaaacgtgatcgtttcggcctcgggccgaggaagaggagggggagggcgcgcccggagtccccttccgcgtccttgctcgtgccggctcctccgacacacgcaacgactaacggcgacggcgaatagagcacgggaggcggcgacaatggcgtggcggcgagagacgaaaacgagggagattggaggagggaggtgcttgggtttataggggcgacaatgtcggtttaggagaggggaaccgacattggacggtcaagccggcgagctagcgcccggctagcggccaaaacgacgacaggaggtgacgccggcgagaggaggaaaaagaagaaaggaagagggaaagggggcttgcctccttgccgctttgggaaaaggaggagggagcggggggctgacgcggcagagggaggaggagctctgcctcctctccttggaagctagcgcgtggaggggcggggccgagtcgatgacaacggcgatgacggtggggcggtttggagcggggcgacgacatgggcggcaggcacgggcaggcgcggcagaggctgacggcggcggcgaccaggcggtcggccaccaccgcacgcgcgcgcggaaagcaacgggcggcgcggcggtttgagcggcacggctcgggcacgcgtgctgactcgcggggccgagcggctgcgcggctacaggcgcggcagggcatcggggccgggcggcgcatacggcgcaggcgcggcacgggcggcgaccacgcgggcgcgcgcacgcgagcaacggcacgcgggggccgattttggggcagggagctcgctagggatggaggcggggagagggagagcgaggggggagggcgctcggcgcggcttacgcgcacgcgcgcgtggcgcgcgggcagagcgagggagagagggagagagagagagagagagagagagccggggagggaggggaagatgggccgagagagattcggcccatcgaacccgagggaggaaaaatagacttttgcggaggaattgatttgggaaggatttggattcgggattgaactcgacgatagatcggggatttgagatctgagaaggcactgacactagacaacaagcaaagaaacagatttcgcaaataggatttttaagagataatttttcccgataggcgccacgacggaacgtgcgctacacttagctcaactagtatacaatgggggaaatcacattaatgcatagacttcaggttctagtgttgttgttggttcaatgccaccgctctggtgatgattaattaaaatatattaaatggtgggctgtgggtgcatggtttggatggtcgcgcccatggcatttaaggaccggttcgcgggaaacccgtacttaccacaagctagcgtgggcaacggctgggcttgtagtgtagctttcctctagctgacgcatccaggcaagggtgagcgtgatggagttcggatgggccctgcgacggcctatgcgacttttggattcacctaggcacgagaggggactgcccactgccttgcgatgagtgggggtaaaacctgaggtgtggtatgtttggttagaggtggttatgcgaagggtcctgacacggcctctttccggtatgtcgtggtggcatatcggcacacgggaacgtgttgtggggctgtgtcttgtgggtacaattgtacacctctgatcagagtaaaactattcgaatagctgtgcccgcggttatgggcgatcgaccagattcaccgtgattagtctcaccctagtttagtctaatggaattgattagttcagatggatgtttgggcctgttgcaacgtggtgtagcattggacagtggatagttaatattgattaattactataaccgttttactgctttcaactactgtttataaatgccagcttgatgcaaaggatcccctttagccttcctttggttatattgcatcataccctccgttccggtatgacttgctgagtacagtgggaagtactcagtcttgctctatctcccaatcctcagagttcgagtatgcgtccgatggtggtttctccgaggagtaggcttcgtccgtgccatcaaggatgcctgtggagtggtgttcccgctgcaatccaagtcaagacttagctccagttatcttttatatttccgctgcatttatataagacttttataatgtttgtaagacgtggatctgtatgtcaactttgtcgtttgtgtaccctggccggtcctggacatggattttaatgcacattctgcttggaattctattcgggaatttctgggcgtgacacccttgatggctacaaggtaacatttacttgtcgctgtgctttgagaagtgcaagagcacaactccactataggaagtacaaatgttgtttatatatcttggttttctcttttctagtgcatagttgtatacaaattaagggcaaaagagacattttctaaccgaattattgactataaatagccatatggcatattaagtgggcccaaggataattttaagcaaaaacaaattcttagaggacctatatggacaaaatgaaacttgaaggattaaattgagctttcgatgaaacttaaaggactaaattagctatttactctaaacttatacttatcagctaaaatctaaattttcaaccttaaatttaattcaagagctgattttgaggttttatcatcgaagtttatttttcagcctttacttttagatcgcaaagaacacgtatataaaggttttgttcataaattacttttcgtttataaacatgccgtttcgcttacgcgtgctccgtaaatagggtactgtcggtgacatgggaccgggagtatcatgactagaggcttgaggcagacacaatcgcccacgtggcctggcaccctcggggggcgtcgggcccgagggtgatgtgttcgccctcctctttgtctccccgagggggtcggaccgctcccgcctcggccccgagggccgaggcgccccgaccctttgtgggttttgcgccgcgtatatgtggtaggtgagcatagcggggctcacctaaccacatttattgcggtttggacgagcgcgtcacgccgcatgtaacgcagtgcagcgcgctcgtttatccggtcagtgaccagtcacagaccgatcagatcgtgggttaggtggcgacaggcggtctaacgcacgcctcgccccatcccgtcaggatgagagcctccaagcactcgtccctagccggagccggcgtgttagctcctggagatggcacgttggtcccggtcagatatataccaggcttcatcctaaccattacaagcaagacattgtatgaagaggggcgaacatgcagattgataaactgacgcgtggtggacaagaatgaccgatttgtgaccggtctgacactggtcatgtcgtcagcagacagccatgttcccacgtcgcgcctgcttccggcggaagtggaggtaggtatgggccgtcccatcagaaggtcattcggacgacaaccatacaagtctccgtctgttgatgaaaagataggataagtccccacaaaaaagagagagatggtgcatgtggtatccccttgaggtataaaaggaggacattgcccacttagaagggggatttttcggatccagaacgatcagagagggagagagtaagagctctctggttctccagctcttttgtagcttcttcatacatagatccaccaaaacacaggagtagggtatgacgcttctcagcggcccgaacctgtatacatcgcccgtgtcttgtgtgtttccattctcgcgaaccttccacacaccgagagcttagaatctcacccagggcccccggccgaaccggcaaaggggggcctgcgcggtctcccggtgaggagcctcacgctccgtcaggtacactagccggttttgacaagtcttagcttagatcaccgcaataatctttaagggatgactccctatgttaaccgatcccgcctcagatccgcgctcgtcaccaccggcacaacattcatatccggccgatatggcgatttaatatatgctactatcttccttccaaaatataaggaatataaggagttatattttgagatggagaaagtactagtgatgatgaggaagatacactagtgcttgaaggcttagttgttttgttctttttcccaactcacctatctcgtttttcacatgcacacttttcaaactaataaaggtatgtttttttttacaaaattttattaattcatttttttaaaaaaataactgtaaattaattaatcatgcgctaactggtagtatgtttcattttgctaaattaattaaaattcccaaccctgcaggagccaaacacagcctaagtaaataaagggattaaaattgaaagcgtatctaacagccacagctactagtggcttggtggattacgagtcacgtcagtaggcgatccccggcgtgtgcgatgcgaggttagcttaattagctggtctgtccatgtcgtgccgtcgcggcgtcgccttcttcgccttggcaacggcatgcatgcctccgatcatccgtaaacctcacggcggccaccataccacacgtgcgtacgtacgtccacaccacgcccaacaccgacgacgtcgatcgagctccaatccatccacccccacccatggccgcgcgcttctcttagctggagtaattaaattaagtcgatctccccagcgcgcccccatgcaccaatggccgctcccacgcgccgcctcctcctcctcaaccacgaacccaccaccacccccgcttcgtcttcttcgagttcgaggcaatccttccccacgctgctccccgtttttatcctcttcgtcctcctcctctgcttcctctccatcttcctcgtccgcgacctcctccacttcctctccctctgcctccgccgccgccgcctcctccttcgccacggggaggatcatgactcctcctccgtctccatgcagtcctcagcctcgccgattaatgcccaggcgccgcgcaagccgccgggcttggaccccgccatcctcgcgtccttccccacgctgcgcttcaaggcctccgccgccgcgccggagtgcgccgtgtgcctctccgacttcgccgccggcgacgccctccgcctgctcaccgtctgccgccacgccttccacacgccctgcattgactcctggctccgcgcccacaccacgtgccccgtctgccgctccgacctcgacgccgcgcccgcgccggcgcctcgccacgaggaccccgccgccgttgccgtcgacgtggaatgcgaccggaggggcggcgccggctgaccggtgaacgaccgccgccgtgctggatgacatgcaggatttcctttaattttgttcgcgccaaaattgattttgatttgttttgttttgtttgtggctgcctgcattaccgtgtaaatactcaacgacttgtatcgtccttgtgcattgtactgtcagtatttccaaattgttggaaatgataatgtagagtattccaggtagaattatgagctagtcaccacagcttcagctagctgtttaattcaattgcaagtctgcaatacctgtcaagaaaataaatcaactgtatcaatgtatcagttggaagcttttgcaatgttatttttagccacagaaatgggcggttgccggttggtaccaacaagggcattctaaagtaaggatgccactaattttagagtaatctctctcggtgcatgatttgatacatgagtctatgagaaaaatgctaaccagaaagaggaaacacaatatatatatatatatatatatacaggcatataacagttttgctactaattgtcgcacacgcataccacacagggcaatatacgggtctgctttacaggatttatggaagcaagtacataaaagcaccatagcacgcctcaggtgctttgattcaaagacacaacgacgctgcttatttaataaacaacagcgtgtgagaaactgcttgcgtatcagcaagggacggtaaattatttatagaacacctcctctattcatgttctttgcttttaaagatctgtagaagcccatgaacctcacagtgaactctgaaataattagagtgtttatagttagtagttggtaagatccgttcattctcataagaaaacatagaagactatttcagttcagaactatactgaattggcaggtgaattattttctagtaccttcaatctttataaagcattggatagtttcgcgttggtcatggccctccttggcaaaaccttctatatttatgtttctgatttccaaacccgtgtcgccggattcgcactgctctttttgacgcgcgcaatctttgatctgattacgccgagaagcaagaaaaagaacaaagaataacggttagtatacagcaattagatcatgaattgaaacaactgttactgaagatgcagtagtcatgctaacatggttcaactccgatgctagttgatcaatgctattttggaactcctcatccctgtcccttttcagttcagcaaccagattctgcatttggaaggagacaaacattggtgacaaatactgaaaacaacgaaccctgtttcagagcatggaaacattaggcaaagtggagcttacagagaaaatgaagtaaggtgacacattatgttcaatcagttttctgatcttacccctaatgacatacagcctgcacaagtcgaagtaacaacatttgtatgttttctttcttgagattaaagacgctcaaatatactgaattatggggaaaaaacacatgaaagggatatcctactgttttgggcttggttcctccaagatttttttggctacattggagatttcctcttcccatcctgtcaaaatggcatggccttctaggaaggcatagctgcagttgtgaggggttatttatcgccttgagaaacccaattatagtgcttcttaacaacagaatgaacacagtaccagcaatctactacggagtaacatattctcaatacgaatgatacatgcaccttgattgagcagttatatgcattttttgtcaaaagagaacataccaattgcaattgtttctttagaaaatgaaggaggaacatttttttttttgggaatacgcgaggggcgcatctttgtattaagaaggaataaaagtatttacagagcgggccgaaaaataaaaaacacgaaggggacaagatacaggagtggggaggaggaagaaaataaaagcctaatctcccaacgaatgtggcgaccttccacccgacataggagtcaccatggccggtatcgcggctctagccaaccgccaaaggtccgcttcgcccgtgaggaacatagtatgttataaagacatttctccagtaacgaaccatctactttaaccacagtcaaaacgttgtaacatcccgatattatatttcaagaagcaggaaaggagaggagaagcaatgtttgatgttcttttatctaaaaacaagggagggatattcttatgtgcttactttgctttccaagtagcttcaaaagaacgtattgcctgtcggagattattgcctgagctcattgttattctcctagcaatatcacgaggcagatctatgctctcttgcactgcaatgtactctaggaccttgattatctaagatcaaagacatttttcagtaaactgtccagcattgcaaatgcgaagataaaatatccatataaaaagtacctcatcagatgaaggtggcttaagtgtcacaaccttgcagagatgcctgacagcctcaaggtttgaagcatcagaacagcagaacatgattttattgcatcctacatacctccccagaaaccatccaatataatgttgaagatcagatgagagtttatcagcgtcgtggacgacgatcactgcatatatatgaattttaaagtattaccttggtgtaatggtttgagatcaataaagcttcatttattataaaaatatatatgtatatgatacactagtacatcaatgtaacacatataaataccagaaaataaatgaagaacatgcagttgtgtcaagaaagatcactgtttcatcattttaacaaggtaaaatagtgtcctcatgtacctctgcagttggcatgactgcaaatggagtttggtgatgggatggattcattcaacaaagtagtaatgacatgcttctcatagccgtgtatgtcagccaaatttacctccacatgatgacttgaaatcttcactctgatatcaatgtgttttgcaatttctccctacagtgcgagaatggtcagtagtgtttcattttacactttcctctgaaggagtagtagagatttgtaatggcgacaatgtgcaaaagaataacaagtcattctcatgcaacgcgtaccttcagctcgaatctctttgtctgttcctctatctgtgaaacggcaatatgaagcaagaacaattgtgagcttaaaggtttagataattaggttggttaaaccttgtgcaaaagtgagtagcatcaaccttgagattatcagtagcaaaagcatcccatatgagtgccgacaccatgctcctctttccgacggaggtcgggccttcaaatatgatatggttgcattcttgtgcggtaacctggggggtaaaccccttatcagaatgtcaagacggtagtagtatcactcaatgtagtgaaatatttgactgtaaatgggtagtaaggagtgtgtgtgatgaccatcacctggttgtagagctcaagggcaacgtccttgttgcagatgaaatcgttgaggaaattggggcgatacttgtctgcccagatgtacttgtcctctgccgtgggtgtggattcttcagaagtctgtggcgaatccaccatggcgaccgatttgggcaaaacccggacccagatgctccctcctctcccgacggcgacggcggaggcgctgtggtcggagctctgcgtgctgtggtcgccggcggacacttgtggctcagaagcagcttcagctttggattcagccggcgtgtggtggtcgtggatgcgtttggcggcggcggcggcggcggcggcggcttcctctctctccctcaaaggcctcctctcggcgacggcggcattggctacctgcggctggggcgcctcccggcgcggcggcggttggtggggcacggagctaggggcggtgcgggggcgggtgaggggggcgccgcttctggggatgcaagcgaagcccaagcggtggagaccgagcacgagctgcgacggcggcaggaaggtacggtagcgtcgggcgtcgcggcggcggtcatggtcgagcgcgtcggagagggtggtggccgggggagccatgtgggcggcgcgcagggtagtggcagtggcagcggcatgggactgggggtggacatgagatgagagcggagatgaaaccaatgcggcgcggcggtgtggacgaggggagcgagaggaaggaggtaggcgtggcgatcaacgcggcagcggccggccaggtggtgaggtggcggtggcggtggcggtggcggtggatggtgaccggagaagcattttttgccgggatcattcccatcctgcctcctctcctggcgccggcaacgcctaccatcgccatctgatctcggcccaagctctccatttccatcctattggcccacttcgttatttgggccgcctctggttgcatattcagagaggatttaggccggccttctttcgctgttacttccactagttatttaattattttttagagaagttattttattttattttatttagaggagtttcttaattttatttttttagaagagccttttaaataaggaacttccctgtaaccttcgcattacttccactattattctactgagttgcttgatagaccgtttggtaaggaataagtttatgtctctcgctcttgattgagtcacatccctcaatcataaaactaggtataatgtcgcctctaatattaaaaaaccagtgtagataaactatttcagaggtttagaaagtgttttttcgctgacgtggcaggttgaccacaattgacttgctgagtcaaaaggagggacccacatgtcattgattgttctctctttgagagggctaatgtcgcaaaggggatccatgactaacgagtagtgacgtgaccggggaggagttccgcgatgggcggcgacgaagatgggtgttgtgactggcagcgaagactgcagcagctcgcgtgaactaggggatgacaacccatagcggaggacgataggcgataaaacagcgagacccgaaggtagaagggcggcagtgcaacaatgacggggtagcacacacatctctcgctccgacgtgaccctctgccgccgccaccagtctctacgaatgccatcctatcaggtagctctattaccctctttctttttcctatggagatggcggtgtcccaccctgtcccagcttgatggcctacctccccctgtggggcctccgatgccgccatcgatgctggaaggaagccacgtggaaggaagtggcatggaggtggagttccaggctcaaggtgagaggacaacagccaccgctaccatgagcaccactatgcgcgtgctccttgaacggacgatgacagtaactcaatctgcccccgacgatgttggccacctcggtgtcgccaagctcctaccaccgcatggggtctctacatgctccacctagcttctctgcttccatcaccctcggggagacgaccccctccccatcggccgcctccacccgtgagctcccctttccactaaaggaatcaatgccgatttttaaagttgtttggagagggtattatacatgtttttttgttgaggaaggctattcaggaagtagcaatatacgagaaagacaaacaagaggttgtgttcgggcacgcatgtattattgcaagattaattaagtattaactatttttttgaaaaatggtttaatatgattttttaaaacaacattcatatagaatattttttaaaaaaaacacaccgtttagcagtttaaaaaacgtgcgcatgaaaaacgagagatgtgagttgagaaaactgggataagaactcagcctaaaccgtttggcaatgaccggaaaatttgaagttgggcgatgattttacaggccgattaaccgagggcagtagttccctcagcagtgtccggccttggacttgtgccgcacgcacacttccatttccatttggaaaaagtacaccgaaggtccctcaacttgtaatcgggataaaaaacatcctcgaagtgcaaaaccagatatacgaggtctcttaactatacaaaaccttaactatacaaaaccagtcactcgaagttcttcgatggttttgaccccggttttagtctacgtggcggctgagtcagcgtagaacctacgggccctacatgtcaggtgtccacctcaccctatctctttccccttttctctttctctgttcatctctctctctagcggatgggagcggcggagcggcaaacttggctagcgcgcggcggtcggcggaagagcgcgcggcggccagtacacggtggtggaagcc

SEQ ID NO: 7074 - DNA, 8087 bp, Oryza sativa
ctggatgtcgagctggctcggctcggctcggtctggctcgttaggataacgagctagctcggctcggctcgttatcctaacgagctagaaaccaagctcggctcggctcgtcagcaagctcgagctagctcgtttagctcgtgggctttggggatgagagaaagcaaacaaggggaggagccgaggaggggcgccgggaggagcggccgtcgtcgggaggagcggccgtcgttaggaggagcggcgcgggcggcagcgtccacggctggccgcgtcagtgccagggaggagcggcgcgggtgacggcgtccacggcggcatcggcgccggggaggagaggcgcgggcggtggtgtcggcgccggggaggagaggcgcgggcggcagcgtcgacatcggggaggagcggcgcgggcggcggcgtcggcggctggccgcatcagcgccggggaggagaggcacgggcggtggtgtcggcaccggggaggagcggtagcgttgagggctggcgcctggcggcggcttgggtggggattagggatggggacaagccagaaggggattcactcactagggttttgagaaggggatgggctgttgggctgggctgggcgcctgggcctcatttgctttggctcgttaaggctcgcgagcggctcgcgagccagctcgagctggctcgttatctctaacgagctgaaatgccagctcggctcgttagaaaattcaaacgagccgaacctgtcacgagccgagcgagctaacgagccacgagcttcctgtccacccctatatagggctcatattatatcccgagtacaaacttagtccattatagacacgactcaaacctttctaaagttaagatataaacaagaccacataggcagtctcttgccaaatctctaacaaaccgactcaatattctaattaatagatacaattgtcttaatcaagctctatctctaattggcaatggcagttatcccaatttaggcccatgccgagcccaagtcatgttatatcggctatatcggccatcggcttcattaactttgatcaacttcatactctgttttcagccgatacgacattccgccgatgtgcagtctgactcgcagatcaactcgatttcacaccaaatccgcttcgatcttcttcctccttttctgaatctgatgccaaattctattgttaacactaccaaaactgctcaaccacatgttgattacttgtgttttgacctaggaaacacggttcaaagtcctctggagttttggttattgtagcggccaagacaccttccaccgaagactatttagtcgcaccgcatggtgactaactttgcatagctagacaaatctagcataaggagatagaaatgcattcatattgttattctctgaccaattggagtttgtggaatgcagcaataaatctagcataaggagatagaaatgcattcatattggttattctctgaccaattggagtttgtggaatgcagcaatgctctaatattcagaggtcaggctatgcaatcctaggtgctggtagcaagaatcatgacggaagcaataatgcattggcatagggcaggtggtggtggtggccttgcaggatggcgtacaatatatagttagttggatgaccgttcttacttttccatgcatgtttttgtgtaacgtcctgcctctcctaggccaggcccaataatgcattggcatagggcaggtggtggtggtggccttgcacgatggcgtacaatatatagttagctggatgaccgtggccctgtttgtttcagcttaagattagtagattactgtaatctagattattaaatcagattactctaaggtggattataataagctgacataaaataagctgcgagttgtttgtttctctggattatttgaggcatctaattgtagtgggcctttagccactcaataatatgaaaaaagctcctttagaggagattattagattatactatctggcttatagattataataatccagcataataatctacttgtttgtttcagcttactactaataatctagattataatattcctaagctgaatcaaacaggggcttacttttccatgcatgtttttgtttaacgtcccgcctctcctaggctgggcccacttacatctggtagctttcataggtcatagactatcctcacagaccaacacaagttttttctgcacattaagtttttgtgtaacgtcccagctctcctaggctaggcccacttacatctggtagctttcataggtcatagactgctctcactaacacaagatcactcgtgcgcactcaggaagaatttcatacatgtttttgtctaacgtctcctcactcgtgcgcacccgggaagaatttcgaatttcatgcatgtttttgtctaacgtctcctcactcgtgcgcacttcataggtcatagacttccctcatagaccaatacaagatcactcgtgcgcactcgggaagaatttcatgcatgtttttgtgtaacgtctcctcactcgtgcgcagttaggaagaatttcccgatcggccacccatccctaaattgctccaagccaagcacgcttaaccttatagttctttagagatcggcttctagaaaaaaagttgtaacttgttgatatgagtattctattaatcctattaagccctgggccgggatgttacaactaaggtcatcgcaatagacatggacatggacatgatcagtcaaattattcatggacagcacacaaagataagttagcaaagtggtacaaatcagagtagcaacggctagaatggcaaagaaataatagttgataatgtggatagataatgacagcagaaattctaccaggatcttacaagcttatgcaggattaaggccagatagattcacaacatggaatggaaactgactctttgcgcatgtatgcacttgacattttgatttaaatgaagagacataattttgtatacaaataaaggaacaagctcaaaatctactggtagtgcatatagaagcttcaattttcagtgcaatataagttttagttttttctcatagttgcagtttcacttgatcaatttttttttaaaaaaaccataatgataaactgggcaaaaagcaaaagcaaaaattcagtagttgaaacctaccttgctaatttataccccttccgtttcatgttataagacgtttcgactttagtcaaagtcaaactactctaagtttgactaattttatagaaaaatgtagtttgactactctgaattttagggtttagggttggggttagggtttagggttttgaaaggaaaccgtcataaaatggacacttggcactaggaggatgaagatactcattggatgcttgaagaaactctatcctcccaaggcacctccacatataaatactcctcccatccttcattctcacatacactaaatagagctaaattataagaggctttaagtatactttaggttatttatatgttctgttttttctatatataacattggtgttataaatgagtttcttgtccttttttcataaggattgactttatccatagaataattctaattaaaacaatactaaatttcttccaaccaaccctagattgttcgagcaccacattattatctacattttattatgtagaaatagaaatatgttttgagtggatattgagtcgcattttattatgtagaaatagaaatatgttttgagtggatattgagtcggtttgttagagatttggcaagagactgcctatgtggtcttgtttgtatattagcatattatgccatgacaagaagtactgccctgcccttgatgtatgcttctgtgctctaattgattcaatatctaattactgcaattagtgcagctaatgtatttgcggaaaaaactccataatacaatactccacatttgttctagatttcatttttgtttcaagtttgctggtcctactgcatgtgcatgtaatagaatgtaatagagtgcatgtaagaacatacgaacaagtagaccaaggatttttgcaacgtttctttgagagtttatttagggacctaaaacaatttactgttatgtggattgaatatgcttgctagtcagcttgtttgaagctcgatttgagaccttttacttaagaatatcttgataagcagtataattagagatgtaatttttggggcgtatggaatgagatggttcactgtttgcatatttctgaaagcactatattgatacatactatatctgttgtatatatgtttggatttgatatgttttaagattttttaagtgagcacttatgtttttctacggcacatgtcccatttaagcaaactcatacaatgacagtgtggttatgcataagttacatgtaaacaaaaacattttgttcaggacaagcagcagctattaattaatcgaaaggcacaaaacttgagaaatgaaatgttagatttaaaaggttttacctggtcaaataatctgtcaagcaaatccagatgatgtcgacacctcaaattgtaatcctgagaatctctcgatctctgcacaataaatactcataagagaatagtaaatgtttgttcgtaaagaatttaaacaaaagtgaaagtaatattaccattttagcccacaattttatggtgtttctgatcttttctttttatattcttgacatcgtaagttgatcttttcttttatattcttgataccgtaggttgctccctgatcacacatcttctgttggatcaaccgataagactcttccgacagctcaccagaagcctcgacttcttccacacaatactgatataacataagtgtgtcatcatcgctccacgtgaccctaggaaaaaaagaacgcccaagacttagggggagaatgatggaataagtcttgtggcgcggaggggccgaatctcgtgcgggcgaggctgtcggtgacggaggtgtccaccatctcaggcttcttggtactgcaaagtgaaacatttgatgaattaagatttatctgagtttatgccaaacatcagtttccctatcggaagaaactatcggaagaagaaaaaaaagcacaatttcacaacctattagtatggttgactcatgtcgaggggaaaaaaattacagttaatgagaagttaattgatcacataaatttgaattgtgcccttgagccactgccatgtggggcccgcatgtcggcgcgccccctctctctctctagggtttaataatggcgcaataaatcaattaaggacttttctatttatagtaaaaacactgtggatcttctaaaattcatagaaaattcatccgagctccgtttaagcccattcaagtctcagtaaattaagaaaaatgcaaagaatccattaaaaatggttttgttctctgttttagtagtcttatagcctttttgtattgtttgctttgtatgtcgcttagattccggctctcccgacgctccggtgtactttgagatagtcgccgaggtccctccagctgcagagcaaggcaagtcatgcttgtcacttaaacatgttgatcctatattgcaaatgctctattattttcctttaaatactgcattgttttacaatgataccatgggatgtttacctactgtcttagccatactaattatttccttgttcctttgttagcttgggttgtaacatgattagatgttggactaggaatttcttagccatgcttagtgtcacgccccgaactagtcccgaccagaactagcccgtgacgctccaaattaacctgttaatcgataccagtcccaggaaacagtgctagtatcacaagaagacagaatatcacagcaacagaggtctctttaatatagagaaggagtacagtcatgttgggctgcggacagatcccgagctcacaactgcattacaaaagggaagcggaagccaagacttggaccaaacaacacaggcgcgacttgggaactaggccgaaaccctaaaactcaacgtagccggcttgctcctggaagaactcctcgtcagcgggatccgcttcatcttcttcagcaactggggggtagttatttatatagagcaagggtgagtacgggagtactcagcaagccatgggaaataagtgtttaatgcaggcttcaaggaaaggctgttgtttttgcaattgattttatttgaactcttttctgaaaacaactaagtgagtgcttctcaaacgacacggatgagacagtgcgtctcgtccggtcggagtatgtgcaaatatatcattctttagaattgatcaagattggcacccggccaacaactttcaaacagccacccgggcctagctgatcccatcagctgcagattttccaaacatcgatcccctttccacaacagcaatttcacaagcagtagtcaaacaaaactacgctaggaatcacctcacatccgcccatgaccgtgggcacggctgttcgaacagtttgttaacctctgcagagggggtacactttacccacatgacattactaacccggatcacctagcccgtggggatcagccacgtcgggagacctccaagctttcatgataaggcatttccaaagccgacacaggtttaccatatgccgacgagaggggtcccagaccaacaacaggttaggtcccagaccatactgtgccaggaagcccaggggtcctccccgacaccaccccgatgaattcacatgtctctcggcatcaaggctcccctgataagctagttactcggccaggggtgtcccattccacccatgtggtcgtacttgtcttatgtttggatgaaattccaaggaaacggtccttaagtgcaagagcgggaaaccgtacacccggtacgttccccggtccgcggttttggaaattcatttagttcgcaagcaccgacccaggtgtcgggttttccaagtcttttgtaaaacccaagttttacccaagttgtttttcagattttaagtttgaaggcgtccgtcgatactcgcactgggtgcacgaatatcgagacgcaactagatggttgcaaggggacatggtatcacaattaacaaaggaaggatcaaatgcaacaatttaggtaggtctaccaatctgccttgcagacgggacaacagattaagtgcgatcctatcaatgcataatatttttcaagcaacataattaaatttcaaatataggctcaagatgttcaaaggtggcttgccttgctcgagatctggagcttgatcctcgaaatcctcgcactgcgggtcttcgggctccgaaactacacgcgaaacgggacaactcaacaaacggcgaaaaataaagccctattaatgatctctaagcgtgccattagatagatctcgagatttgaggaattttggaagttgaacggagtcaaacggatttacggttgggaagatattgaatttctaagattattggatttttggtctaaaggaaaaggatttaattaaatcctttttggaaaagaaaaagaaaagaaaagaaggggggaaaattagacttccctcgggcggcgagggcgcggcccgagagaaaggaggcggctcggccgagctaaatgggccggccggcccaaaaggcggcccagagcggcccaagacgcgcgcgcgcgggagggaggagagagagagccggtggaccgggctcaccatgcgcggtctcgggtgggacccgcttgtcagcggctcggctcaccgtgcggagggagcacgcggcgcggcactagggtgggggagggacgcgatgcacgcgcgcggttcgcggtggatgcggatgcggcgggcccacgcgcagcctcacggctcgcggtggaacgcgcgcacggggagggactgaccggggtcggctcgacccggtcttggctgagctggcgccgacgtggcgcctacgtggctgccacgcgggccggcgggaggtagacgatgacgccggccggaacggacggcggacgacggcggcgagcggtgagcgaaccacggcgatacaggcaa

SEQ ID NO: 7075 - DNA, 41992 bp, Oryza sativa
  unsure (1)..(41992): unsure at all n locations
taattacttcctctttcccgtgatttcttttctcctccactccacgcctctactttttccacccttccgctcatggttaaaaataaggtacgacagataaatcgtaatgaaatacaagtaacaaacatactccaatattttgttgtagtagataaatggtttaaaagctaatgctgtaaactaaacttaaataataaaaaaatcaaaaatcgtgagattatattttaaattaaaatcttggttttgataagctaaatagaggtcgattagacatctttaaagtagagatttttttttgttaaatttcattagaattgaactttctcatgtgaaaaatttatgtgctagtacaacaacttttagcttctgcattagccataatatgtgggtttatttgtgaatttgagcttttctaggggcctgatcatctgcttgtactgttcgtttacgtgctggattggcagtgatggagcctgcaagggattgagtgggtgctgttgcttgtcgatgtgcagtgtggaccaaccccaatttaaccattgcattgcattattatgcacaataaaactgttctgcgcttttcttgtttttttgttaaaaataagtagagaaggaagcaaactatacttgcaaaaatttggagacctctaatgctaacatactttgatacttcattatttcaatgcatatcaacatgttcatcctaatacgacaagatgagggagaatattaggtgttctcccttctaatctctatggttcctgttacaatatttcaggaaaaagcttgtccctttgtgagcttattatcaacctgcagcccattgccacatttttttttctcttgcagaacatagcttcaacctcaatatggcaaacagacttcttctatgttgtcatgttcttaatacttntaggagtaagtattaatagttctttttatgcagcaattgatatttcttcagttgaggccttgagggtttcattattaaaaaaatagagtaaattttataaaggtatatttttttatcaaattattgcaaactacatatntaagatgttgtattacaaaacgatagatttaacaccaaatttaccatattcttacatatttaaggctaagtacatcaaaacaacatatttgatattaaacttatcacaaaactataaattttagggtttaaatctttagcactatgtttgagttataaacatttaagttttatgcttaaatatgcactaaagctatagtttttttttgataattttattaataaatctatagttttgcgatactccaccttaaatctataatctatgatatatttggtgttaaatctgtagttttagatacaccatcttaaatctatactcttgtgataatttgagaaaaaacatattttttgggaatttactgaaaaaaagggtatatatgccatctggattaacagatgacgaacacacgagacatttgtaaagcataaatacgagtatactaaaaaggatgtgtatacattatgtcgacaaaaccgtagtctacatgacgtatgaacatatttttatttttgttagttctcaatatattcaattccgtgtaggtacttctaactttttatttttaacatgcatgttcatgtatttactaaagcgaacgaatttaaaaaccaactcaaaaacatatatgtatttctaaaagcgaacgaacttaaaaccgactcatgcacgaataacgtatcaaataccggtaaaaacatcttaaatttttataatagtagagatatagctcttcctatataaaggaaaaaatcaataggacactagaaatgataacttctaagaagaatctatctcgacatagcattatcttccaaaataggggtgtgaaaccggtggttcacttttcggcgagttggatggtggaccatcgacgtgtattttgacaaatgttcaggtgtctcatagcaattatatcccattgttattcagaaaaacagtaacaaattaaatgattgcaggaagggtaggattaagaaaatgtgagatggtaggtggggccatatcaggcttgttcttaatgataatgagcaggtgggcccttctggttgtccagtgagcgtgccggaaatttagggttgggggctgttggctcaatcaaagaaacaaccaaaaggaaagcctcagcagaaaatgaataaatatagtagcagttactgtgagtaggtgtttgaaggaattttgtagcagggacactttgtgacttggacatccaagcacacatcacatttagatcatctccaaatcacactttggcaaccaacttggcgacggtgatgcctactttttatttgatatctccaggtattctttccttttcttttttcctttctgcaaacgcactggaaaatcactatgcctgatctgccccttcctttgttttcttattaataattactaccctcgtctataactataaagaagcgaataataaaaatggtttcttcaacgaatgcacattgtacccaaaggtacttaaattcaatatttttttaaaaaagaaattaaaccataagagaactatcaattatattttaatgaataggagtaaaaaccctaatacgcttagaaaagcctcaccaataagttcaaaagaaaaacccatgaccatcaggggcagaaaatagctatggctgaatacatgtaatctctacaactagctccgtaatccctattattatttttgaaatgctacataatttatgaaaaaagaataagctctccttagcttagctgtatgcttgaaagttttctgtctcgtcaacctcacgcaataacaccaaacaccaaccatacacagctattgcatcgttcctgtgctttgttgcaaaaacagtacgtcgtcgtttctgagctttggagtagtaccgtattttgggaatttctagtaccgcggggtggtatcgtaaagtgcaaatgtgatactccagtagatcaaggatgtgtttagtttacaccaaaattagaagtttagttaaaattagaataatctaacaaaaaagtttaaagtttacgtgtaaaaatgtttcgatgcgatagaaaagttgaaagttataagaaaacaccgcgcaagtagcagcaggcgttgtattgtgtgcaggactactggcctgcagctgatactgtactgtagtataagatcaagtttaatagtatatccaactactagctctattttatttataaccaatatagtagctcattatacaatagttatatactacactattaatacatgttcctatctgtcatacacacactgcgtcttggagtccgtgctacatctggctacaaatctgtagcccgctgctcttctctcaccttatttattttcttaaaatatgtttgcagctggtttatagcatgctattgtgataaaggagaggaccactggatacacagcattgcacgcagttgaagtcgcatctggctccgtctgcttcgaatactctagaaatacatgccataccgtatagtatactctagtaccagtatatgtgtatagcctcacaaaagtaactgatgagctttgatccaagaagatcatcataacattgttattctgggcttggccggaccaatatttgttttctaaacaaaagaagaaactatacccttgtataaatgctaatacacgaagaaatattctctcctttctaaattgatcatcatataataaaattcaaaattagtcaaattgattataatataaccgcattgaaactgatttcatcataatataattaatacaacatgagagaatctgtgcatgctaaggtataattggtatagtgttttaatcgatgcatgcattgtgggagaatgtgtgcatgttgtcttgattgatgtgatttaaattatcctttgtttgtgtgattggtgttttgattgatgtgatttaaattgcatgcagcaaagagcatgcggttttaactaatttgttttttttctttttctagaaacacaacacaaacgtggacgctcataacgtgtacacacttacccttatatacacacatgcataaaccccaattataaacactcataacacggagctatctcgtaagcatctctagaaaattgggctcgcatatgttgagattcatgaagtcaccacagtgggtacatcatccaccactctagtaaccgtgtcaaatataaaacttgaatccgagtgaattgtccttaatactcctagaaggagaaagagatagcagttaacgctgtagatttattccatcatgtaaggccatgtttagttctcaaaataaatttttcacgctgtcatattgaatgtttggacacatgcatggagtgttaaatgtagaaaaaaaactacacacattacgtgtaaattgtgagacgaatcttttaagtctaattgcgatatgatttgataatgtggtgctacagtaaacattttataataatgaattaattaggcttaataaattcgtcttacggtttttcggcgtaatctgtaacttgttttgttattagactatgtttaattttcaaatgtgtatccgtaaatgcagtgtgacaacgagatccaaaaaggaaatttttggttgtcacatcggatgttggaacaggttttttacacgaatgaaaaaactaatttcataaaccgcatggaaaccgcgagacgaatttattaagcataattaatctgtcattagtatatgtgggttgctatagcacttatggctaattatggactaattaggctcaaaagattcgtctcgcgatttccatgcaaactgtgcaattagtttttctttttatctatgtttaatgctccatacatatgtccaaatattcgatgtgacgttttttgaaaaaaaaaattaggaactaaagaaggcctaaattactctcggcccatgggctccaacaaacaaagaccttgatttcaggcagcggcccgtaaaatgcagcgggaaaggggcggaggttggtcccacatgtcagtgacggtgactgttttcaaaatggaataccaaccgctctatcctctcgcctcgtctcgccttgcccgcctccgtttcaatccccaaatcccctcttccctccctccgatccctagggtttactccctccccccgccatggccaagcccaagactagggggaggaggtcggcccccgcgccaccgcctccgcccacgcctccccctccgcccgcgccgccggcgaacgtgatcgacctcacctcctcccccgacgcctccaccaccaagggcggcggcagcggaaaccggaccaagcgggctcccccctcgctgctcgacatcgaactcgacgggatcgagatgtggaccccgggccagaagcgccgcctcgacgaggactgctgcatcctctccgccgacccgctctcccccgacgtcgtcgctgccaccgccgccgccgccgcgaacgatgacgtcgccgtcgtcgccgagcgcggcaaggtacgcccgctcccccgcgccccatttcgatcgactcgagtgtgagacgcggcggtttcgatgtttgcaggtggcgtgccgtgactacccccatccgagatctgcctgcgccaagtttccattcggcactacaccccatgatgatcattgcgagcaggtaccccttgccgcgcattcgatactctcactagttcaatactacatgtaaacaaaccaccatatgcaaaattacagatgtgataaacaatgcatttccattacaaaatcctgcaattgatactttcatgtccatacatctagccatagaagattttccatagacaggatgggtatagaaacacacacaaaaaaaactcacaatgtggcttctacttgcaacaagttatggagtacaatcgttgctcgctcagtcgtttgttactgcttggtggttgtgaaaatttaggtccatttgccttttcaagtgttctagtattacacagattatgtacaggagagaaagcaccactgcaccacagaatgctgtcctctaacagttgttgttcactaaaattagcttactttatgtgatcatgctttgctatcaaattacctactaaaaattcaattataatgctccttactgcaaaaactaattgtttgggattttcttgttatgtatatactagtgaactgttagctagcttgatcatgtagtgcacaggacagagcactaaggagcttactttatgtatctataccaaaagtagtaggtaacagcttactttatcagtctttcaagcatccataaaccctattacagttgcactactattacataaatagtaggtaacagcatcagtttctgtatatggtgattgcttccatgttgcagtgagactgtgagagaagcacctccaatccttcgttgcgtatcatggacaatttgtccacaagaattctgagagatggcatggtttaatgaactcaatcaccatgttccctgttaaatactgaaattgaatactagtgtgcgttgtacacttgtggtagagacgagctgccttgacatgtaactaaacttgctagttttgtcgagtatacaaccacaccacttaaatcaagcacgcgtgttggcgtgtgtctttcaagcatcaaaatggtctactgtgtgttagtgaattgttggttgacatccatacaccctattacagttgcactgctattacttatctgaattgtcaccaaacgtgttcctcatgtgttgcagtgcttctgctacgtatgcgacgtgcctgccccatgttcctcatggaagggagaaaaagggcattgccatgcgtcggacaaggacaagaaatggaaggtcaagagaacggccaggcagaagcgaacacaagtagtcaagtagcgcttacttgatggagaaaattagttgatcccacgcggcgcaggcctggggctggccatttttcacttaccagtcgggttactgcagcagtaattgtacagcgttagaatatggagttaattagtactcatgttcctatatatagtatcaatgggttagcaacaataatagtatatgatataactatggagaattatcagtatccattttattgtggcgtctaattccagcatcagaagtgattcgcgtgctatgtaatgctgcgcggtcacagttcactgctcctcctgcatagctcaatcctctgttttgctgcaaaaattggaatatcgtgttccatagtagttctactaacataacgttgctcttttaacatctggattaatcatttcctgttctttaagtttttcctactactgcaattcaattgcagtctgttcgtctactttaaacccctcgagatctgaatatgtttgcatttatgatttgccgtccatctattttctcacttattgaggctcttcgttacccggtgtgcctcttgggactctgcaacttgttttaaatcaggcttgctatctggtgtatataaatgtagggatgaaaacggtcggaaacgatcggaaaacagcctcaaccatttccgtaaccatattttttcttagaaacgatatcggaaatgataaagtcggaaacgaaaacgatatcggaaatatcggaaaaccggaaaaggaacaatacaaacggaaacatgtcggtacagatcggaagccagtaacaaatacagaaatattaaactataaaaatatatatttaactttacataagtatgttatatgtatacataaattcaagcttatactatataaattataaattaactttattttagccatgtacaaaatttagagatttgattgaaagtctgtcaatctgtaagttgtaggtcaagtatagacataccctataaatatcgacatatttaaaatacggtaattaccacattataagaaacggtaatttccacaagaatacggtaaatacggaaacggtcggtataacagcaaaatcatttccgttttcatttccatattttttaccatttccatttttgtttcggttgattaccatttccatatggctcgaccggtagaaagtcgaaaacgaacgccggtcggccggtaattaccgttaccgttttcacccctatataaatgaccactttgtatggtgatcgccttcaagcaaaagtggccaagaaacctccacaagagaagggagaaatggtgaagatcgaagaggagattgatgctgagagtgacgatgactgctgcgagatagaccctgacgagttcgccaggaaagttcagctcaaagtatctgatgaagtcatcctggtagctgccaaagggcaggtagatattctttcctatgccttgttgatttgttttgttccatcttctccagaaatctgatgatcattgtaccattgtagttcagtttaggttttatctttcttttattttgttgatgcaaaacctgtgtatccatcagacaccttaggaagaattttcaaaatacaaaatatgcccccaaaatatttgtgatatgaaaccatgaaccatcggaacatttctcgtgtcataatctgtagatcaaagttgatgcgaaccaaccggagggctttggaaatttgttggatctctctgactctgacaacaacctacagccgcatcatgaatatgctgctggagatcgcatggatcatccatatgagattgatgaagataaaaccactctagaaaagctggttgatggcgaggacaagtacagagctgatgatctccaggtagacgaaggtgatcgctgccgtgaggaagtcatacctgtcaagatatcggtgaagagcgaacctgaagaacacggtgtcattggggaagaagatgcatatgatcttctcccggagatcaatggcttcagtgagcagctgttccctgatgaacgcagagtatttgatgaggaagacgacgatgacgttgttgtcatcgggagagattctctgtaaacgggttccgtttctatgtaattatctatgtttcttcttcaaatgagaataccatcttgcgaaaataaattttgtggtactgtttaatttttatgttgtttactacacaaatacaagggcatgaatgagcctctgataccttctcttatctacaatgatgaacatgtaggtggcactgagagacttccctcatccaagacacttgtgtgcaaaattccccttcgataagacttctcatgagagcagctgcagaaaggtaattcgattttatccgtgcaacttctcattttttcacctcatctatctgcagacataatactagttgtgtcgtgtgcttgcatattgcagtgctattgctctgtgtgtgaagttcctgtttccagttgtctcaagtggaaaggatcagaagggcactgccatgcaaccaaactaacctagctatctcagaatcctccactttacgattgatctatgcatgatcagactgtactaagttcactagtttttcctcatgggtataattctgcctatcaagaaaacaaggttcatatcgatttatgcatgatcaggattgtactatgttcttgtttttcctgttgatataattctgcttatcaagcaaacaaggttcagatcacaagtaatagctcagtgcatggtactatgcatatttgtgatgtgctgaaaaagacatgtgattattttgggtaacaaagcagcttgaatcaattcatgccatcattttttgggcaccggaagcccataatttttgcaagatacataactaattcaccactgtttgtccaggcggcataatttaggggatatgctgtcatagcttcccctttctttcgaatgaaaatgatggcatatcaatgagcggcaaggggtggagttttccaaacaaattctcaccccaggtgctcccagataaattataaagtcattttagatgatgcaatacagatgattcaatggcctggtttgaagccattaattataggtgccccgttaatttctggtgcagctcctctgttcttcttgacgtaggcagcgtattcaccatagtgcatagtgtacaaggtactctggtagcgggtgacacggagtttcttcctcaaagagtcggttatggtaccattgtaacctgccttcctcatcagtgagtcaatggtctctagatgtgtccatcctgccaggtatcaggcttcatgttatgcatagtttcatagaaatgaagaatgagacttatcactagggtgatccaggaaaaactagatgaacaccatcaccttcttttttttgttctatcatgcttctgaatttgtattttcatcacaatgtatgcaaaaggtgaaatatcaagtgaggcaactagataactcagcatgggaaaatgttgaacggtttaactgggaagataacaggatccattcaggtagttttttcatgcaacgcagatcgaacatgctatagacaaaaaacgaaattattccccacatgaatttaactttgtaactgagaagaacaattattaaagtgcttttagtgtttccttgtggtagttgcaataactaataacttagtgacaacatgtgtagaaggtgaaaatgcagcattcagcagcaatatatagatgcaagtaagttttcaccttcatgggcagcaacctcaggtaaataagttgcactgcgcctcatgttatagtctggatcagtgaattcaataattaacccatgcttacccacctgcagtaccacaagattattagaagagagtgaaagaacgactaaaaccaatgtgtagttgcatacctcccagtcaaggtggttaagtgcagtttcatattcggtcagtatagatactgtacactccaaatacggcagttctttcgactgtataggaggaaagcggcggtccctcaatgcactgcgagagagtatatttatctttttgtctgtcttgatataacacaaggagtcaacattacctaggttctgttatgtgtagcaccccaaaaaaaattcctccaattgtattgacaatgagaccatgtttcagtaagaacttataaatgggcagcagtggttattcagtagttaccttgtgagcgcatactccttgaagccagtgacaatctgacgagcctccaaggttccaatgcatcctcgaaggcgtggttctgaaccattggtagccttcttccaggtgacaaacaatgggctgaagtttacaaaaaaaagtagtcccattgagttcagaatttggttgctctagctagaatattgtaacaagaaatcacaatacaaaagctagacatccttaacatgtatcacaatggtagaaaagcatctcaaattgaaggcaggctaaacttaaaaaaaacacaccagaaaaccgaaggcattctatgcacccctcctaagtatggtcaaaagggggaagatactgtgtttgtgacgatttctaacactaacaattcttcctcaagataatctcaacaacagcaacaaaattcccccctctgctttcagagagaatgagacgaagcaatccctctgctgaaaggcaaaggatacaaccctcttgtgaaatgtggctgctttgctttctctctgcaagaatatactaatactaacagtaggccataggaaggccatacaccaaaatcggcttaagccaacaagtaatcgatctgcgtcgcagatgacgatgatgataaatcaaagcgaacaacaccctccagaaaccgcgaaaccaaaatcaaacaagaggccaaaggcggcacctttccccccaatctaccacaccaattgacccccaaaccgcacgggaatcgctcgccgcaaaaccccccaagctccccttcatcggggaaggcggacgacgagacacacgcgcgatcgcggcgggagcgagaggaggagggagggggtgcttactggatgccctcctcgaaggcgggcggcggcggctggtcgccgctgtagtgggagacgagggcgtcgaagcagtagaccgccatttcctccgtggccaccaccatcctgtcctggcaaggggcggcgactcggcggtggagctcgtcggagaaggcgaggcagccgccgctatctggaggaggatacggaggagaagcgatggatgcgcgtcgcgttgggtttgaggtcaagtcgttaacgcgacgagctccttttttttatttggatggtctcttttgccccttggattttgtggcatttacgtgttttttatggctataggtggggacgggaggggtagatacgggatttccagtagatttatctgtagctagagtacacaaatctgcaaaactgagaacaaacgaccagcgtgtttccttttaaacaaaaatttagcaaacaaaaacaacgcacatgtgagtgccaaacttatctggattctggacccgacacgtctacgtttttggcagatgcagtagcatttagaatgaaatagtaaggtcgagttttgttccaaactttcttttaaaactttcaatttttttatcatattaaaactttcctacacacataaatttttaatttatctgttacatcgtttcaatttcaaacaaactttcaattttgacgttaacgcaccctaacccaactgcacaacagaacaccaaatctgaattcaaaatgatttgtgtttactttaatctggaggggaggggtagttgagttttaaccatttcattatcttcttcttcttcttcttcttccatggcttgcttccacctcttgccaacgttgacatggatgtaggatagtactatcagcgtttccctatcactctcccccaaaatgcaagcctgatgctgacatttttgctaatccacctctggggccaggcaaggcaaagcatgcgtattatgcaagcagcatccattttggagaaaaatagtgtgagctagaaaaatcaaagttttaacatttgatgcagaacaagcatgctactactacttgtatactagtagcacaatgaaaaaaagaatctatcttgttcttaggtgcggctttaggtaggccacttattctttctgacttaatgctccagatatcacagtacagtaccacatcaacctttcacagatgagagcgactcttgacccaacaggatcgaatcccatccaacaaagtaggattcatatctagtacatatgcaccatcctgcaacttggcactaacaacattttctcttcatttcaatgcgatttcagtggaccacattctaaacagaccaagattatatgtcatgtctctcattatctataaaaaatatgtcatgtatcttgagtgtacacaagaaccaatgaaagcacatgaactattgccactgccttatctaggagtaatatcttcagttcaatatgaaatccatgaagtatgtagcatccttttctggaaccaaatttaaggaatgaaattgtaacaaacgtctgaaaggactgacaagctgggtagctcagctgtactgaacaatgagctagctaggcctaaaagtaaacagatgctatatacaaatggaagtcctacgactttcagctaaaacgatcagaagtttgaaacatggtctgtttcaatatctgaacaaaactccaggttatctaggtgaagtgtgaatgattcggccaatctgtcggcgtcctgaacccgtaagcgtgtaccttgctgcgcaacgacaatagcagctactcgcgaagcgagcaggccaatgctcttcaaatccgaagagccccgaagaatgccatatagaatccctgaagcgtatgcatcaccagccccacatgtatctataggtacacatggtggtggagggatgtatatcgcttcccctttcactccaatgtatgaaccgtgcacaccatctgtcacggatactagaggaacagaatggcttaagtatcttgccgctgacatggggctatctgttgagcttagctcgcagaatgccctcgcttcattggcattggcgaataatatgtccgcatagtttgttacaatatccctgaaaaatcgttggtttatggtcagtacagtacagtatagttcagagatgagatagtggctcactccataatatagagaaagcatacaattaataccataaaaaatatttttggtttaccatcagtacaataaggttcagagatgaggtagtggtacactagcataatatagagaaaataatacagtcaacaccccaaaaaacgtgatgctagcaggagatagtttgcaaggagactagtctcaccaaaaatcattgtagcaacgcttgatgcatgacacatctgatgctgtaactgcaataagtgagccattcttatgagcatcttcacatgcttgcttgatggcttcgatcgtgtgaggtagctcaaataggtagccttccacaattactacatttgacttggacactagactggccaaatctgaatcataactcaaagttgacgatgttccctggaaatacacacacgcaaaaagggaacagtaaggtcatactcctatattagtgccagcaacacttctatatagttgtccagtaagtaaattatacacggtgaatgttcaatgagtcaaaaagtacagctaacaagtaataagacctgtcaagtaaagttgatatctgatggtggttctcattgatacattcatactaaaagcagacctggttaaactactcatcttcaaaaattaaaatttagtctgatattgcaacagaagtccctagaagggggaataacaaccctgaagtacaaacatatcaactgacctgatatgcaagcatagttcgttgtgcatctggagttgttagaacaatcacagttccagtagtcccatctttgaccggcttagacaagaaatgcaaattagcacggcgcaattttgccctaatagaacaattcaaccaacagtgtgatgtcagccaacactctgaagcttctagtgcagcaattaagacatcagtacgtgcaaaaatatgttgtcaaactagtgaactacctgtaaaaactaccaagtgggtcgctgcccacactgccagccatcgcgattctaagctcggggtagttagtggagcggctactaccaagccttgatagcgcgacaagcgagttggacagtgagcctccagcggcagccttgtagctgcaaccatccatggcgcgcaagacacgccctctctcctcgtggttgacaacctttctggtacccttttgtatgcccaatctgtgaaggaactcgtcgtccaccatccctgagaaatcaacctgtttgcaggccaaaatcccagccacaaattagcattgatcacaacagctcaacaacctattgaaacagaaagaacaacatcatagtgataattatttccaacacaaacacataggaagaaagaagccgtctttttattaagcgttcatgcaggttgcacgcacacgagtagtgagtggatacagtggcgacagttgagccaaattagccgtttcgaattcgacatttctaccataggagaagtaattttcttgtatgcgagtactggttccttgcaaatgttcatcgatcaggaacacgaagtaattaatgaatgaatcaataatatagatttatcttatttagagtagaattgaagaagatgggggcgtaccatggcctggccgaggccgaggacgtcccagcgctcggggccggagggaggcgcgtggaggtcgaggttgacgtcgtcagcgtcgagcgggcgcaggacgccatgggcatcctcctcctcctcgtcgtcactctcagccgcatcggcatcctggaatcctcctccgaggagagctctcggcagcagcagcaccaccgccgccgcccggtgctcccaccgcacggcgaagcggctgtggccgcgtggcctgggtacccgtcgccggcagggtcgcggcagagaggaggaggagaagcggtggaggaggcgggaggaggaggcgagcgccattgttgcggaggagaggatggcgatcgatgccgtggagctcccgcggccgcccaccccaacctctcgtctcttctctatctatcgccacgcatcccgacctcgccggtagcgtgggccccacctctcagtgactctgtaatgggtaggcgtggcggtggacccacgtaatgggctacgctgcctgtaaatattcgagaaaggaaaaaaaaagaagaaacgggtaattcggaacgggattgtcactaagtccggcccatgggccatgagtaagtctaactgggcccattttaatagagagatccgtgtcactaagagtgggagtaagtttgctttaggtccatctttgaattatgtcttccaaccgcaatatgagatgtagtgtgtttctcaatttgcaaaactgatttacccgaaaatctagggcactagggggacagtatagtgtctaattttggctgtcgtggtgagtttcccccacatgttgacggcagagagacacagggtgggtggagctgtggaggtgatgctggaccggcaggtcgccaacgacatattctcctatgatgcagaggtggtgagggagtgtccgcacagcaggcgcgacacatcatcgacgagacacctaatgctcatccccaaccatcccctccactaggctatccacgaatggcgcctccgtcacgccatacaaaacaagtggcctcttggtggctgcttgccaccctccagtcgcacacccctcgcaccataggccgtcgcccttctccctaccactcatcacctcttgtcactgctcggagacctagtgataactggggaagatgggggagacaggaggaggaagaacatcgcctacaaatctaccacacttccaatcaatcgtaaccatcagccccctccaagttggtagccatccttctccccaccactcatcaccctctcgtcactgcttgaagaaatggtgacaaatagggaagatgggggagagagaggaggaagaacgtcgcctaccacccttccaatccatcacgaccatcgccccctcctccaagtcagcaccccgcatgcctttctccgctcaccaccttcttgtcggccacctccccctttttcctcccgcttgctgctctcccatcggctgccgcttaaaagtttggtgagaatctgagagatagggagtgggaggagaatagttggcagtatgcttatttaaatacatacttatttacttgattcaaacatattattatatatttcttttttgccatgaaaatgcttggccaccatattggcagtgtttagttccattcaaacttttaaaaactccatcacatcaaatgtttggacacatatatggaacattaaatgtggacgaaaaaaattacacagtttacatgtaaattgcgagacgaatcttttgagtctaattacgccatgatttgacaatatgatgctatagtaaacatttgctaatgatggattaattaggcttaatacattcgtctcgtaatttacagacggaatctgtaatttgttttgttattagcctacatttaatacttcaaatatatgtatgtatatttaaaaagaaaattaacacacgaactaaacacggccattacgctgaatgcatatatgcagccagccagcagtcagtcagcagttggaaccgtattgattatgttgctgctccatggatggattgcatttactactgtagtgtaaccttgcctatagccagttgtctgcctgctcacgcagcatattcattcatcgctaattaactcatcgagaaggggagtataggtagctggtttacttcccaactttttcctttaaaattttaatttttctatcacatcaaacttttctacacacgtaaactttcaacttttctattacattgtttcaatttcaatcaaacttactaaacacacccttagtataaatctggagaaggcgaggcaagtgaatacagtacgagtgtacgacttttcatctactatcagagaatccagaatatcaccggttcatcataagatcccaaatctcatgggggaaattctcaacagaatatctagcccagtttagttcacaccaaattttctcaaactctcaacttttcatcacatcacatctaaaacttttctactcacataaactcttaacttttttttctaaactaccaattttccccaatttcaaaaactaaatacagccataatcacgttcgttcgttcgaaatcctcaacaacagaagaggccggccgggtacgaaaaaggtcaaaagagtgaggagacgacacttgacagctgcatgcatatgagagcgagatgtcctcctatgaaatactatgatgtcatcgtcgttgtgtgccatactttccgttgtgttggttgcgtcaggcctcagccggcgaccaacacatgcatgcatggcatgcgcgttgactttttattttgtgtgtgtgtgtgttggttggcggtcaatgcgaaagaggcgacacatgtgagttgggccaaccaatggccatgcatcatctgatcactcgaatgaatctcagtgcaactagcactgtgtggttacggatcggttatctgacaacatatatatggacccccaaccctcttgatctggttgtacatttgtaggccatgcatcgtcctctattggagtactagggtccgtttaaaagacctataactattaaatttaacttagaagttagatatagagtgtagctgtggagaatcataaactcatttccatatctttagcgttttgttggagcgctgcacccagtttcactcctattttagttggagttgaaactgtttggttaagctctaactacagaagaaatagagttgaagctaaagttatgccagaaaggtccctagtatactcttgcatgaccgagatcatttaagctacgactatattactcatgaacaaagaaaaaaactgaaagtaatttataaataaaagttttatacttatatttgttattaataaaaaaagactacaacggaaaaaaaaagctaacataaactctcaaagatattcttttttaaaaaaatatttttttttactactcatgttatctagtagtatgattctataacaaattaaaaagcagatgaattgaacattataaaccttcatctttgaaataataatatatatatccataatataaatttgcacatttgtctgctggatcgggtggacagttcggcccacccgggatgtggtcgggcccgggccctgcctccgtgtttctcaggcccaccaccgcccatgcacagggaccaaccaaacaccagcagctgaccctcgcagcgggtcccacatgcagggacaggtggcagccctcggaaatcgcagcaagaggtcgcaggcggtgggtcccacagtagtatattttatcggtctcgggacggatgagatggtcacgtgatgggcctggaatcctggcccggggccccaccaccagcctcaccacctctgactcacctccgtgttcacacccgctcccggctgcgtcgctgccatgtgggccccacactggccgcctgccgaatagcctcgctggtacgtgtccgtccaaagtaggcaggctgcagcaggcgccacttttttttctctctcttttgtaatttcttttttcccgcgagattattatatttaaaaaaattgggaagggtagacgtcgtggaaaagaggcgagatggcgcgagtgagaaagccgagacggacagagcaaaggataaacaagaagcaaaaagaaaatcaatttgaactggctgattgattcctcctgcaagcacgcccaaaaagacaagcccttttttaaattattgtaatcacagtggtaggagtactagtcccaagccatcaatactcgaccactttactttatcccaatttcctgcattttttactagtaggaggagtacttgttactggtactactgtagtaccaccattatatacttgtactactagtagtactatatgggtcagttattgaattttttttttttgaattttgaattgaatgggggcggctgggttttaaaatgagtaaatagcaaatacttaaacaggaggaaactgaaagctcttttgaattttctattgttagcggtggtgggatggagtaaaaagttgggaaaggaaagccagtgatggtttttatgacttgcatcttcacgaactccgagccaaaaatgctttccccccccccccccccacctcctctcctcccctttttatttattgctgcagtagccgtgtatgtgtgtgagagagagagtgaatgctggtgtgtacgcataacaaatttcctttctccacccctttcttcattactactactacagctactatacgtagcagttgctttacctttaataattcctttcctttccagtaatttccctggtattttcttctcctctctgccttgctttgcttcttcctcctcctcctccacctttgccctcctgcattttgcttgcaaaggataggagttgcagtactagtattgctctctcattgcatgtgaagctagcaagcaagcaagcaagagagagattctaggtgagtggtgtttggtgtgaagggaaggagcatggtgatggtggcatggctgatctgctgctaatagcaaggagtagtagtaataataatactactagtcactcatcatccttctccctcccttgagcttagctataggtaggtagtaacactactgctctactacatcctactcctaactcccacctaataataataatctctctctcacacatcacatttctgtttaaaaaaaagtcagcatggctatccatcagggggagtagtttaattagggagcgttttttcttgcttaattcgcagttaatcttgcaagtggtctttgctcttgcagagtggagaagaaagaaaggagagtagtcaaagcgactctttctttgttttcttgcgcttcctcctcggctgagctcagcagcaagcaaacctgctcctgctacagcagcgagcgagcgctagatctgaccaaatggaggccaaggacgtctcgccgctcgtcaccgtcccgcccgcgcccgccgccgccgcgccgccacctgcggcagcgcccgcgccgccgccgtcccagccgccgccgccgccgctgccgttcgcgcagcaggcgccgccgccggccgccaaccccgcggcggcgcccatgcggctgtcgttcgaccagatggcagggaaggcgcccgggggggagcagcagcaccaccaccacccggggcccatgctgtacgcggcggcgcccgcgggcggcgccgcgccgccgccgcagggcggcaatgtgatgggcatgggcgagctgatgcgcaagaagcgcggccgcccgcgcaagtacgcgcccgacgggagcatggcgctcgcgctcgcccccatctcctccgcctccggcggcgccgcgccgccgcctccgccgccagggcaccagccgcacggcttctccatcagcagcccggcgtcggatccgaacgccaagcgccgcggccggccacccggctccggcaagaagaagcagttcgaagccctaggtagtaccattttcctcggagaaaaacaaaagcgccttttcttcccccgtggattccggctgaatctaatcccaaactgacgcttttgccttcaaatcttgcaggctcatggggcatcgccttcactcctcacatcctcaccgtcaaggccggcgaggtaaacccagatctcaaaacaaaacgattatcttttcttccttccttcctcctcgatccatccgtgcagccagccattgcagagtctgctgctgctgtacagcaagtggtgatggatctatgtctgcttttcctgcggagtggatttggtgcacgtactaactccactccactccactccagccatgaccatgaccatcactggttaggttggaaaggaaccaaccaaggttgcgagacgaggacgagctgcggtgtccgtcagattcccagcatggctgtcagttgaccggccccggccccacggtcagcggcacagatagtgggcgatgcacctacgttgtcgtggactacgtgtagtagtactcctatcatcaagtacaacaagccttctctggctggctgtgtagtagtacgctgtccaacagcaagtagtagtagtagccacacctgtggactgtgactgtccacaactccacacctgcactgtcttgttcatagtcggatacaattgcctctactgataggaactaggagcactcgcctgcaggagtctcctgttgtggtgtgcttagagttccatgtttactgcgcatctgaaaaaaatgtcatcttcagttgtgttatcttgcactgctgaattttctgttatacctgcaactgactgaattaaagcacacttgatcatacgattttcttaatatgtttagcaacctttttgaacttgtcataaagtaaaatttttatatttgtatccagatgaatttgctgaaggaattactttagccaagtatgaaaagacctgtttttttccccgtgtaactctcctaaattagatagaagtggatgcaatgggctgattgttcatacaaatttaaatggatttgcttttcctgaaagtatctgaatttgtatgagctgtcaggcataacaattcaattgcaatttcaagctattcaggattcttagatacagatacttcaattatatcacaacttgggtttttttcttctgatatcttcaattctgcatcttcttttttttgggggttttggtgcagttatatactttccttagtgcttactaggtgtctcttttgaatgcaatgtgagttgtgattatagtacctttgtgttgcaactagactctttcttcatgtttaatctagtgattaacccacttggcaatgttggttatagtaaaaacttgatttccatcattaactgtctactgtcttcgctgacaggatgttgcttcaaaaattatggccttctcacagcaaggccctcgcacagtttgcattctctcagcgaatggtgcaataagcaatgtaacacttcggcagccagctacatctggtggacttgtgacttatgaggtatttgtcttgtgacttatctttggtgcactttaagaattgggcttaatacttctcatttatgtgatcacaagtgggtgtggttctgtgggggttattgttgcacctgtatcttagaaataaaagggggcttctcaatgatgtatagactgtagaatacatcagttttgttttgttttgttttttttgtttctaacagtggtatggctatagtagagaaagaccaggttctggaggaaactaattgtgcctttttgttaactagaacacccagtcttgttctgttggaagtttcaggaaatctgttgataatagccactagtgtagcactatggattcatctaacttcaagttcttttgtcgtgattaaaccaatgaatgtgaaaaagaaaatcaataatgctactactttgacagtacacaattattcatgtacctggaggaattagctctgtgaattgtgcatgctttagttatttcctattagcaaaagtaactactgtatcatgttctgatgaatgcgtattattttgtgcagggccgatttgagatcatctctctatcaggttctttcctgcttgcagaggatggcgacactcgcagcaggactggtggcctgagtgtcgcacttgcaggatctgatggccgagttcttggtggatgtgtagctggaatgctgatggccgcaacccctgtccaggttcgatttcgttctgtataacgagtgtcacaactaacgcatctgttccaacttcttaatgcttaccgggcatttctgccatcatgtcatatggctaccaggttgtcgtggctagcttcatcgcggaaggtaagaaatcgaagccagtcgagacaaggaaggtcgaaccgatgtcagcgcctccacagatggcaacctacgtgccagctccggtggcgagcccgccatcggagggcacatccagtggatcgtccgatgactcgggcagcccgatcaaccacagcgggatgccgtacaaccactccgggcagcagcagcaacaccagcagcaccagcacatgccccctgcttacgcatccggtggctggtcgctctcagctcatcatcagaacaggcacgactctgacatgaagatgatgtcgaactaacactctgctcggcctcgaggcgccccatttgtttggttgggctgaagaaggagctgatgatggatggtggatcgtgttcgtacccccctctgctagctaagagatttaggaccatggtgatgaatgatctcagagagatgtgttgttgctgttgtttttccttggagtaagattaatttaggcgctgttgtaacgctgtagctgtcataattaagccgcctctaacgcaagagtttattatgtgttgtactaccggtggatatgccttctgcttgtctgtcttgctgagatcttcacctccttagtaggctagtagtagtctacatacagacttgtatgaatttacctgaatgctttgatttcaattcgagaacttttactaggttgtttctttttcttgttctgatccgctgtgtttgggagatgaatgtttgtgttgctgtgctggtaacactgtttacggtgaaattcatgggctgtttttgtcacggcgataagggatccacgccagggagtatgcctcaacttcaactcaagcataatatgttttcagctgcttcgtcggaatattaccgtgcaatatttgttcggcgtctctaaacgtagttttattgaattatttttcttcttctaaattatttatatccctttttctatactggtcgatatttgttaaatttatttataaaaatatttgatatatatctataatcataatcatatgtagatagataactataattatttcaaaatgggtcactataagaatccgatcgatggtttgtctcgaactgaaacctctcggtcacaaacatcagacctactcccttcgtccaaagaaaatatctatggacaatttcaaactgtcaaattgatttttttatgtgatggctttgaatctacatacagatttaaattcagaagttttttttttctggtgctgtgagaatattagagccccttggttgccctaataagtcgaagccaaagccagagccaaaatttgaatttttaaatttaattttaaagttaatttgaagatatttccaatatagtttatttttaaaattaattttaaaatcgctaagaacacatatatgaatgttttatctatgcattgatttttttaaaaaaataaatcgtttagcttgttatgaatacgagcaaccgatgagtaacttaagctttatcttcttatcttggcccatctcttttatccaggctgagtttggcccggatgagaagatacacacaaagttatttggttggttgtattggtttagcatgactagtatgggatgttgtttggttgcttgcataaaagatatggtttgaaagaaattttgtttggttggatgtatggattgggtgcagatacctctttatttagttgggtgaggttacctcttcaatgttatatgaaaaaaaaattacctctcaaatgttatatgaaatattctgagtaaattgtactacctctatcctctaatataagggatattcactattttcatataacgtttgaccactcgtcttattcgaagaatttatgcaaatataaaaaacgaaaaattatgcttaaaatactttggataataaagtaagtcacaaataaataatgattttaatttttttcgagtggtcaaacagtgcaaacaaaatatcaaaatctcttatattaggggacggatggattactttgcatcatgttgcctccaaattaatttcacttatctagatgtaaacaattgatcaggacgattagggttcaaaatcgtgaaaagaaaattattttgacccaatatgaccgatgtatggtaactaacctgaaccccacgagtatatatccagtccaaactccaaacgcacttgacttcctcctcgtcatcgctgattgcattcgctccgagatggccacgccgcctcccaccgactccgaccaggttcgtccgctgcttcctcctccttcgccgttcactcccgcgttcgattcctgcttcttttgcgctccgcctcgttgggctcacggatccaagcccaatcaaccatcccgcgaattagctgctgctttccctcattcgattcgctcatactcagattgattgatccagttaggttgttttaacatgctcgattgcgtctgtagcagcaatttgatcgattccgctaggtttgcttctcccctctaatttgattgctgatgcgactgtgtacaactgtaatagacaatcgcccatgggtggctttttcttaatcaccaccatgaatgttttattagtccttaatcaccgtggcgattataggcgcatacatggtcatatttcattcattgctaatttctatactcttgtcgtagttcacaggcaattcagaaattcgactagtttactgcaaacagattatgctaattacttgttacatctgggtaggtcagttttatctcggggttcaacttcaaaccattctgccgtagaatttctacagataaaaaataatagcactgtcttgtgtttgacgaccaggattgtttccgtatcctctgttcgtctcaactggcctcaacaacacaactattttaaggaatatataagcagcatggagagtttaaactccattctaatttggttcggttttgtctgttgtgcgtgtaattaggcatttaaatttcctatttcatgttcgttgccaaacggccaaatggctacactctggtattcgatgtaacaattttatcatatcgggaactgttgttatgatctgtatcttcttcgtgtgctgtctactacaagtcttctctgtacaatgtcatactttttatgattggttctacctgctactgagaataccttctgctatttctctgtttgccaggttttggtagaggcaaatggtgtaacacggacattgcttatgaataggccaaagcagttgaatgccctctcctctgcaatggtatgacttctaaagaaaaaaagtgacaatgagtcaataagtaatggagcatatatggtattcgtggctacatatagggtgcaggaacactgatacgagaaatttatttttgctttcattttctagataacaggatttttgaggtgcttcactgcttatgaggaagatgaaggagttaaactattgattgtgaaggtaatgatcgtgtttgagtcctacaataatgaaatatctgatgtggtccatatttaaacaatgtattttgaggtttatctttgattaaaaaaaagaataacgaggtactagctaacatcaaacatgaattacccgattaaatttccaaaatcgagcattcaaagtttcatccgcttattgaagtttgaatcatgtacaaccaagttgtagtaacgtaaaacaccaatgctgtccatgctttttgttgcatgctaactgtccttttgccatttgtaaatgtaattgattttctgttgctgatatatgagtcttgacttattgggataattccaactttactacctcctgctgttacctttactgctgctgtttgtgctcagcttgatttctataactccctaccattcttgtcatcacttgttttttcctttgtcaggggaaaggaagagcattttgtgctggtggagatgttgctgcagttgtccggtctataaataatggtaaataaaacatatcatgcatccatgagaccctgatgtcaaatatcttgagcttccatgctgtttttctttaacttccattgcctttccatttgctatatgctaattcactgttaacatgcaatatatagagaattttgttcttgacatttgattagttctactatgcatttcttatatcagatagctggaaatatagtgctcattttttccgaaatgaatttctgttgaactatatcattgcaacatataacaaacctcaggtgagctatcgctattgctttgaaactgcttgtccacataattgttattgtcattattgctcaatgcttaccactgaatgctacaacactcttatctaggtttcacttctcactggaattgtcatgggtggaggtgccggtgtttctatacatggaaggttccgagttgtcacagagagcacggtatatattacggaacaaactctatatgaagcttccatttttacttaaatattttcaaaaaggatgtagcaggggtgcagaaaaaagcttgcttgattcttttcatgggataaacagcttaccagcatatgcctagagtttgactctgtatttttactactatctatgcaggtttttgctatgccagaaacagcattgggtctctttccagatattggggcctcatattttctatctcgacttcctgggttctatgtggtgaactattttcctatctcatatctcctttattcaactgaactttcacacatgatcatatgaattctctttgcaatgtctaaaactgattattaatactgaaagccccatgtgctatgcatccttgagtgcttatcatattattacatgactttaaaatgtgtgggtgtggaaatatatgtggccactctgtttctcccatcatcttaataaattttgaccaaacctccatcatgacctggtaaaaagaaagaaatgtatgtggccagattttttattgcctgtccactaggattcatctgttgaattttgatataattgtaaattagttataattttacaccatataagttataggttgatgggagactatctttggagatcgttttcactgatttgttgttatgtctttctcaggagagtatgttggtcttactggtgtaaggttggatgctcctgaaatgctttcttgtggcctggcctcattttgtaccttcagatgaaaaaaaaaacccaaagtcagctaagagtaaaacttgttttgtgaagaaaatagttaagagtaagatgaaaattgtatagagttttgtaaacataacgtttttttttatttttgaaagtattactaaataggaatttctcccttggccaactagaaaaggggtggggcgccttttttgtcttttcctacagtcgtatggctctgataccagctctgtggacccccgtttttataacaggaatcaatcgtgtgaacagtaccatttccctggatcaagtagtctggtacacacgagttcatagctgaaataccaaatgcacatacacgaaagtctagtgcggattattacatcataagcccgcaggcatagtcttagatcatcagaccgagcggtccggaatacattccaaaagcagagtagataaggcagcggagtttaggcagcggcacgccattgccacaggcaacgaccgtaactaagacctattgggcgccatcgtcttcatcaccctcctggtagtacgcgtagggatcctccgaagcttcgtctccggcctctgattaagtttatatattgcaagagtgagtaccaaccgtactcagcaagccatcacagcaacaatgcacatgataggggtattcaaaggatggccatggttctttgcgcaaagccagttttgtaattcttttcacaagcctaagacccagcattgactgatcaaattttagtaccagtgttcacagttaaacaacgacggttctgtctaccatccattgtgatcccaaggatagcttcccgccattgagtcgtcatggttttctgaggacgtccaccttccagcctctcaggaagtggctccaacagcataaaaatcatcatgcaatatcccatcccacacaagtcaagaattttgagtctagccaagtgtaatacacgtcccggtgctcaataaccgcgagcacggctattcgaatagatttggtttactcacactgcagtggatgtacactttacccgcactccgtgactgcccaacacatgagcctcgtcccaacacataagacgcgtcacgacaaaggttttcgataaccccgcattggcagtacccgctccatgaacttaaatcctcatgcactctaggcgtccatgtttctagcagtgagaggagttctggcgctcccgggaaagagaagtctcacacacatattaaattatggttcaagttaaattctctctctcatacactcatggcagtcctaccaatggcgacaccgatgtagggcacgcctctcggccctacctcaacgcctgtcccaccgtagcgcacctgcctcactcaggggtgaaccatctatgcagggatattgcctccgctcggctatctaatccgctaggtctatacccatacgagaagtacggttgtacgggggtcgtttcatgcttaacttcatggctcagtccttaattgaccggggacggtactagccttttccagataccacccaaatcctccgtccgccccagtcgaaaacaattgtttaattttgtttctcctttcacaaatcatgtcatcaacatcatggcaatgtggcgctcatgtctccacatgccgcatctcaattacctgcccaagcatatagcatttgataaatatgagtatgcatgattctagaatagcatttttaagcaattgtcatacttgactagggactcatacgtaatcatggttacaaggattttaagggtaaacaataatcaaggcatggcataataacaagtaggatgtttatcattgcatgcaattttatttgtaaacaaaacaatttcgcaattgggatcaatatgttcaaggaatagtgatgacttgccttgctcgtagtcctgcgggtcttgaccctcgttcggatccgcaactccctcgggttctaaaattacgtgcgaggaaatgatttgaattcaattagaattcaattaaaatctaaataactcaaaaggtcgaatgtgaatcgatctttttatattgactacaaagtttgcgaaaccactttattcgaattgttggatcttttaacctaagtcattttgtgatttagaagtacattcctaagaattcaacataattatttagctcttaataaatctaaactcctaccgcgaattgattacttatagagattaccaaaaataatctataattatattaaattttgcaattctacgactataattaatctataattaaactctaattattttaaattttctaaacctccttattctctctctaattttctatttatttttccttttcttttcctcccttctttctttctcttttccctccctttcttctttttcttttttctcttttttttctttctttttcctctcttcttttctctctctccctcccggcttctttctccccgggcggcgacggcggcggaacgagggaaggggcggcggcttaccgacggcggtggcggcgacggcggcgcaaggcgaggcgacgcctggcgcggcacacggtgcggcgcggcggcaccgagggcagcggcgcggcggcaataaggcggcggcgcggcggcacgaggacgaccctgcggtggagaggaaaaaggggaggaatagggaaatggagtggggaataatggagaggggtgaaggtatttatagggaagaggggaaagagagacagagaaggaggggggtgatgcgacgccggcgcggggcgcgaggcggcgaggagatgggcgcgcggcgacgagacgggcgacgcgacggcagggcggggctcgaggcggcaaggagacgggcgcgcagcgacgggacgggcgacgcgacggcggggcggggctcgaggcgacggcggcacgcgcggcgcggcagcgggatggcgacggcgacggcgcagcggcggcggcgcgcggctcggagcgacgacgggacgcgacggcgacggtgcgcggtggcatggggcgcgaggcgacgcgacgggcggcagcggcgcggggcgcgaggcgatgggacggtggcgcggcgacgggatggcgacggtgacggcgcggcagcggcggtgacggcgcgcggcagcgacggaagcgacggcgacggcggcgcggggctcggggcggccgggcgcgcgcaacagagatgggttagggctagggactgtaattgaacccctggcggcagatgaatagtgacttttcctattttatccccattttagcttatttcttatataaatttgattctatgaatcctaaattttgcataaatgaagtttactccatatttgtattattccacccaatggatccactctagattaattttactcatattttatttttatatcatttacttgattttaattagagttaatccttattccatcgcgtttaaatctaattgatacgaatatggccgagataatattttatttatttctatcttcacataatctttatttttagattataatttaattatttctttaacccatctagttttagggtttattcctaattaattcttctttattcgcgatctatgaactccgaaatcaaaatccaataaaatcatcgaacaaaatcggcatgatgcaatttattcaaaaagtttttgaagacccatatttttggagttttgatttttgttggtcaaattttcagggtgttacacttggcttgttccaagtatgattataggtaaccagagtattgctggttttctaattcctagtatgctcactcttgcagaggctggctttgttagaagaatcacttaaaaaggttgatacatctgatccctttgctatatgtggaattatcgatcaatattcgcaacaaccatctctgaaagaaaaaagtgctctgaataggtaagcgtgcaattgtccagacattatctattcatgcatgtcgagcttattctgcttcctttgtgtaccctgtaaaaatgaggtatccttgacaggtgggatattctggttcacaccaagttatcctgtcgtataaattcttttggcatgttaaacttagattgattaatctacaatttttaagttactaatagctgcataaagttccatagttataacatccatataaagttcatgcaggaaactctcctcaatttggggcgtgtttgacctatttatcttctccaaacaactttcttttgggtcctctctaccacaagccctagatagatagactagtccttttgaaataatattagcttgtaatggagggcaggtggagaaatgtaaggaattggaatggggaaatgtagggaagcaacagcatgcacttcccacatcttgtgtctcctttcaatagatggatgggcttcaacttataaaaaagcttggtaacggttgtctggcctggctttaaataagccgttccctatgccctaacctgttacttgtgtgttttctatattctcctcatctttatggtcagtggcttccctatgccacaatctcgttacctttagatcatttgaactcattttatgtattgcttttcttaatctggtttgaaggccaagaaggcttatctttatgcattgtaacttggaaggacttattttagtttgtcaaggagattccatttgttcctattttattgcaaggttttgttttctcatttcattctcagatcaacttttattgcctaatccatgtctgctacttccatcattttgattccaggctggaaatcatcaacaaatgcttttccaaaagaacagtagaagaaatcatagcctctcttgtgagttatgctaagtctttgctttctatagactcaccagttctgttgtgctaaatttgatgtgtatcatgttaggaacaagaggctccaaatgttgctgatgaatgggttgcttctgcaatccagtccctgaggaaggcttctcctactagtctgaaaatatccctgagatcggtatcctctcaaacatttccaaagcatatgtctttatgttactcgagtcattctatcttggtgccttcttatgcaaattattgtagtgtaaggcattactatttatttagacccatcaatcctttatatggtttcatatgaccagtatttatctttctcaagtgcatacttcatatggctttatgaactgaaccctactcctttgtgttggcacaacagatctgccctatagctaaaaaaaacaaaccttctaggcttagagcttttgcatagtcaaattgcaagtatgggcataccagttctaaaagctttggaaatgtctttggaactagtcgtcggagggaaaacaaggattgttcactccacagaagagtacgtgtactagaaaaggcagccacttaaaaacgccaactactttttttaagccttatttagtttggttgcctacgcttgatctctggcgtgctatggcaacaccccctgcttgcttctttctgctcgacatggagcttgcagcctccccacccttgcttacaacctattcttaatagaaccgatctgattttcactacaagaggaatttcgtgcttctgccggatcctccctatctcctgatcgagcttgtgtatgtaaatattgcttagtagggcccatagtagtacactgtttgggacagagtcagtgcccttctcacatccctacgagtcgtccagcagaaactgtttgtttagttgtatgtacaactagcagaacaaagcagttagatggttcactttgtataaccactacaattttgacataaattagtgttatggttaatttctagccttttaaaatcttgtgacctatcctttgggagttccgatctttttcgccaggccgacggcgaaggaagccccaaccaattttattaagatcaagaggagtaacgtactatttacaacaaacatggctgtttagggattaccctaacacaggaacacaagtactgtttacaacaaacatggttgtttagggatcaccctaacacaggaacacaatttaaaagctcagggcaggccctgagtcagggagagacacagaactggttgctggcacaacagggcagccctctatcagcgccaaggcacatcacacgcttcagtgatcaacattcctcccaaacctgcatcacgctaagtccattcttctatgatgcagccgacttacctcagaggctgatttgctgacaccgtcaaacacccgagcgttctgttctttccacatcatccaagagattagagttaccactatgtcaaatgggagttccaatctcaccatgagcttcgaggtgtcaaacctccagctatcactacctactaaagtggagcttagtctctaggaaaagtttgttttgcccctaacattcagtaggaaaggtctttgttttactgcagtatacgtagtttgtgagacgctagccatctgtgcccatttatgttcttagctttctgtatttactgtgggttcagataagagaagggcgaacacaaactgttggtgaatgcttacgtcgagaatataggatggtttgccatgtgatgcgtggtgacttcagtagagacttctttgaggtaaatatctatctacatctcccaatgacatgttcactcaagatgaacatactttgaactattcaattcctgttgcagggatgcagggctatattgttggataaagatcgaaacccaaaggtcagcttgttaatcttgtttgtcagaaaattcgttctccacatgttgtctaatctggcatgggcatagcattaaatctaatcctgacatctttgctaattgcagtggatgcctccaaggttggaagaggtgcacgacgaggtggtggaaaaatatttttccaaagtcgatgatccagagtgggaagatttggacctacctcctagacgttcccatggaaggaggcttgttcccaagctttgattcaatgaaaagcctcttgtgaaaaactgaagcctttgttggtgcttctgaataacagacagatcgtccccagtttgagggatacatggagacaagcgatgaagtttatttataataaagctgaaacatattataggttaacaattttattagcaaattagagaagtccctctcatagtctcatgcgatgcttatattggtatcgctattgtgcttttttcaaggtgtgaaggtacgcttcaagctaaagcccagctgcattcaaacggcggcccatatgatactgctatcaggccatcctattgggctttgaagctaccttctgcttgtagattccaggtaatcttttatatattgtataaaagaaattcacaatttcataagtttgcaccgtgttgttttttatagtaaggcttcgaaaaggttgtaagatccctagtatcgtgtgagtcttgtaatgcacttgaactgacggcatttcgttgatgaaatgggagaggtccactctctttgtcaaaactaaatcagtaaatcataagttccctttcaaacacttgcggaaatagcaatataacatccccacgttacgcaaaattttttttagagaaatcgtaaaagctaagacaagaaacgagtagccataaacagaatccaaaatcgtttgccttggcttcatcgaacaatctaaatttcagagccttcagctactgaagaaaaagataaagacagtcgtagtagcaagcaacagcatgccacagtacagtagtaaattttggtctccatcgtacccagccgagggaagccatcgctttcgctggctgcttttaaccacaccgtagcagccactcattttttttcctctacctataaatacagcacacttcacattttctagcttaatattgtaatggtatcataattaagtatgcttctacagaaatagtcaagttcacgagcatatggaaaaagtcttgtgtctctttggcgtgtatgtagccacgtcaaagatgaaggtcttccttttgttttatcactgtcttcaccccggacatattcttcttttatcttctctttttcactgtgtgtggttcagtttttccttcctttagctccatattttaatttgatgattcttttgccttgaccatatgaattacttggccatgcatcatccatcacatgcttagtcgtactgatagatctcaacacacgtttgagattgaaccatgtatagttgagagcctaattaatcctgcttaattaccctatatactaactgcgaccatatatatgaccggtgaattggcatgtacttgtaccgaactgattaattttaagttttaggacaggaagaggcaggcccaaccactagctggaccagcatgcatgcacctaattcagttaaacacacttgtatacaggcatggcctcctcttcaccaaaaacttctctgatatttccttttcagcgtttggtcctagcttcaccgttgatgtccctctcatttatcaccggtactggttatgcacagtagtagtagcttgtattttgtgcaccaacttactagaaaaattacacaatcttttttttattacacgacgaacgcacacgaacacacatgcaacatcacctcacactctgcatatgtgcccctaatatattctccaagagacgcatatctgatctcactaaaattttgttgaaagtccacccgcatatgcgtaatattcgtggacactagaatttaaatcctggtggatgaagtcatgcactcgtaactccactactataccactaaggctctgtgcgttctggggagatagaggagattgtgtctcgttttacgcgcgcacgcttttcaaactactaaacggtgtattttttgcaaaaaaaaattctatatgaaagttgctttaaaaaatcatattaatccatttttgaaatttaaaatagttaataatcaattaatcatgagctaatggctcacctcgttttgcgtatcttcccaatctcctcaaacacaccctaagtgattcgaaaaaaaaagaggcaatttgcttctatatacatgccaaaatatgtgtgcacacccgtgtataaacaatacagtgccaattaatactctgtaagattaaggctgagtttgtttatgctgatgacaactctcttgttttccgataacacgttttccaactgataaaatgatatattttatttaaaaaaatatgtacagttatttttaaaaatcaaataaattcattttaagtttgtaattattaataattgattaatcatgcgtcggggattgaaattttgtttcaaaatttccgaaatttcggaacacccccccccccgccaagtcaatatctcagacatttccagtttttctcattttttttgtgaatttagtttaaattcaattaaattcagttaaattgtgttgaaatttcggttataccgaaatgacataaatcgaaattgaaaaccctatcatgcactaataattaattcttgtttttcaagccgccaatagctccagcccaacagcccaagcgaacccagcctctctaagagcaaggtcaatagtatagccaactactggctccaaaacatctatagccaatctaatagttcattcatacaatagttaactataaaaatatactacaccattaatattcggtcctacctctcatacacacataacagcttggagtccgtgttgcagccggctacaaatctgtagcccgctttcttctctctcttctcttttcttctcgatatatggttatagccggcttatagcatgctattgtacctgctctaagagagagcttttatgaggctattatactttcagagtgactcaatgactcatctcattcgaatatatacggagctaattaagttgtcagctaactgcccgtgtcatcatttattacttcaatgatctaacaggtccaaacgtcatggtctgataaattctttaggacttgtgttagaacaagagtaaagttttgatacttgagagcgtaacctaaccggaaccaacgttttaaatttccctcaaatttttatgatcactggctctggttggaaatgatccaacgagaggcgtacttttaattattgtctatgctatactattactacctccatcccaaaatgtttgacgccgttgatttttttaaaaatgtttgaccgttcgtcttattcaaaaaatttaagtaattattaattttttttctatcatttgatttattgttaaatatacttttatgtatacatatagttttacacatatcacaaaagtttttgaataaaacgaacggtcaaacatgtttaaaaaagtcaacagtgtcaaacatttagggaagtagggagtatatgctaagtattttcgtttgttgcaagtactaattaattatagtttcatcaaagatataattagatatataggacctgtctccgtcatccgtcgaccctagtttcgagtttaatttaatgttaaattgcacatactagtatactaccaactagctagttcatcctctaataaactttgtgcaaagaggaaagatggcagctcactgcttgcgcttgagaagcaactagattccagagagctttaacgaaatctcttggggtttgcagagaaaagtgcatgtggacatacatgtggctgttttgcacggaggatgcagggcaagtaatgaagaaattaaacatagctaatcaattaagctagctcatctgcctttcacgcttgtagatcttgtgatattggagtccggctgggagacaatgttgacaacgtccgtgcactgcaactctctttgattgctgatgactattggtactggcctgtgtagtcctacatttatcctagcagtgactgctactgctagctccctgcaactgtcctactgtttgccaaaaggaaaatttcgcattgattgataatatactctcaccgactcatcaccatcccataatatagtcatttatcccgaaatataactactactactaacatacttctccatgtacttaatcataactacatatatcttatttaatttatttgtttacttactcatctcaacaaattatacatagtctgttatttaattttattgaaaaattttagaggaggttatattttgagacaggtgaagtagttttgcagtactgctgtactagcaggaatagctaatgccatattggtaccagtttttacgagaagcagtacttgccaggagaagtgatgattaattagtggagttactgtgactaatggccgttcaagatcgatccagtcaattcatgatagtaataataatttagctaggtcccccctacatggatactcgatcgatcgatcactgcgtaaattaattaattagtagagagaagatcctgcgagcacgtacgtagaagagttttaaccagttaactactgagttttgtttgtgtggtgttaaagtgctaattagtcaaagtctcgctggcttgccataatgcatcgatgcatgtgggtcgcgtgtttggccaatcaggagctgcgaatgacgtggcattatatatatacatatatagtacaatacgttctagataatgatacggtctccaaaatacatatttgactatattttttattataatatgtacaatatatatacctttttatttttattatagtattttgtaagataaatctatactccaaactaaatatatttaaagttattgataaccatagttataaatatttaccttaaacttattcgaaatgtcgagaattatatatgatattgctgggagtactccagtataagccaagtcagccgacatccatattctatagcctctgcttttgctgacctgtcaccattttgttttttctttagtttattatcgatacaatgccggtcttaaatattaattaattatgcccagccatcgttttctacaaagaatgtagtaataagaatagtaataaatgcatgtacagtacttggggtgaaattaaacaattgtcatgcatggattcggtttgtcgtttgatagctagttttatgctgggctagaggtagatagctgctgcacttgttcttcgtcgaatcttcgtagtgaaaccagtccatcggacttgaaatcataaatcttgataggggtactcacgtttaattattctttcagtgacaggacatcgccagcgagacgctagtggtgacttcgtgaatctaaaaatttgccgcgttgtgacttcgtgaatctcaaaatatatcgacccagcctttcggaagcattaatataggagtgatgtgtacatgtgtatgttcacgtagaaatgaggtgtacatgtgtacgttcgcgggtgaatgtgcgtgttatgagtatatgtatttgtaaaatgtttttttaatataaataaataagaagtgactactcttgttgctgacgtgcatgtactgctgctgttattttaacgtattgcatgtaaagattgattcgcctaatactacctttgttttaatatatggtactgttaaattttttataaacgtttaactattcgtcttatttagaacttttatgtaaatataaaaaaataagtgatgcttaaagaacatttaacgataaatggagtcataattacatagctattttgaataagactaatgattaaacatatctaaaaagtcaacaacatcatatattaaaaatgaagggaggtcaaattaagttgtggtgacgaatgaacatgagtaatcccgcccattgatcggcatcattcatagtagggcaaattttgctacgggatattgtgacttcgcagttttagctgtaggacacggcacgaagtgacttttgggggaaaacactcctaaaggttggatatttgctggtggacaccgcacccattaaaataataatttccggttgaaaaggagagag

SEQ ID NO: 7076 - DNA, 32017 bp, Oryza sativa
  unsure (1)..(32017): unsure at all n locations
caaaacgacgacaggaggtgacgccggcgagaggaggaaaaagaagaaaggaagagggaaagggggcttgcctccttgccgctttgggaaaaggaggaggaagcgggggggtgacgcggcagagggaggaggagctctgcctcctcttcttggaagctagcgcgtggaggggcggggccgagtcgatgacgacggcgatgacggtggggcggtttggagcggggcgacgacacgggcggcaggcgcgggcaggcgcggcagaggctaacggcggcggcgaccaggcggtcggccaccacggcacgcgcacgcggaaagcaacgggcggcgctgcggtttgagcggcgcggctcgggcacgagtgctgacccgcggggccgagcggctgcgcggctacaggcgcggcatggcagcggggccgggcggcgcagacggcacaggcgcggcacgggcggcgaccacgcggggagctcgctagggatggaggcggggagagggagagcgagggggggagggcgctcgacgcggcttacgcgcacgcgcgcgtggcgcgagggcagagcgagggagagagggagagagagagagagagagagagccggggagggaggggaagatgggccgagagagattcggcccatcgaacccgagggaggcaaaatagacttttgcggaggaattgatttgggaaggatttggattcgggattgaactcgacgatagatcggggatttgagatctgagaaggcacggacactagacaacaagcaaagaaacagatttcgcaaataggatttttaagagataatttttcccgctaggcgccacgacggaacgggcgctacagaccaacccccctaacaagaatctcgaccccgagattcagcacctaagggagcagctccgggaactcggcgcggagaagatcttcttgctcccaggttgcctcatcttcagaatggttgctccattggactttgtagaacttgatggtcttccttcgagtctgacgttctgcctcttcaagaaccttgatcggtctttccttgtaggtcagattcttttccagctcgatattacccagggggacttgctcttctggaactcgaagacatttctttaactgggatacgtggaacacgttgtgcacatctgcgagaccttcaggtaactcaagatgataagccacttcgccacgtctggcggttatgaggtaggggccgatgtagcggggtgctaacttgccggacatcccaaacctccttataccacggagaggcgatacccgcaggtacacatgatctcctttttcgaactcaaggtcacgcctccgattgtcaacgtaattcttctgacggttctgcgctgcctttaaacgttctcggatcagcttaacttgttcttctgctgccttgagtatgtcaggaccgaataccagcgcttcgcccacctcattccagcacaagggagtgcggcactttcttccgaacatttcctcattcgatgacatctgaatgctggcctgataactgttgttgtatgagaactccgcatacggcaaacaacgatcccaagtgccttcgaaatccagggcacacgcacgtagcatgtcttctaggatttggtttaccctttctgtctgaccatcggtctgcggatggtaggccgtactaaaatttagatcggttccgagggcttcatgcaactgcttccagaaccttgaggtgaactgagtgcctcggtctgacacaatcttcttgggacagccaaatctacacacgacatgggtcatgtagagttctgctagtttctttccatcaaaggtggttttcattggcacgaaatgagctgatttcgtgagtcggtccacgattacccagatggagtcgtacccgctaggggttcttggcaaaccggtgatgaaatccattccgatctcttcccatttccactcggggatcggtaggggttgcagcagaccagctggcctctgatgttctgccttgactctttggcaaatgtcacacaaggctacgtattctgcgacatctcgcttcattccagcccaccaaaagtatgccttgatgtcttggtacatcttcgtacttcctggatgaatggagtaggcggactcatgagcttcctttaggatgagatctcttaactccttcttggccggtacacagatgcgtggaccataccaaactgtgccttgatcgtctatggagaaatcggtgtctttcttctcctgtattctttttattaactcttttatcccttcgtcgtctttctgagctttccggatttgcgattctagggtaggctgtactgtcaagctggcagcgacacctgactgtactacggtcagccttaacttttccagatctctgcacaggcgatcttggtcgggccgtatttgatctacattacaataggtcttgcgacttagcgcatcagcgaccacattagccttaccggggtggtaatggattccaagatcgtaatccttgattagttccaaccatcttctctgcctcatatttaactcggtctgtgtgaagatatacttaagacttttgtgatcggtgtatacttcacatctgttcccgattaaatagtgcctccagatcttaagagcatgaaccacggctgccaactcgagatcatgggtgggatagttgacttcatgaggcctgagctgcctggatgcataggccacaacctttcgttcttgcattaggacacatcctaagccttgtcttgatgcatcacagaagatctcgaaatcttttcggatatctggcaaggtgagaactggggcagtggtcaaccttttcttcatttcttgaaagctgtcttcacaggctgtagaccattgaaatttcttttctttctttaacagctcggtcataggtctggctagcttagagaatccttcaatgaatcttcgataatatccagctaagccaaggaagctgcgaatctctgacacattcttgggcgggttccaagcaagtacagcctcaaccttgctgggatctacttcgacaccgttgggggagatcacgtgtccaagaaatgctactcggtctaaccagaattcgtatttcgagaatttagcgaatagttgatgatccctgagcttttccattatcagcctcaggtgttcagcatgttcttcctcattcttggagtatatcaggatgtcattgatgaacaccacgacaaactggtccaggtattccatgaagattttgttcattaagttcatgaagaatgctggagcattggtgagtccgaaggacatcactgtgaactcatatagaccataacgcgttgagaaagcggtcttcgggatatcttctgatctgattttcaattggtggtaacctgatctcaagtcaatttttgagaaaactcttgctcctttaagttgatcgaacaaatcgtcaatccgtggcaacgggtacttgttctttatagttacttcattcagggctctatagtcgattaccattctctcagagccatcctttttcttaaccaggagcactggggctccccaaggggatgagctaggtcgcacataacctttactctccaattcttcgatttgtcttttaacttctgctaactcattagctgccattcggtagggtctttttgcaattggtgcggtgcctggtgccagttctatggcgaactcaatctctcggtctggtggcatactcgttaattcttctggaaatacgttgggatattcacagactatgggcaccgactccaaggaggtgacttgtaaacaggttaggatagaccgactcgcggtaggggtgttagaggtaaagcggacttgctttcctccaggtccttgcaaggtgatggacttttcggcacaatctatctgccctttgtgcttagccaaccaatccatccctaggatgatgtccaagctttgcgagtctaggactatcggtttggctaggaagtcaacttcctcaattctaaggttaacttccgggcatatttgagttgcccttatattcctcccagggaaatgtactatcattggtacacgtaaattttgggttttccaaccatttcttttcacaaaagcttgtgatatgaaagaatgggaagctcctgaatcaaacagaactattgcgggtacggagttgacagagaacatacccatcacaacgtctggagcatcctgagcggtctcagcttgaatgtggttcacccggcctcgaccaaagttgttggaaacacgagaaccttgtccacttgcctgagagctaggacgagactgagctgccgctggagtaggagttctggcagtgctgccattagcatgccctgagttggtgttggtaggattctgagggcactgtcgggcatagtggcccatctggttgcaccggaaacactgaactgctgacggtcctagcgatgacttgaaagaggtaacattgtttggcgcagtattgccactaggggcacgctgctgtggctgaggtgcctgacggttcatctgaggacgaggggcgtagcctggctggcggttagcctgagtgaccgactggtggtattgcatgggttgaccgtagcgagggcgaggtgcgcctcgggaagaatttccctgatggttagacttgcgtttcttgtattcttcggtagcctcttttctggcatcctcaagtagaagtgccttgttgatcatatgttgaaaagtggggaagtcatgagcaagcaactggagtctcattccaactgcgatccctttcaagaacttcctgatcttctacttgtctgtgtccacttcctcaggggcgtaccgagccaacttgttgaacagacttaggtactcattgacactattattgccttgcttaagtttgttgaattcctctttcttcatatcaatggcgctttcaggcacatgagctgcacggaaagccgtagcaaactcagcccaagcaatgttagtgggttcagggtgtgcattgcagtaattctcccaccaatctgcagcaggtcctcttagctggtgagaggcgtagagcgtcttctcaacaggagtacactgcactaagttgagttttctatcaacatctttcagccaatcgtcagcctcgacgggctcgacggtctgagagaactctggcggacgagacctcagaaagtctgtcagcttggatctattgttgcccatgtgagggtggccatttccatgcgcactatgctgaaaaccggctatggctgcggctaatccttgcaagatttgtgtctgaactgccattaagtgctgcatgttgttttccacatgaggtggggaagggaggcgttcttctccagaattgtgactagcagtgcggtgagagcggtgagactgttccatctctgcattacgggaagctgtgtgatgcgagcggttgctgcggcggggttgctcaacttctgcgttgcgggaagcagtacggtgcgaacggttgctgtggtgagaccgctcattagctgactcatgattttcttctggctcaactctaccttcttcaaaaccgaagcgggctggcgcacgagcagcacggcgggggcggctagccatctaaactcccagaagagggcggggtaagaatcagataagcacttaggagggcaaggagcaaagtaaatagcaactcagatagcacacactaggcataagctggatttttcaatcataaaaacacctaatacaacgggtgtggacaagtcacagagctacgccgagcttgactgtacgcacaccacctaggagaaccagactaccaaacaacacccacaacaaacacacgcacgcactacctcgccacgactccaaaagagttggcggcgaaacaaaagggcctaacacacggacggctgctgaagactgcctcctctactcctcgtccgtctggctgcctcctgtagtcggctcctcagtcgaagaaacgtcaatcggctgacgcgaagggaccggcggaacctgtcgagggccgatagcagcacgggccgctggcggtgggggagctgggtagtcgaatcggaacacggtggaagaaccaacaacacgcttccgcgcagtgcggataaagcgtgggccacggcgggaggaagcaactggggtgtgtccgggggtgtaggaggggctaactgggtgtgggtagggggagtacactggtgagtacggcgcacgtgagctgggggagcgcgggccactaggagtgcgagcagagccgcgggagctgtgggaggacaggtggctggcgtggcagaggcggcctgagtcccaagagacagtgtcaactgaggtgacaccctcctcggccagacgggcctccagagcggcgtagcggcgggcaagggagcggtaagtctcaaggagtaggtagtgctgagtggcctgagcctccgaaagctcaaccatgcgagtcagcactggctaagactcgctgtacggacaagggtacctggcgtctgcatggccagaaggaaggcgtggaagctgccggaaggcagagcccccgagacggtggctgtagtcgtgggccaagcgacgaagcgcagtccaggagaggtcctggtacgcgatctggagagtgggcctggccacagtaaagtggtgtgggcgaaggccggctccgtgtatacctccacgagggtaaaggtacacagagagctcacagcgagggggaacacggtccacggagtaccccgtgtactcgggacacgagaagccaaggaagcgggcgaggtcacgaagctgagcgacgtggtgaccctcaccaaaaccgtgggaactgaagctggcgttcactgccatctacaattttgaaagagggagaaaagatcagtaaccattttagaaacaaactattaaaaataaggaaaccaaaagaagccttagcttttcgcaagtagttttgaacttagtatccttagggtcgtcctaaacgtcgggtttcgccctagggccaagcctgtgctctgataccatcccttgtcacgccccgaactagtcccgaccggaactagcccgtgacgctccaaattaacctgttaatcgataccagtcccaggaaacagtgctggtatcacaggaagacagaatatcacagcaacagaggtctctttaatatagagaaggagtacagtcatgttgggctgcggacagatcccgagctcacaactgcattacaaaagggaagcggaagccaagacttggaccaaacaacacagacgcgacttgggaactaggccgaaaccctaaaactcaacgtagccggcttgctcctggaagaactcctcgtcagcgggatccgcttcatcttcttcagcaactgggggggtagttatttatatagagcaagggtgagtacgggagtactcagcaagccatgggaaataagtgtttaatgcaggcttcaaggaaaggctgttgtttttgcaattgattttatttgaactcttttctgaaaacgactaagtgagtgcttctcaaacgacacggatgagacagtgcgtctcgtccggtcggagtatgtgcaaatgtatcagtctttagaattgatcaagattggcacccggccaacaactttcaaacggccacccgggccaacaactttcaaacggccacccgggcctagctgatcccatcagctgcagattttccaaacatcgatcccctttccacaacagtaatttcccaagcagtagtcaaacaaaactacgctaggaatcacctcacatccacccatgaccgtgggcacggctgttcgaacagtttgttaacctctgcagagggggtacactttacccacatgaaattccaaggaaacggtccttaggtgcaagagcgggaaaccgtacacccggtacgttccccggtccgcggcggcaacggtcggggcggcgccggctagctacggggaggctactcgtgctactacccgagtctaaggggaggaggtggaacgaggaggaagaacggagggaggcactaccgtgcgggcgggcgcagtgatgagagccgacggcgcgaaacgtgatcgtttcggcctcgggccgaggaagaggagggggagggcgcgcccggagtccccttccgcgtccttgctcgtgccggctcctccgacacacgcaacgactaacggcgacggcgaatagagcacgggaggcggcgacaatggcgtggcggcgagagacgaaaacgagggagattggaggagggaggtgcttgggtttataggggcgacaatgtcggtttgggagaggggaaccgacattggacggtcaagccggcgagctagcgcccggctagcggccaaaacgacgacaggaggtgacgccggcgagaggaggaaaaagaagaaaggaagagggaaagggggcttgcctccttgccgctttgggaaaaggaggagggagcggggggctgacgcggcagagggaggaggagctctgcctcctctccttggaagctagcgcgtggaggggcggggccgagtcgatgacaacggcgatgacggtggggcggtttggagcggggcgacgacatgggcggcaggcacgggcaggcgcggcagaggctgacggcggcggcgaccaggcggtcggccaccaccgcacgcgcgcgcggaaagcaacgggcggcgcggcggtttgagcggcacggctcgggcacgcgtgctgactcgcggggccgagcggctgcgcggctacaggcgcggcagggcagcggggccgggcggcgcagacggcgcaggcgcggcacgggcggcgaccacgcgggcgcgcgcacgcgagcaacggcacgcgggggccgattttggggcagggagctcgctagggatggaggcggggagagggagagcgaggggggagggcgctcggcgcggcttacgcgcacgcgcgcgcggcgcgcgggcagagcgagggagagagggagagagagagagagagagagagagccggggagggaggggaagatgggccgagagagattcggcccatcgaacccgagggaggaaaaatagacttttgcggaggaattgatttgggaaggatttggattcgggattgaactcgacgatagatcggggatttgagatctgagaaggcactgacactagacaacaagcaaagaaacagatttcgcaaataggatttttaagagataatttttcccgataggcgccacgacggaacgtgcgctacacttagctcaactagtatacaatgggggaaatcacattaatgcatagacttcaggttctagtgttgttgttggttcaatgccaccgctctggtgatgattaattaaaatatattaaatggtgggctgtgggtgcatggtttggatggtcgcgcccatggcatttaaggaccggttcgcgggaaacccgtacttaccacaagctagcgtgggcaacggctgggcttgtagtgtagctttcctctagctgacgcatccaggcaagggtgagcgtgatggagttcggatgggccctgcgacggcctatgcgacttttggattcacctaggcacgagaggggactgcccactgccttgcgatgagtgggggtaaaacctgaggtgtggtatgtttggttagaggtggttatgcgaagggtcctgacacggcctctttccggtatgtcgtggtggcatatcggcacacgggaacgtgttgtggggctgtgtcttgtgggtacaattgtacacctctgatcagagtaaaactattcgaatagctgtgcccgcggttatgggcgatcgaccagattcaccgtgattagtctcaccctagtttagtctaatggaattgattagttcagatggatgtttgggcctgttgcaacgtggtgtagcattggacagtggatagttaatattgattaattactataaccgttttactgctttcaactactgtttataaatgccagcttgatgcaaaggatcccctttagccttcctttggttatattgcatcataccctccgttccggtatgacttgctgagtacagtgggaagtactcagtcttgctctatctcccaatcctcagagttcgagtatgcgtccgatggtggtttctccgaggagtaggcttcgtccgtgccatcaaggatgcctgtggagtggtgttcccgctgcaatccaagtcaagacttagctccagttatcttttatatttccgctgcatttatataagacttttataatgtttgtaagacgtggatctgtatgtcaactttgtcgtttgtgtaccctggccggtcctggacatggattttaatgcacattctgcttggaattctattcgggaatttctgggcgtgacacccttgatggctacaaggtaacatttacttgtcgctgtgctttgagaagtgcaagagcacaactccactataggaagtacaaatgttgtttatatatcttggttttctcttttctagtgcatagttgtatacaaattaagggcaaaagagacattttctaaccgaattattgactataaatagccatatggcatattaagtgggcccaaggataattttaagcaaaaacaaattcttagaggacctatatggacaaaatgaaacttgaaggattaaattgagctttcgatgaaacttaaaggactaaattagctatttactctaaacttatacttatcagctaaaatctaaattttcaaccttaaatttaattcaagagctgattttgaggttttatcatcgaagtttatttttcagcctttacttttagatcgcaaagaacacgtatataaaggttttgttcataaattacttttcgtttataaacatgccgtttcgcttacgcgtgctccgtaaatagggtactgtcggtgacatgggaccgggagtatcatgactagaggcttgaggcagacacaatcgcccacgtggcctggcaccctcggggggcgtcgggcccgagggtgatgtgttcgccctcctctttgtctccccgagggggtcggaccgctcccgcctcggccccgagggccgaggcgccccgaccctttgtgggttttgcgccgcgtatatgtggtaggtgagcatagcggggctcacctaaccacatttattgcggtttggacgagcgcgtcacgccgcatgtaacgcagtgcagcgcgctcgtttatccggtcagtgaccagtcacagaccgatcagatcgtgggttaggtggcgacaggcggtctaacgcacgcctcgccccatcccgtcaggatgagagcctccaagcactcgtccctagccggagccggcgtgttagctcctggagatggcacgttggtcccggtcagatatataccaggcttcatcctaaccattacaagcaagacattgtatgaagaggggcgaacatgcagattgataaactgacgcgtggtggacaagaatgaccgatttgtgaccggtctgacactggtcatgtcgtcagcagacagccatgttcccacgtcgcgcctgcttccggcggaagtggaggtaggtatgggccgtcccatcagaaggtcattcggacgacaaccatacaagtctccgtctgttgatgaaaagataggataagtccccacaaaaaagagagagatggtgcatgtggtatccccttgaggtataaaaggaggacattgcccacttagaagggggatttttcggatccagaacgatcagagagggagagagtaagagctctctggttctccagctcttttgtagcttcttcatacatagatccaccaaaacacaggagtagggtatgacgcttctcagcggcccgaacctgtatacatcgcccgtgtcttgtgtgtttccattctcgcgaaccttccacacaccgagagcttagaatctcacccagggcccccggccgaaccggcaaaggggggcctgcgcggtctcccggtgaggagcctcacgctccgtcaggtacactagccggttttgacaagtcttagcttagatcaccgcaataatctttaagggatgactccctatgttaaccgatcccgcctcagatccgcgctcgtcaccaccggcacaacattcatatccggccgatatggcgatttaatatatgctactatcttccttccaaaatataaggaatataaggagttatattttgagatggagaaagtactagtgatgatgaggaagatacactagtgcttgaaggcttagttgttttgttctttttcccaactcacctatctcgtttttcacatgcacacttttcaaactaataaaggtatgtttttttttacaaaattttattaattcatttttttaaaaaaataactgtaaattaattaatcatgcgctaactggtagtatgtttcattttgctaaattaattaaaattcccaaccctgcaggagccaaacacagcctaagtaaataaagggattaaaattgaaagcgtatctaacagccacagctactagtggcttggtggattacgagtcacgtcagtaggcgatccccggcgtgtgcgatgcgaggttagcttaattagctggtctgtccatgtcgtgccgtcgcggcgtcgccttcttcgccttggcaacggcatgcatgcctccgatcatccgtaaacctcacggcggccaccataccacacgtgcgtacgtacgtccacaccacgcccaacaccgacgacgtcgatcgagctccaatccatccacccccacccatggccgcgcgcttctcttagctggagtaattaaattaagtcgatctccccagcgcgcccccatgcaccaatggccgctcccacgcgccgcctcctcctcctcaaccacgaacccaccaccacccccgcttcgtcttcttcgagttcgaggcaatccttccccacgctgctccccgtttttatcctcttcgtcctcctcctctgcttcctctccatcttcctcgtccgcgacctcctccacttcctctccctctgcctccgccgccgccgcctcctccttcgccacggggaggatcatgactcctcctccgtctccatgcagtcctcagcctcgccgattaatgcccaggcgccgcgcaagccgccgggcttggaccccgccatcctcgcgtccttccccacgctgcgcttcaaggcctccgccgccgcgccggagtgcgccgtgtgcctctccgacttcgccgccggcgacgccctccgcctgctcaccgtctgccgccacgccttccacacgccctgcattgactcctggctccgcgcccacaccacgtgccccgtctgccgctccgacctcgacgccgcgcccgcgccggcgcctcgccacgaggaccccgccgccgttgccgtcgacgtggaatgcgaccggaggggcggcgccggctgaccggtgaacgaccgccgccgtgctggatgacatgcaggatttcctttaattttgttcgcgccaaaattgattttgatttgttttgttttgtttgtggctgcctgcattaccgtgtaaatactcaacgacttgtatcgtccttgtgcattgtactgtcagtatttccaaattgttggaaatgataatgtagagtattccaggtagaattatgagctagtcaccacagcttcagctagctgtttaattcaattgcaagtctgcaatacctgtcaagaaaataaatcaactgtatcaatgtatcagttggaagcttttgcaatgttatttttagccacagaaatgggcggttgccggttggtaccaacaagggcattctaaagtaaggatgccactaattttagagtaatctctctcggtgcatgatttgatacatgagtctatgagaaaaatgctaaccagaaagaggaaacacaatatatatatatatatatatatatatatatatatatatatatatatatatacaggcatataacagttttgctactaattgtcgcacacgcataccacacagggcaatatacgggtctgctttacaggatttatggaagcaagtacataaaagcaccatagcacgcctcaggtgctttgattcaaagacacaacgacgctgcttatttaataaacaacagcgtgtgagaaactgcttgcgtatcagcaagggacggtaaattatttatagaacacctcctctattcatgttctttgcttttaaagatctgtagaagcccatgaacctcacagtgaactctgaaataattagagtgtttatagttagtagttggtaagatccgttcattctcataagaaaacatagaagactatttcagttcagaactatactgaattggcaggtgaattattttctagtaccttcaatctttataaagcattggatagtttcgcgttggtcatggccctccttggcaaaaccttctatatttatgtttctgatttccaaacccgtgtcgccggattcgcactgctctttttgacgcgcgcaatctttgatctgattacgccgagaagcaagaaaaagaacaaagaataacggttagtatacagcaattagatcatgaattgaaacaactgttactgaagatgcagtagtcatgctaacatggttcaactccgatgctagttgatcaatgctattttggaactcctcatccctgtcccttttcagttcagcaaccagattctgcatttggaaggagacaaacattggtgacaaatactgaaaacaacgaaccctgtttcagagcatggaaacattaggcaaagtggagcttacagagaaaatgaagtaaggtgacacattatgttcaatcagttttctgatcttacccctaatgacatacagcctgcacaagtcgaagtaacaacatttgtatgttttctttcttgagattaaagacgctcaaatatactgaattatggggaaaaaacacatgaaagggatatcctactgttttgggcttggttcctccaagatttttttggctacattggagatttcctcttcccatcctgtcaaaatggcatggccttctaggaaggcatagctgcagttgtgaggggttatttatcgccttgagaaacccaattatagtgcttcttaacaacagaatgaacacagtaccagcaatctactacggagtaacatattctcaatacgaatgatacatgcaccttgattgagcagttatatgcattttttgtcaaaagagaacataccaattgcaattgtttctttagaaaatgaaggaggaacatttttttttttgggaatacgcgaggggcgcatctttgtattaagaaggaataaaagtatttacagagcgggccgaaaaataaaaaacacgaaggggacaagatacaggagtggggaggaggaagaaaataaaagcctaatctcccaacgaatgtggcgaccttccacccgacataggagtcaccatggccggtatcgcggctctagccaaccgccaaaggtccgcttcgcccgtgaggaacatagtatgttataaagacatttctccagtaacgaaccatctactttaaccacagtcaaaacgttgtaacatcccgatattatatttcaagaagcaggaaaggagaggagaagcaatgtttgatgttcttttatctaaaaacaagggagggatattcttatgtgcttactttgctttccaagtagcttcaaaagaacgtattgcctgtcggagattattgcctgagctcattgttattctcctagcaatatcacgaggcagatctatgctctcttgcactgcaatgtactctaggaccttgattatctaagatcaaagacatttttcagtaaactgtccagcattgcaaatgcgaagataaaatatccatataaaaagtacctcatcagatgaaggtggcttaagtgtcacaaccttgcagagatgcctgacagcctcaaggtttgaagcatcagaacagcagaacatgattttattgcatcctacatacctccccagaaaccatccaatataatgttgaagatcagatgagagtttatcagcgtcgtggacgacgatcactgcatatatatgaattttaaagtattaccttggtgtaatggtttgagatcaataaagcttcatttattataaaaatatatatgtatatgatacactagtacatcaatgtaacacatataaataccagaaaataaatgaagaacatgcagttgtgtcaagaaagatcactgtttcatcattttaacaaggtaaaatagtgtcctcatgtacctctgcagttggcatgactgcaaatggagtttggtgatgggatggattcattcaacaaagtagtaatgacatgcttctcatagccgtgtatgtcagccaaatttacctccacatgatgacttgaaatcttcactctgatatcaatgtgttttgcaatttctccctacagtgcgagaatggtcagtagtgtttcattttacactttcctctgaaggagtagtagagatttgtaatggcgacaatgtgcaaaagaataacaagtcattctcatgcaacgcgtaccttcagctcgaatctctttgtctgttcctctatctgtgaaacggcaatatgaagcaagaacaattgtgagcttaaaggtttagataattaggttggttaaaccttgtgcaaaagtgagtagcatcaaccttgagattatcagtagcaaaagcatcccatatgagtgccgacaccatgctcctctttccgacggaggtcgggccttcaaatatgatatggttgcattcttgtgcggtaacctggggggtaaaccccttatcagaatgtcaagacggtagtagtatcactcaatgtagtgaaatatttgactgtaaatgggtagtaaggagtgtgtgtgatgaccatcacctggttgtagagctcaagggcagcgtccttgttgcagatgaaatcgttgaggaaattggggcgatacttgtctgcccagatgtacttgtcctctgccgtgggtgtggattcttcagaagtctgtggcgaatccaccatggcgaccgatttgggcaaaacccggacccagatgctccctcctctcccgacggcgacggcggaggcgctgtggtcggagctctgcgtgctgtggtcgccggcggacacttgtggctcagaagcagcttcagctttggattcagccggcgtgtggtggtcgtggatgcgtttggcggcggcggcggcggcggcggcggcttcctctctctccctcaaaggcctcctctcggcgacggcggcattggctacctgcggctggggcgcctcccggcgcggcggcggttggtggggcacggagctaggggcggtgcgggggcgggtgaggggggcgccgcttctggggatgcaagcgaagcccaagcggtggagaccgagcacgagctgcgacggcggcaggaaggtacggtagcgtcgggcgtcgcggcggcggtcatggtcgagcgcgtcggagagggtggtggccgggggagccatgtgggcggcgcgcagggtagtggcagtggcagcggcatgggactgggggtggacatgagatgagagcggagatgaaaccaatgcggcgcggcggtgtggacgaggggagcgagaggaaggaggtaggcgtggcgatcaacgcggcagcggccggccaggtggtgaggtggcggtggcggtggcggtggcggtggatggtgaccggagaagcattttttgccgggatcattcccatcctgcctcctctcctggcgccggcaacgcctaccatcgccatctgatctcggcccaagctctccatttccatcctattggcccacttcgttatttgggccgcctctggttgcatattcagagaggatttaggccggccttctttcgctgttacttccactagttatttaattattttttagagaagttattttattttattttatttagaggagtttcttaattttatttttttagaagagccttttaaataaggaacttccctgtaaccttcgcattacttccactattattctactgagttgcttgatagaccgtttggtaaggaataagtttatgtctctcgctcttgattgagtcacatccctcaatcataaaactaggtataatgtcgcctctaatattaaaaaaccagtgtagataaactatttcagaggtttagaaagtgttttttcgctgacgtggcaggttgaccacaattgacttgctgagtcaaaaggagggacccacatgtcattgattgttctctctttgagagggctaatgtcgcaaaggggatccatgactaacgagtagtgacgtgaccggggaggagttccgcgatgggcggcgacgaagatgggtgttgtgactggcagcgaagactgcagcagctcgcgtgaactaggggatgacaacccatagcggaggacgataggcgataaaacagcgagacccgaaggtagaagggcggcagtgcaacaatgacggggtagcacacacatctctcgctccgacgtgaccctctgccgccgccaccagtctctacgaatgccatcctatcaggtagctctattaccctctttctttttcctatggagatggcggtgtcccaccctgtcccagcttgatggcctacctccccctgtggggcctccgatgccgccatcgatgctggaaggaagccacgtggaaggaagtggcatggaggtggagttccaggctcaaggtgagaggacaacagccaccgctaccatgagcaccactatgcgcgtgctccttgaacggacgatgacagtaactcaatctgcccccgacgatgttggccacctcggtgtcgccaagctcctaccaccgcatggggtctctacatgctccacctagcttctctgcttccatcaccctcggggagacgaccccctccccatcggccgcctccacccgtgagctcccctttccactaaaggaatcaatgccgatttttaaagttgtttggagagggtattatacatgtttttttgttgaggaaggctattcaggaagtagcaatatacgagaaagacaaacaagaggttgtgttcgggcacgcatgtattattgcaagattaattaagtattaactatttttttgaaaaatggtttaatatgattttttaaaacaacattcatatagaatattttttaaaaaaaacacaccgtttagcagtttaaaaaacgtgcgcatgaaaaacgagagatgtgagttgagaaaactgggataagaactcagcctaaaccgtttggcaatgaccggaaaatttgaagttgggcgatgattttacaggccgattaaccgagggcagtagttccctcagcagtgtccggccttggacttgtgccgcacgcacacttccatttccatttggaaaaagtacaccgaaggtccctcaacttgtaatcgggataaaaaacatcctcgaagtgcaaaaccagatatacgaggtctcttaactatacaaaaccttaactatacaaaaccagtcactcgaagttcttcgatggttttgaccccggttttagtctacgtggcggctgagtcagcgtagaacctacgggccctacatgtcaggtgtccacctcaccctatctctttccccttttctctttctctgttcatctctctctctagcggatgggagcggcggtagcggcagacttggcgagcgcgcggcggtcggcgggagagcgcgcggcggccagtacgcggtggtggaagccccctagcgttgcggaggcgggctgcaccgacacggcggcgggagcacgaggcgacgcggcggcaggcggttgtggacgagcgacgattgcgcggtggcctcctgcgcccacgcgccaccgacgttgggtgacccgtcgtggaggcgacaggcgcatgtgaaccagcaacgattgttgggaggcttctagagctctcgtcgcgccgctgattctcggtcatctttcaaagagtggcgtcctccaccgcacccggtagcaagctatcgcgcatcaggtaggaggtatacagttagggtttccccctgattttcctcgtgctccaccgccgccgcgtcgcctcgtgctcccgccgcctcagctgggagggagagagctagggtcggcggccgcgtcaccttgtgctcccgtcgccgccgccgcgtcgcctcgccttgtgctcctgccgccgccgtgtcgccggccgcggccgcgtcgcctcgtgctcccgacgccgccgctgccgccgccgcatcgcctcgcctcgtgctcctgccgccgtcgtgtcgccggccgcggctgcgtcgcctcgtgctcccgccgccgcgccctggcgacctcctccccacgaccccacctgccctggctttgcccgcgactagagaagtgagagagagaaaagggagagaagagggaaaagagagagtggctgacctggacaggctgacaggtggagcccacgcaggtcccacgcggactcagaagctacgtagtacaaaaccggagtcgaaaccatctaaggacctcgggtcaccggttttataccgttaagggacctcgcgtatctggttttgtggttcgaggacattttttatcccgataacaagtcgagggaccttcggtgtcctttttcctttccattttggaaatctgatatcgatgagagttggacgacctcagcagcaaccaattatctgctacagcatgcaggacctttgacttggactgcctccctactcctactcctactcctactcctactcctagtcaagtcaagggtaagctccaagaaatcttctacttctacttctactcctactgatgaatgtattggccggtatatacatgcttcctcatgtatcacactggtggagaaaccctttgtactcccggttcgtaaccccctttagtcccggctatctttagtccctggtgaaataaccgggactaaagagaggtatctttagtcccggttggtgaaccgggattaaagatcgatctttagtcccggttggtaactgttaccaaccgaaactaaagagagggtagcggcagtcccattaggtctccttttctttttttttattattttttagccagagtttaatccctatattttctcccaaatcgagtgggatgcatattcccaaatcaaaccccaaatcaaagtaacatcccaaaacattcacatcacaaatcttaagttacttgtacacacaaatcaaatacatcacaaatctttaaaaaattacacacaaaccaaatacatcacatattatacatctcagatccatacaacaaatcacaaaattatacatctcagtgaatcacaaattgtaaaaaaaaagaaaaaaaaagaatggatgccggaagcgccgcctgccgccgctccccgtgcgcggcctgcgtgcggccccgccggccgcctaccgcgtgtggccccgccgggcgcggccccgcctgacgcgtgcgagaagggaggagggggaggaggcggccctcgctgggcatcggatgcgaagggaggagggggaggagagggccgggatgggaggcggaaggggaggagaaggagatggatctgaggagaggagaggccggttgttgttgaggagattgaggccgattgtggggaggaggatagggaatatggattatatactacgcgtgattttagttccggtttgtaataccaaccgggagtaaagatctaggatatctttagtcccgtttagtaataccaaccggaactaaagtggtgatctttagtcccggtttgtgacaccaattgggactaaagagaattgacagaggatgaaccggtactaaagatcatctttagtctggttggtgttaccaaccaggactaaagatcgtagaatggctatggggttttaaaccaggactaaaccgggactattatggttttggggcgactgagtaaagatcagttttcgagtagtgtcaggtaagggccggagaatgcatcatgattgatgatgatcgatcggctggcagcgcttatatagtactataagtatactatctcgcaatcaaggatgataccatatctccggctaattaatcaatgaatgagggaaagccatggtatatctatatcataccgaccaaatgatcatatgtgcctgcctgtcctgatttaattatatatgacaacattatcaagctcatgcattcggtcggtagataggttggcatgtactaactactgtagtctgtacaaattttcgcactcgaccgtgcgcttgcttagagtagcaattagcaggaacattacagtacttattaagctcgcttggtgctcctcctcctcctcttccttctagaaacttcttccacgcacacgatatcacgtcaacatcgcacccgcccgctcacgcaccgcatgacgtcaccgacggctttggtggcccacgagcgcgtggggaatacgctgcccacccttccccctccgatcccaatccaacggacatcttctttcgcgggaggattaatgttcatttattgatggattttttttctttctttaaaacaattaattatttattgatgatttgtaaaacgggtcaagaaaagaaggcggcggcggcggcggaggagagagagggccccaccaatacccagtagccgccgagccaggcaacggaggccaatgggagcttaacacgtggcccatctgcgggccacagcaatgacttgatcgactgttatttgctcttgacattccactacactaccagcttcttcttcttgtgccttttggaccttctcttcaaacagcagagcacactagctgaccaaccctacaatatactcgtactaataatagagggtttttctctcctaatttcatcacaactcgtttgctccaggctgagataatcctcatctcaaggaaaatccctttctacaaatacagatacaagtcactgaaacagtgttatagtatggctttatagatgttgagaccaggttttattccatcgtttttttttagaaaaaaagaagactattagatggcttagttctctgaaacatactgtactccagtactgaagaacattgagccccaggacaagcaatagccttccaaatgaatttccatttggaacaatccatgtactgtagcagtctagcagatactacaagaagaggttttggttgcccatcccagaatgctgccaatgcaaagccttcagaaatttccatctctattctccaatccacatatgtgatatgtcttatactttccatccatccatgtatgtatgtcgacatccaccactctccattggaaaggcaaggccctcagctacctccaattgttgctcatcttttccatcacccccctcaactttctcaatgttttcttcagtattccctcaggaaagagagattcttcatgcaaagctatgaacattatttctgattatatgtaatctgtagacagcagagagactactctactgctcctaaagaatgctgcattttctttagatgcctttctaatgctgcatatattttttttgggtagtagatgccttcctttgttcttgcatttagaaccgcttcctctgctttagttaggcgtagtaggttagggtggttgcctaacatacatatgccgtctcctcttcttcatcttctcattcttcttcagtgtcaacttcatcaatgctggcattgaccctgcaaatcagaactatggagtatatatatatcacaactctttagtttaataaattcaaccgggaggataattagatgaaacaagagagcaggagcaggatttgctttgataaggctgaacatcacattcacattcacattgaaagcaaacttttagcgagtttggcaataacgtaacggcacttgctttggcagcatcagaaattctgagtcaagacacatgatactgcaaaaaactatcctctgcaattgcctcgcagctaagggtcaacacactgagaaaaaaacacacatcaaaatccatttctgatccacaagaccacattataattaagaaaaaaaggaagttactggagtaataagcaaggatcattcatgccctcttctagcatccatatttacagatgaactgaacaaagtagcactaatcctggtaccaccagttagtagcagccatcacaaaacttaagcaccaccagctacttattatcatcactgctaatccactaggagtattagctacaagtctgctcaaagacatctaaaatttgaaacatctcaaaatgaaaaaaaaaagactatatagaaggttgaacacaagagagagagggagggggtggtcactaattaaagatgtatacatatcctgtctgtatttttaatgtgttcctagtaatggtaatggagcaattagcaatggaaaagctagtgcttttgtacccttccttttcttcatcttcctcctttcctttgtgcaaagctaatggcatccacctcgagaagcaccaccaaaaggcaacaatggtaatggcaatgggcaaaggccgacgaggtggcggccgctttgcaatgcgattcccaattgcgcacgcgctggattcctgcaggtgaagttgctgttggttggcaatggctagtactcgacgatgaggctgccgaatggcgcgcggtgtggaatgcccttgcggcgcttgggcggcagggtgggcggcggcggcggggtggacggcgtgaagctcctcttggcaggggaggtggagttgtcggagtcggaggtggaggccatggcgtgggcgtggcgtagtctcttcctcctggcggcggtggcggtggcggtggcggcggcggtggcnncntggggggagccgccgncgaccttgcagccgagggagcagaagcggaagttgtcaaggaggctgcggctgcagacctcgcagatgttggcgacggcgcccttgccggccttgtgctgggggcgctcgttgaggaacaccacgcgggcgctgttgatgacgtatgtctgcaccccgccgatgtccatgaacctctggatgtccgacaccctgatcacgtcgtggtacgacgaccgccggatctgcaaccacaacgccgccaccgccatggttaggtaggtttggtttgggagagggagactgcaatgcattgggaacaaggaaatggttagtacctggatggtgtggtggtcgcggtggttgtgggcgaggcagagggagcagagcgcggcggcggcggcgtcggcgtcggcggcgcagtcgaggcagaacatgttgcactcgccgctccggtgcgagtcggcgtgcaccttgcactgcgagaagaagctggccgagagcagcgggctcagccaccgcggccactgctctccgtgcgccaccgcctcctcctcctccggctcaggccctcctcctccctgcaagtttcaataaaccaacgcatccgtcagtttcctttcctaaactacaactcgatattagattggatgaaaagaggcagttttgaccaagataatcccctctcctttgaacgattcatgcacgcaattcacagcgcgtttcttgattcttggaaatcacggagaagcgatttttttttaaaaaaaaacccacggatttggcggcgaaaggaatgcggggattccaacgcacagagggaagcagcaaaagcaagaacccaagaagaagaagaatcctttaatcaatctggcgccattgcccatagaaatcggccgcccaatacaacagtaaccgaaacaacaacgaaggggaataaactccagaagcatctcattccttcattcattcatgtagtactacacaagaaacaaggagtaatcgaaaaagaagaagagaacggaatggcgcagcatataaacataccatgatcctcctgttcttgaggcggagctccttgaacggcgactcgtggtcgatggccatcgatcgatcaatcaatcaatcagtcctctcctctccgaatgcaactaggcaaagggtaggaagaagaagaagagagagcggaggcggcggtggatggatggaatggcagaagaagaagcaaaaggaatgaataaaaacagaagaggaggaggaggggtgggtggactcgcggcttttatcgacgagacgagaaggcgaaggcggcttgggctcggtggaaacaagaagaagaagcggatgagtcgtcgtcgtctttgtaggagtcgtccaactccttccttctttcctatccccctcgacacgcccaagtaatttcttttttctttcctttcctttttttgcctttttttttcatcctccttaaataaaccacttgtcagtgacagtaataatatttactagtaaatttatgcgatttgtggctctttcctctatctgagtaatcaatgggcatgggttgttgttgattagcactaatagggttgtttggtagggcacaaaattttaaattttactttaaaagttagatatgaaataaagttgtgaagctatctaaatccagttttaccttatttgtttattttataagagcacttcaatcagtttaattttttttttttgaagctgaagccctttttttatgaagctgaaactatttggttgtgtttcagctctaaaagagatgaagctagagttgaaccaatgccctttctattaggttattactgcttaatttaatttatttttgatgtgaccttaatctcttgtgatggtttgttttggagaacacaaggggaaagtggatgccgaaatggccaaaagcgggatggagggagggcatttgcgcgtgcgtgccgaccagacgagacaccggacgcgctacagtacactacttgtccacgcacgtgttgctctctcgctattccagattgaacaccctattgggtactactagattattagggtggattatcgatttaattattaaaacagattagatattttaactaaataaacactgctcaaaatgagtggtctaaataaaactacaacaggaatattacttaacatatattttttttactaaatcttaacatatttttaacatattttttaagtgtgaaacaaacaatccattttaataattcagtgaataagctgaaaagaacaatgccctggaatcagtttcaataacccagtaaatccgtttcatgaggaacttcagatgaaacttctccttaaaaaaacttaaatgaaaccgccttttctttgtgcagttgtattgctccttgttgctacttggcctcgtctgactgacccgtcatcccgcccaatttttctttgtaaacaaatccatccagcaaaatgatcaatggcttacaagtggcacactaatcaatcaaccatgatgcacctgttctcttcatttccaaccgttgttaatttatctgcttaatcaattatgccacttaatggagtacagcagttcgtcgctttgtttgttactgatgcttggtttgcattgcaattgcggacaggcgcaccagcaccacaaatacaaaaagaattccccagagtatccaaatatccaatccactgctactatttttcctctctttgcctaattgccttgttcgattctttcaacatactatgatcttatattattcttatctgtgaggagccagcagatagatagatagatagatagatggactagtcgttgtactggtgccaattccagtcctaccaccaataatgctgccggtctacaaatgcaaatgcattctacaaactactccaaatgcaaacattatgccattcttttcacacctttttgttcttgttcccctttgaaaaactgcaaagtttttgtttgcactctcctctgtcagtctgtatccaactcaagttcttcttgcactctttgcttgccatggaagaaaacaaagttcaagacagcaaaataatgagagaattttgaaaggtcagtgaaaggaggatttgaatttcgaaaagattctgtggctacccactcaatcaaaggggcatgctttgccggtgcacggggaccgtcggattctccatctgcggccgtgctttcagatgctgctctttcttcacatgccattgattcctcctctctagtatctctcactctctgtctctgtctcctgcttcttcaagtgttgatgattagttaaagcaagcaagcaggcaggcagtggagcccttgaccttaaagagatactcatcatcagatgttaatctaatagtactagtataatctaatctttataatacttatatctagtttagtactactacatgaatgcaatgcagatgcaggagggaacccaggaatgcaggggaggcacatgtgcttgatggattggatggctgctatctgcaacttgcaagaacttcctctcactaatctctctctctttctttcttagtagtacagtacttgtcatctgcaatgcaagccatctaatctactcctaactgcccacttagcctgcactgcatccctgtctgctgctgcttgcaatgctaggttagttggttagtagtttgtgtgtcttgcaaatgtctatgcatgctgcaacttgcacacaccaatgacacatgcattttgatttcaccacaagggaaggggagatcgagagaatgataatgcagcaatttacgtcagagaaaagtgactcctccctccaggtcggcgatgaacttgctgcatctcatggaagctgaaaaggacatgaaatgggcagatgcatgcgtgcactcacaaagctcaaacctttttttatatataacagagggaaaaagcaaagggcaaagacatgtataatttgtagagtagtatgcaatatggcaatggtgctggactgctggtgtcgctgccacttgcaacgagtagctgaaaggaagatacgccattgccatttcccattagccatcgccaacattggatgtgaactagcccccaatttgccacgagtaaaatggtgcctttcttatctctagttggtatcttgtgtggacctgaacctgtttcgcactcgccgttgtccttgtcatgtactactagtcttcagcctgcattctgaagccagataaactgaactagctctcaatgttcagacatatttcagctatttcaccggattatttgcaccacgcctcttaaaatacgtttttctcaaaaaaaaaaaactttcttctacagcattatttgttctaagctagtatttgttaagtttatttctcaaaatgtataatttagagaacttttatcccataatcaagtagataatccggtgaataatgtgtttcaaatgggcccttagattttaaaacaactgaaattctagctcattcagaacagaggataaaaaggttgtatcactcactgctccttcacatgctaggaaatgggtgaactagtctcctcaggtgtaattgcatttcgttttctgaagactagactactgggtccaagtccaaaccggcgaaacatataatacttttcacgtgtgtggtttcacctcagacaaatccaatccaatccacagaaaatggtggattccttgtctccgttccccacaatgggatgatcacaagttggagcacttctttctttttttccaagtttcacaaaaaagaaagcctttggatttttgaagttaatttaatcggttctaaccgacttctaacattgtgatgatggtagccactggaggctctctctgaaagcaacagggaacaaaagctgtgcaagagaaatatcgacacaggctgaaaaggacaacccccaacactgtcatggatgttgccgtgtgacaatgggcaatcaaattgattaattaagaacatttccttccctaaatcagttagttagtgttccatggctttggtttggatgatgaattagtcgtcatcaactcatcatcgaagcaggaatcaaaacaggagagaagaagatgaaagtttcggctttgttgttgacacagacaattcaactgaatgctcacggaaaattcatgctgggagtacaatgatgaatcatcgccacaagagttttgtcaattctgaattaactggagatgcagatgttagttgtatcaatgatagatagattgctaggacggcacattacagaaagaaaagtactcctagtagaaaagaaaacaacggccaattccatgccaatccaatgcttgatatattgatgaatgcaaactgctttgctgattctcatttcctgcaatgccagcccaagtagcagtacattattacagttagatatctgttcacatattgattgaatggtgatccattcacatcaaaactctcccagctgcattgccgtacgatgctgggaaccatgattaagttgtgcgtgttagcctcctccttgcaattagctaagtattaattaactaggcaagtagtttcctgtggtgtctgaataattcctgtgcctttcaaattcaggcagcaaggcagagagagggacaagaatatatttgtgtgtgttgatggatggagattggagaggaggaggaggataaggaggaagaagggtatatgaaaaagcagggaatcattggtggccgtccgttggttgggctgtccaaatgtgctgacagccacgccgatagatggaatggatgccatcctcctccctctttacctaatcaaatttaagcatctgtttcaaaggaaccattaaattttaagcaagtggaggtagctctcggattggccaatggcagccaaagtaacgaaacaatcaggcaggaaatgcctgatgccgttctgttgctgggggaatcagaattcagttaaatttcaagctagtagctcacctctttaatttcaaagtgaaattttcactctgaactagaagtagtatcctttttgcaagcaatgcatcagtgcaccgatgagtgtttactgtgtctgtgcgtgtgttggacgttgatgcgacaaggattaaccgcacacactgtcactgattccgagtaatcatgttaggacaaaatatccacacgctgccgacgaccgagggctggtcaaatggaagacttttgattcttctcttttcccagaagatggagctaaacttctgctagtgttcaaagcctggagagatacacacattcagatcagatgcctcttttttctctactttgctcaggtcgtcgttgccggtcgtcgaaagcaacctagtacaaactacagatagtaggagtactattcacaagtttggggctttttttagaagtacgaagtagtttgtgcatttgtagcatgatgatgatgatgatgctggctcatcgctatgattacatgcacattcatagaccatcctgtctgtattctgcaccgaacgatagaagctacgcggatcaccaccaagaaaggcaacaatcaggccaaacttcgttcagaaaataacaagccatcttgtgacaaattaccttccatatggctaaaatatgtactgggtattatatggtatgaaacggtcattacaacgcaacgacacttttaggtagcatctaagatcccactaagacggttttaacaattttatgaaaaaacattcttgttacaggtgcatatgcttacatgactttagccagtacagcattcacgacataacattttctctatagctccaggtctttaagttttaagttataggaactcctgaacatatctgccaagcaggcatgccgtcaacttattgtcacggcgaatcctgtaacggctgaagaaatgtcacggagtctcgactgtagattgaactcacaggatccggtcttgaagatcagacatgatgttcgatgccaaagatgtcaacttcttcccagtttccccagccatgttcttgatagaagacagatcctgggaagcctacagagataacaagacatcaatcataggtctatcaataaacccagctgtactatgctactcttaatttacctggaaagaaagccggttgatcaaatctgaagcactcagatccacgttggaacta

SEQ ID NO: 7077 - DNA, 28590 bp, Oryza sativa
gcgcctctcctccccggcgccgaaccaccgcccgcgcctctcctccccggcgccgatgccgccgtggacgccgtcacccgcgccgctcctccctggcactgacgcggccagccgtggacgctgccgcccgcgccgctcctcctaacgacggccgctcctcccgacgacggccgctcctcccggcgcccctcctcggctcctccccttgtttgctttctctcatccccaaagcccacgagctaaacgagctagctcgagcttgctgacgagccgagccgagcttggtttctagctcgttaggataacgagccgagccgagctagctcgttatcctaacgagccagaccgagccgagccgagccagctcgacatccagccctagcccccatagcattgtaatatgagagcaactccaatacaacttcggcgcatcatcacccttttacttttctcgttttccgacgagttcttcgcaagaggtaacccgtctcaatggcctgtgctatcggggctaacatgtcgttttagacgtgttaggctcgatatcgcgagtcattgctatcatatgtcttgctatattagattagctaaggcatctaccatcctgaaaagtgtctaattgcttgattgtctagactgcatgtttcttttcatattttgagatgcatcatacctagtcatgcttagaaccgtgcaatctagcctgcaattaagcataataaggatagtatcggggtttcggccgatcttacctaatatgcatgtttcactctccttgtttcatgtatattcgccacttatatagatagatcttttgtataagcatatcaagttttagtcagtgtcggttagattcctacgccttcatgcttgatttatgtttgatatgtttatatggatcaatctgcctatataagtttgtactaaagtattaactagtacgttatctctcttgctctaaatactgtcacattggctactttcataataccgttttaaatcaatctgttaaactctatagatagtattacaggcgattgggagtgtttagggtttattattctttgacatatccagtccatagccgatttggtctaactatatcggctgagaccatcaacgatatgctatcggcctatcggcagatcggctatcggtcaattgattctgcttttattctttcttgctgattgcaagatcaagggcttgtttggttggtgacctgactgacttgcctgagaaaaatccatgcctgtgtggtagaaaagctgtgttttattgtgcctgattaggcatgtgtgatgttttgttgtttggttgaaaacctacgcctgagtgaatatattatatataaacattttgtttacttgagtaagatgttgacaagtgttgatagcagtcatatcaatgaagaatcaatgggggaggattagacacatacccacgcctgactcaggcgttcatttttggtggcctgagtccggcacccttgcctgagcatggacaccattcagggaagcaaccaaacactactacttactgctctggctagctccaggccaggcaaatactcgccagggcagcaaccaaacacgcccaaaatcagctggcatgtccttgagacactcgaggctagccttggacctgcactggagttaaacagatctcccagacagccgtgttttcacacaatgcacacgtcgcatagttggaaagtctgtgactttgtaatctttccgaatttcagacccggttgtgaagcatcaccaaatgaacaacctgcatttgttgggccccctttctagcattccttcgtaccaaacacgtaaatagaaaatcctatggagagagtaagcagaaaaatttgcatcaccagatcatttccactagaacattagaaacactagtgacttgtccgtgctaacgctacgataattttaaataatctttcatgtatagcgtatgttatgaattaaatttaacatttgcaagaatcctatatacctatacaagtcatccccactaagtgcaattaaaactaatttcctgtgctgtggttgttccacgtcatcccaattaaatctggccttaggatcgagcttgaacgtgctagatcagtcgatggaagcacagcccatgttcctttctttcctggcccatctattcatcgacccattaattccagcccagcgagtctcctgtcacacgttccccattctcattagcaagcatgagcgccgccggtagcaacatcaattgaccaccgcctttccacatcccctttttctgacgctgcgtttccccttcctgcaaccatcgatggacttcctgaactgtgtctagaatctgattcgaccgcatggcaagccatccacacactgacgttgtgacatgaggaaccgataggagatggccatgctacgcttcgcttggtggtttagtttcatttgtgagtcatagatcccctaatgcatggatcactgtatggttatataggatttgatccctaactcacccggccaaattacttttatcttttgtgaagatgcttttcgtttgatcacttaaatcttctttcagatgttagtttattttgattgcttcgagtaatcaacgttgcaccggctaattgattttttttctctaattgctttgctttgtaggccatatccccaattcatggatccgactaccattcacaatttttgttttcttatcctgcagggttgattggatgggttcatttgactctagatgagacaatcaggtatttgtgttttagtaagcaattgatgcaaatatcaaaatgatctacttcgcatccacttagtcttgcttatgttccttttcttacatgttaatattatgtgcatgaaatgcaccttttgttgtttctgaatttcctggcctccatgtgcaccttcaatcgaattttattcagttgctatatatatgcaggtcacttcgcaatcctgcaaatacttaacgattggttggagaaaggtacaacccacattaataggagtgcaacaaggaagtgcttccataagtgctcctattatcctccaatcttgataagctccttttctgcaaatgttcctcggactttgtaagcagaaaaggtggattttttttctttggttaggctgttcgggatggagctgaaatacatgagaagaactaagagataaaacagaaaatgtagatgcgggaacaagaacaggtaggtgatgccttaattattgtcttattattcatttcagacggtgtatgcaattgtcaaacttgcgtctacctgcagctatactaatccatatccctttcatgaacatttcttctttgatcctttgattatctgtgttctttatatgtcaatttctaaatatcttggtaggttgctaaattttaatcctaatgggatcatgttttggctgcttggtgtctaaccacatccatctgttatttatgtcgctgagcagcgtgcccaggatggctatacacaagtcgacttcaagaaaatgtgaagggctaagaatgaggtatttttcttatccatttagtccgttgaatatgtttgtggtaggtcctctccatactaataaagacaaacatccttatctgatacgtactccctccatttcaaaatatttgataccgttgactttttagtatatgtttgaccattcatcttatttaaaaaatttaagtaattatttattttttccatatcattcgattaattgttaaatatacttttatatacacatatagttttacatatttcacaagtttttttaataagacaaatggtcaaacatatgctaaaaagtcaatggtgtcaaacattttaaaacggagagagtatattgtttgatttgatttaatttatagcacctgcatccatccaatctaaacggacaactaaaattttcgacgagtagtatatagatattttcacctgtatgtatttagcagtttttagaatatccgttgcagtgcaagaccacggattagtcttaattggaggtttagtttttactgtggctaatattttgcactgttgatcgactgtctgttcctccacatatacgagcttagataatagtagaattattggttttaacttctacattttctctcatgaactttctatttgatttttatttgactttccaattaaccgataaatttttactgccaacactaacatcaattttgtgtataagtactacagtgttttgtgatctaaaatcatgtagagaaccacagatagtatatatatttaaaagttatactccctcctttcctaaatgtttgacgttgttgactattttaaacatgtttgatcattcgtcttattcaaaaacttttgtgaaatatgtaaaactatatgcatacataaaagtatatttaacaatgaatcaaatgataggaaaagaattaataattacttaaattttttaaataagatagacggtcaaatatgtttaaaaaagtcaacggcgtcaaacatttaaggatggagggagtacaaatcatagttataattcatattatttctttatctgtgtttcatatattgtgatgcatcttatttttcgctcatatataccgcagcaacgcacggggtattatctagtttgattatcttttgaagaatcaatgcctagactttgaagttcctaaaaaaaggataatacatagaatccagacgaccgaaattctagtattagatagacgagtttctgatttattgtttacattgccaccttaaggacactattgtcaggttaaggtatgtcagaatatgagacaataggatcactgtatctagaatttctaccatcatatgtgaacaacataacagtacaatagttataattctttttttacaaaatcaaaacataaaaattattatagtaaagacttattagccataaagctcatgtcattcatcaccgtacatctacaatactcaacaagtctaaaattacaagaagctctttacaccaaacttacactttcttctatcaaatgaccacccaatccaccaccataaaaatacgagaacttcttttagtcttgaatgcccagtagaatttctatagaaaaacgcgcatctgctgcttgtcacagtagattggatttgacaaacaactaacaattctatccgacaacacacatttgctaaagcacaatacatgttaagacaactcatcattgatcaaataaatttgttcaagtgtcattgcacctggtaagagctgccagcctactccatacatgcatattttcttgcttgtagaactgaaaatagaatcgttcattattacatgccagaggttgttactatggttgcaaacctttataaataattttaccagttaattaacaaacaactttaatttggctcctagaactaattgtaattatacatgttctaattttactacacttcagctttctaaataacaatagcaaggaaattttactcacaaaatacacaccagtgaggaaatacaatctaactgtgatccttgtaagtgctatctactgtccacaaatcgtatagagaaatgcaccttttctgcaatatatatgatatatgagatcaggtattcaggtgaagaggcaagaataacaaaggagacctgcaccttactgtacattatattgtgcatgctgaagtatcaccgaagcacattatattgtgcaatatcagatcaaaggcaaagaagctcaccctcgacaaaagaacctaaaattcagaccataagttcagaaggatcaccatagtaaacaatatgtaaaatccaaaaccgatgttagcaaccatgtttgctggtcagacccaaggcaaacaggccactgaagacagactcaacgttaccatattcataaataaattttgccctttataaccttgagggtacagtgcatgtgaatattacgttaaagagcaaacgctatcaggtaatggtgggaagggaatataagcaagccatgcatcagcttgcctgcaatacatgaataaactgaatgcaggagctcggatgcatgttagtatggcaagtcagtcttatgaagctgagatgatgaatggagcttttaagtctaaaccacaccattcactttgacaaatgtgcagtattactcatgacctgcaattaacctaaacgacaatatgtggttagaactactcaaaatacagagttccttacaacctaagtgaaatgctgcatacaaacaaacaaattttctcaaacaaaattgtaataatgaacctaaaagaatttgaaagagctagcacacttatgctcctgaacctttttttttttgcaaaaagtgcagaacacaatgggtcgcaattatgctcggaatagcaagattaaacacagcatttccaatcgcatgcatagttattcaaatttatccagtacaaatgaaggcaaatgcaggggggaaaaattagcagaaattccctccgctgacctcagaaatggccttctgctgcagcctgcataacacatttcagcagcagagaatcacaagttcataactatacatctagcctaagagtctatcaatgatgaataaaaattgatgtggttgatagaaagaaccacccaagtacaaatagaaaattgcatcaactgctcattaattacagcgaaacctaaatctacgggaaatagcacccttgatctgggagcttaggctagtaaaatgcatacaagattatgggttaaaggtatatggtagcttttgtgccttgttaatgaaccagctatatacataaaatcagcgctgccaagctaatcatcaatgaaaagtgaaataaaagggagaagacatacatgcttgatgcttcataggacatcacatttatggtcatattagggatggggatcagctagaaggtggatgggtggtggagtagggtttttgtacctcttggcgttcaaggcggaggcggtggcagcatgccgatgcaggagtccgcgactcatcagcgtcgcagatcggcgaggcaagggatggagtcctggcggtgcgtcggtggagcggatcggcgaggcttgtcgatggagttatggcggcgcggacgagatcagcgaggcggacacctaggcaatgacgcagatgcagtccctagcgagctacacctcaccgactataccctgaatttaagaaaaatggagaactgaacacaactggatcaaatagcttgttctaatatgcaagatgaaacacataaatattttgtcaaatatcgattcttttaaaacagtcgtaagaaatttcattaggagaaattttatgtatctgccaatgttcatgcttatgctctaccaactgcatattagaagtcctgacccgaactgacggcaaactcaaagttcagtagacaaagcaaaccagttcatcctttaatttctccaaagctgcaagccaagaaaagccccaaattcctacctttcttgacatgctcaaggcaacagcaaacacacctttcttgcattgcatgagacctataaacctaaactctacatagcttcatggacaatgcaaacaacttggatctttgcatttctaatcgagcttatcaccccaaaggcagccatgtccggaatgggatcgagcaatgctttaccttgtccgcagcggtacagaaggcggcgcaagatagttggtggtggtggtgtcgaaggcgaaggcgactcgcgacgcggtcggcgggaggcgctcgctggagaggggcgcgggcgttggaggcttgtcgtgacgcggtcagcggggaggggagtcggaatcgacggcggcggcggcggcggttggcgtgagagggatggcgcgaacaacgcgcgcggcgcttgagacggcacgacaaggttgtggcagggaagagagaaggaggtggcggcgtgctctgtaggttgggcgaggaatctgggaaccgaaaatcacgcacgcagcgatgagcggttgaaggtacgttgcggtgattttcagtcggtgtggactgccgccgtcgcacgcattcctccccgtccacccccacagccgacgccgcacccagtaccgcggcgcccattcccccctccatccttccccctagctgttcgccgtcacgcacaccaccggctgcccccagcacccgccgacgggccgcctcgcattcgttcgcggccgtccatggaggccgccctcggactcctccgtgcgcgccaccggtcgccggctctccctcttcgccacccggcgccgcggcggacgtccaggaagcctcaggagtcaggacctccagaggggagaggcgtgcgtgattttcggtgtgcacggtctcatactgggtgaccccgcgtgcgtgccctgtcgtcggatctaatgcgctgaatgatcgtggaccgttggatatgtgacatgatgaattatgaatgagtaaaacaacttgttgaattatagagcagcaaaagaatagatagattatagggtagactagtgtatcttcctcatcatcattaatactttctccgtctcaaaatataaatccttatattccttatattttggaatgaagagagtagcatatattgaatcgccgtaccgcccggataggaatttgatccttataggtcctctaagaatttgtttttgcttaaaatcatccttgggccacttaatatgccatatagctatttatagtcaacaattctgttagaaaatatctcttttgcccttaatttgtatacaactatacactagtaaagagaaaaccaagatacataaacaacatttgtacttcccattatttcaacatgtgcaaaagaaacttgagtctaatggctattgtatacacttgcaagtatataatttacttttgttttacataaatttctatgcattatctataaaaaaaattcattacgcatttttttgtcttatatatgtgaatgagggggtataagtgtcattcatcaagatatttgttggttatgtgggtcccactatttttatcttatttgagtgacatatgggccccatatctttgttgtaattttttattttccaattttattttttcagatcaaactgtcacgtaagtgtcacgtcaacaccacgtaggacgaaggcttaatcaaaagatccacataagcgtcacgtcagccaaaaaaacggagtcaataacatcgagggacctcgtttccactggttttataagttgggaatgcaatgtatccggttttctagactgaggatgaaaatcggactagacgataaattgagggatctaaggtgaacttattcctaccggaaaacgcaggaggaaggccttcgggctactagccgggtgaaagggaaggattgaaccgtgtgattttgtgacctttcggtagttttctctgttaattctgattattcactgatacacaacgtactaatatatatcaaggtatctgtgtggataagaggaggaacttttgatctctacgagcctatctccacctcaccctcctctctctatctctcctctgggtctaaatgggggtcaacggcatagttattgagaccggaccagtaatcgaactggtgaggctctcggttcaatggttcgctggttcaaccgggtgaatagttggtgtaacccggttcaatactaatcaaatatattaatcattctattagaagtttagaacacaacaagcaaggtagcctggttgttgggagagagttaactccccatggggtcatgggttcgaatcccacccaagcgttttttccctcatttttcccccactagcgcgcgcttcccctttctatcccacattcccacgtgccgattcgaccggttcaaaaggcggttttatttccggtttgacagcggtttttcttcaaaaccgggcggtctgaccggttcactgccgattcgattgcatgccggtcttttacctggaccgaaccggcaagagctttggttccagttttttccggtctgaccgccggtccggtccggtcttaataactatggtcaacggcgacgcaagatagtagcaacggggtggacgacgaggcagcaaggagggagttgcggcgttctgaccggttcactgccgattcgattgcatgctggtcttttacctggaccgaaccggcaagggctttggttccagttttttccggtctgaccgccggtccggtccggtcttaataactatggtcaacggcgacgcaagatagtagcagcggggtggacgacgaggcagcaaggagggagttgcggcgttctggctgcagaggaaaggatcaaggagagggagccggtgagctgcggcgacggaggaggaaaaggagcgggtggggaaggcgacgagggatctctactacatggttttgtaagttgagagatgcgttgtatctggttttctggtctgagaatgaaaattagactgtgtgacaaatcgagggacctatggttttcctttccggcacaaccaacattggacaaggccgagttcaaaaaaaaggaataagtccactttgactcccttaaaaatgacaccaatctaatctatgacccctaaactgctaaaaccggtgtaaattgactcccttaaaaccagatattttgacccctaaattgctaaaaccggtgtaaattgactccctcggcggttttgaaaagcggttttgctgacgtggcgtctacgtggcagtgttgacctggtctgctattgacgtggcgcttaggtggcattagaattaaaaatatgcatgtgggacccatttgtcattcgcatggaagaaaattttgtggggccacatgtcagtctatcccttcctcatcctccccctttctctcccttatctctctctccctccccattcggcaagcggcaaccacagccatttatgccactggatgagcgctgccatggccgtgccttaccgcggtttcgtctcgtccttctccattcccagcaatgcaaccacaaccgtcaccgccgttgtgcggccgacctcgcgtggtttcgctacctcaaccctcagggcactgcccaccaccgcaccaccattcccgaccactccaacctccaaggtcccttttgggtgtgcagcaaatgaaaaggaaaacttgattccttttcgtgaaacgattccgccgctcacacttcttggtgtgcatcaattattccttttgggaaaacttgactttttttttttaaaaaaaaaaagaaaatcatctggctgtggagtgtgaacatcaatgttttctccttccctttcatttgctgtgaattcaatcccctcctcacgaacactcgaacaccatgaggactctctacaagactcggactccaccgccgcattctcgcatggcttagccgtattctcgtttatctctaatgggtcctccgtacacatgacctaaccaaatttttcaacgaattttttccacttttctgactagccgatgcgtccgttcttgattcttgtacgtattcctcattcgtgctgcatagtgagcagtagagattcagactttttttttgggtttgaggatcagagaattgaggggagtagagattgagatcagagaattcggcggtgacggcaggtctcagtcagatttgggcggtagcggaggagctccggcgagctctctcctaggtggccgccgtccccggcgccgtgaggtggccaccactgaggtggaggccaaagccgcggtccgccggcgcgcgccggtcgtcgttcgccaaagacaacccccgccggtcgacttcctccacgatgccgaccctatctcgccgagtgctgcctcgccattgtcgactcctccactccggggaccgccactccagctagctcctatgtcagctcccgccgccgccagccgccaccactccggcccatgcccgccgccggccgaaggggagagagagaaagaaagagagaagggaggaagaagaaagagagagatgacatgtggggcccatatgctagtaggccccataattttttatgtgtgtgaatgactaacgagtcccgcgtacatgtttttaattcaaatgccacctaagcgccacgtcaaccccatagactggtcaataccgctacgtcagcgccacgtcagcaaaaccgctctataaaaccaccaagggagtcaaattgcaccggtttcaatagttcaggggtcgagatatccggttttgcggtttagggtcatgaattagtcatttttcagggagtcaaagtggacttattgcgaaaaaaaaacaatggacaaggcccaaaagcccaaattgcagtgcgtggttgtggttggcccaaacaagtccttcccgtaatcgcgttcgtcatcatctatctcctccaccgcctgatcgcgccgccgccgtctcttttcacctacaaaaaccctaagcccaaaaatctccatcccccccgcccccagagatcccccaatccactcgattcgatccaatccggcgaggtacaggatgctgccggggtcggcggcgccggcggctgggagcggcatgttcgtgccaacgcagacggtgggcacggtgctgtgctgcatctgcggcgtggcgatgcagcccaacccggccaacatgtgcgcgcgctgcatccgcgcccgcgtcgacatcaccgagggcgtcccgcgccacgccgccgtcgtctactgccccgactgcacctcctacctccagccgccgcgctcctggctccgcgccggcccggagtcccccgagctcatgcagatcctcctccgccgcctcaaccgccccctcgcccgcctccgcgtctccctctccgccgccgagttcgtcttctccgagccccactccaagcgcctccgcctcaagctccgcctccgccgcgaggtcttcaacgccgtcgtcctcgagcagacccaccccgtcgagttcaccgtccacgatcgcctctgcgatgcctgcgcccgcgcccagtccaaccccgaccagtgggtcgccgtcgtccagctccgccagcacgtcccgcaccgccgcaccttcctctacctcgagcagctcctcctcaagcacggccaggcctccctcgccctccgcgtcgccgccgcccccggcggcctcgacttcttcttcggctcccgctcgcacgccgcccgcctcgtcgacttcctcgccaccgtcgcccccgtccagacccagaccgccaagcagctcgtctcccacgacaccaagagcaacgtctacaactacaagcacaccttctccgtcgagatctgccccatctgccgggaggacctcatcgcccttagccctcaggtgtcccgcgatcttggaggccttggacctatcgtcctctgcatcaaggtcaccaatgccatcgctctgcttgaccccctcaccctgcgtgtgcaccacctcgaggaaaagaagtacagggtctacaacttcaaggctgctctcaccagcaagcagctcgtcgagtacatcgtgctagacatcgagcacgagtcaccagagattaccattgacggatctcgctaccagttggcttatgcccaggtcgcccgggtctccgactttgggaaaaacgacaccatgttcaccgtgcggactcatcttggccacctgctgaatcctggagaccttgcccttgggtatgatctttatggtgccaacttgaatgatgatgacatggacacagctatgatgcgccacagtctgcctgaagtcattcttgttaagaagagcttcgccaagaggccacgcacacgccgatggaagctgaagaggcttccaatggaggaagatgctgtaaataaggccaagggggagctagagaagagggctgatgagtatgaggagtttctcagggacttggagcacaactctgatattagattccagattgatctatacaaggatgaggactacaggtcggagatggcatctactattggtgatgatgttcccactgtgccgattgaggaactaattgaggacctaagtcttggtgatgatgaggaggaggatgaaggtggggaaggcaaccaacatgctgttatggtgggatgagttaatatgtttacctgtgctgtgcttctgccttctggtgatggttgctgccaaccgcagatcataggtctgaactgcatctgtttaatccgtataagttttgttctcccctttacttctataagttataagttttgttgctaaattgtttcaacttttgctgtttctcatgatagatgttgtatcaccttatcctgtatctggtgttgcagcttggcttaaattatatttctctattcttattgtctgtgatatgttgttttcttgccatagtgtggctgatcacaacatatcttaaaatagatgcattgtttgatttccaaaacatctagtttggtgtttagattgtgccagattcatatttttactatatgtttttagtccccattatgtggtttgcaagcgtggaatatgattgtggatttatgctgagtcatgactagagaattgtaggtatgacctgaaaacgtctgccatgttgagtgtcactccaataaattgattaaaaaactaataaagataagtgtagtataatatcatacccaggagccatgatgagacaataatgtgcatttttagtgattgcaattcaactgctgctgttttatcaggcacttcattcagactatgcctacatcgtgcaataagaggttagatatgtagagttgatggacagaacagatggtgctccactaataagcgatgagtactggtttggtaaaactttaataagttaagaattttacggatcttttttttctattactttcacaaggtggtgctgttctcaaacctaatgacttataatcgtaaaaaaaaaaaacttagattttattcaaacattaaacttctgtttacccttgatttctccgcacttccatttatcatgtagcatagcaggctgtggacttgtatccaacatttctgtgtgagtagtttcttatgcttcagaatttttagttctaccagccgaaaagtttacatatttgtgccattttgatatctataattatagttctacattagagtctacataagataaaagttccactgagctaaggcatagggaatgaacgtgcacttgtctattattgacatggtgaattgagtcatataaaattcaccacccatgcccctgtgcctcttgtattttggaactgtggattgtttcattcagttctctggaatgaattgacccaacagggtgcactgtatgttttttgctcctattcattgcctcttatttatttacttatggtgtagttttattagtttcaatagtaccagtagatgattcaagttggaatgaaacttgctcagcatgaaatcctatttttctgtgattgtgaaattagaaatgttgcttggtgataggtgtacatccgttccagtcgggccatattctgtatattccaagttttgtgtagtactatatattttagcgtgtaagaactagtaatgggcccttttttatgtcatgcacaaatgcatttgtttactttgagcttttgtcaataatatacatgcgtggttggtgtggtccgattaacaatcatctgtgtttgagctcaaaggtatgatctctcggaaagcagagtttacaaatatatatagagctgcgcatgcttagctttgagtttcctgccttcctgggcctgatttgttggccttgcgcgggagtggtacgtgacttggagcacacaaacaaattgaaagctttgctgcttctttcttgtgataaaattcatttttttttgtgtcaaagtttacattttggtgtggtgtggagaaacccttgccatttggcattgcgtatgactaaccctgatgtgaagagaagttttcgtttcaaaatttggaaacatgtttgttgcaagttttgatctgattactagtactagtactcgtgctttacaaaagtaggagtattggatagaccattgaattcctgtagcagagtctattctgaaatcctggaatctggacatggtgcttgccggttcatttcatgtggacgccatatcgtcctgcatccgaaaatggtttgcttcgtaggatcgttattttgcttgttagtgtgtcgtccactggctttaacgcaccttttgtgaattgtgatgattcacttttggagtacgaaaagtcccatcattcagctaatatctacatccatcattcagtttaggtactagtagtgactcgtaaacaattgtcgcagcaaaatggaaattgataccaaactaattttctcatttatgccgtcgttacattgttcttccaacaagtattaatccgtgttatatactccagtcacggacttgctacatgaacgaaaagcagcagccgggcgatgatagattacatcacggctgacgtgtactttgtccgggagacgagtagaaaaggacaagttgtatttcttcatctttctttggctcgtgccctacagtactccgcggctgcctgccaacccggtaatcgcagaggcaggtcatcgtcggatttgatcttgacggctgacccgtcccgccggcggtagctgcagccagtgcctcgccccccttccatataacaccaacctcctccgcgatcgcaatcgccaccaaccccatcgagaagcagacgccaccaccgcgattcgaatcgccgccgtctcaaactcaaaactcacaggtaagttcccctcgcattgcttcgatcttgcctgccctcgatccctcattcgatctgtcgctttgaatcaagatttttttgatcgcattttcatcagatcgatcagatcatgggggacgtggtcaaggacctggtggcgggcaccgtcgggggagcggccaacctcatcgtcggccaccccttcgacaccatcaaggtcaagctccagagccagcccacccctgcccccggccaattccccaagtacgccggcgccgtcgacgccgtcaagcagaccatcgccaccgagggccccaggggcctctacaaggggatgggtgcgccgctcgccaccgtcgccgccttcaacgccctcctcttcaccgtcaggggccagatggaggccctgctgcgctccgagcccggccagcctctcacggtcaaccagcaggtcgtcgccggtgcgggtgctggtgttgccgtctccttcctcgcttgcccaactgagctcatcaagtgcaggtagcttttactcaccattgcgtgctaaattcctttcatctggtggtgactgcactgttcattttcactctgagggtgcctgagctttgcatcatcgtctgtacaatagatcaataggaatcccctggtaatgagcttctctgaaattgccctttcctgcacatatcattcttcaccatcagccatgttactgcgatacactcgttcaagtgcatttcacattttcgttactgcttgtcacttccactgcattgtggctttttttactcacgccactaaaagttaatctgtggacttattttttcctattgagaccacagcgctctagatcaaataattccagaccaagtttcccgataaaattgacctttttacctgaaacaggtctgttcagtgcagacttgcagtgctcccccccccccccccccctcccttcagcagcgagcgatacacttctgcagtgtgcatattcaaagggaataaagacccttgtgctttatatgctcttttgtaggtttcttgtgttttctgatttctacttgatagggatatatgagttttgcgcctcagttctccagagaaaatgacaccacacccttcctgttgaacaaccatatacatatgttaaatgctgtaaaatcaaatcaatgttgtgaactgccgcagtgcagtaacttatttaggttgcgagtcgtcgtaaacttgtgcagtaggctcattcaaacactgatccttgtgctttataggtttttttaagtgttcttatgttttgtgatatctccttggaagggagatgtaaaacaacaaattgaataatttaacagtcaaaaacatgccttttactcctattctatcttgtgtatgtccttgaaagggatatatgagttttgagtctcaattctctagacaaatgacatcagactgcgttttctgaacaactgtcctttttatcacaagcatacttctaaatatgttaagaaccatagatggttgctctatcaaatcaatattgtgagctgttgcaacacaatacttatttcggttacaagtcgtcatacagttgtgcagtcggcacattcaaaaaccatatcatgtgtattttatttgcttttaagtgcagctcttatgttttttgatatctcctacctgaagaattttataacagtaaaaaacatcagtttactcatattccaatttgctttacccatttgcaggttgcaggcccagagtgctttagccgaggcagctgctgcttctggcgtagccctacccaaaggaccaattgatgtggcaaagcacgtcgtcagggaagccggcatgaagggtttgttcaagggccttgtccctacaatgggccgcgaggttcctggcaatgccgtgatgtttggtgtgtatgaaggcaccaagcagtacctcgccggtggtcaggacacatcaaacctcggcaggggctctctcatcctatccggaggccttgctggggcggtgttctggctctcggtttaccctaccgacgtcgtgaagagcgtgattcaggtggatgactacaagaagccaaggtactcagggtcagtcgacgctttcaagaagattctcgcggccgatggagtgaagggcttgtacaaggggtttggacctgccatggctcgtagtgtcccggccaatgctgcgacattcctggcgtatgagattacaagatcggctctaggctgattgattgctggttccaatggccatttctatctcttatcatggttgaaacaacaaccaggctgtgcagttgagggggggaaaaagcagcagtagcagttccaatcctgttttgcaagtttatttcatctgcaacattgtgattcaaaacattgaagtatggaagatgcaacagcgagcaagatcgctggctctgcattttttgtctgcctgtatgtataataatataagcctaacatgtgtggggtgtgggtgtggagtgagtgtagctgaaagaaactcgtcgtcttgtcggaatggttggcctggagtggattggccatctgacggcgatcccatggtgaggggagtgagtgatgctgtctgtgatggcgattgggggtgcgtttggtgagtgagtgagtgagtggccctggtgttgcttgccctcttggcatccgaatcacctctcctcttcttcttggtctgaatttttttgattccctctcaactagcatctttttaattggctgctattgccacagcccttgtattttagtactgagacctggggctctagttgttttgagccagttgagctgctgcagctttgggtgaggtggaggtaggaggcggcggccgctcccatccttccttcacctccatctatctccaagctcgatcttctgctgaatagtaatttatatttcttcttccttgtataatttcagcttcatgtttatcagttgggtcgatgatgcattggcagaaatctgtgtttcatgttcttcttcagttgttatgtttgactagcaaattggactgcagatcttcagatttgtggggggtggtaattctagcttatcatctgatctgacgtagaatctgaatgcctgtgtggtggtatttctttcgctgaatcctgtaaaaaatgtcggatttttgctgaatgataaacgaaacagatgcaaagattcatgcagtggagtggagaagagaaggaataaggagaagccttgaactgacttgcaatggtgatgaactaactaattgactgcaggagaggagatgggtgacgtggccaaggacctgacggccggcacggtgggcggggcggcgcagctggtcgtggggcaccccttcgacaccatcaaggtgaagctgcagagccagccgacgccgccgccggggcagccgcccaagttcgccggcgccatggacgccgtcaagcagacgctggcggccgaggggccgaggggcctgtacaaggggatgggggcgccgctcgccaccgtcgccgccttcaacgccctcctcttcaccgtcaggggccagatggaggccgtgctgcgctccgagcccggcgcgccgctcaccgtcagccagcaggtcgttgccggcgccggcgccggagtcgccgtctcgttcctggcctgtcccactgagctcatcaagtgcaggttcgttttcttctctcctgaggaatctgtctacaagaaagaaatggtgcctgactgactaactgcaaacgtgctgcctaattaaccatcccaaattgaattagcctagcgtttccgcaattgttatgtgctagtatatatatcaatgtgaaatgacaataaagtttctcatcagtcaataatattcagttttctttcagcaaacgaaacaaagagaagatattgttgagtgcatatttgttttctgaaaaattggagtgttgacttcataaaacagagtgtaatatctttaagcagagagcggaataagcatcttctttttaccatgtctactcccgtctccatgcaatgtttgcaacaggaatgctgcattcgttcatcgatgatagtctgattatctgatagaccaaaccccttaatgcttcctactagttcctagtagtgatcattactcaatatttgttctcactttttttaaaaaaaaaaatccatcattactcaatatttgaacaaacaattgcgtcagtacattactgtacacttacagattgagctccataatctgctgttactgcattatagagtagtaccatgtatcgaatctgcatcttgtgctgccattctcaatgtacacctcttgctcttggcatcacaatgcactaaaagtgcagaaacatacgagttacgggtgaatccaatcatcttgtactgacacttagctggttggtttgttgtggtgtcaggttgcaagcccagagcgcgttggcgtccgctgctcctgccgccgccgccgctgccgcctctcccgtcggcggaggcgcggccacggcgacggcgagcgtggcggcggtgaagtacggcgggccggtggacgtggcgaagcaggtgctgaggtcggagggcggcgtgggggggctgttcaaggggctggggccgacgctggcgcgggaggtgccggggaacgcgctcatgttcggcgtgtacgaggcgatcaagcagtacctcgccggcgggcaggacacgtcgtcgctggggcgggggtcgctggtggtggccgggggcctcgccggcgcctccttctgggggtcggtgtacccgacggacgtggtgaagagcgtcatccaggtggacgactacaagaaccccaagtactccggctccatggacgccttcaggaagatcctcgccgccgacggcgtcaagggcctctacaagggcttcggcccggccatggcgcgcagtgtccccgccaacgccgcctgcttcttggcctacgaggtcactcgctctgcactaggctgaactcatgtatcattacatcctcctccttcttgacccttaattttcttcttctgattctgattctgattcttgctgtcatccatctcatctgtggatgtaagaacagtgtaattctgtacacacaaatactatctttataaaaatttcctagatcacacaaactctctggtttagtggacttgttccgttggtgaattgttgatggtgagctaagcatggtaattctgtgatgctgttcggatgaatcgaaagggaaaaggggtctgcggagccgcatgcacatatatactccctctatgtatatccagattacagtattaggttgttttcttttgaacggagggagtacataccagcggattatataaactaggcagtgccgtagtaattaaccatcgccatcgccatcgagctcgtatatatcgtcgtcactctagtacctgtattacgtactccctccatactcataaagaaagtcatttagaacaatgtttaagtcaaaccttaagaatataaatcatgaataactcttaaattgttgagtttgaaaatgtaaagattatatgagtagatttgttttgaaaaataatttcataaaagtatacatgattacatgtatcacttttcaataaatatttttatagaaacaagaagtcaaagttgtgtagttgtttaaaataactttctttacgaggaagaagggagtacgatcgatgaatggaagctaaagctcaaacaacaatttatcgtcccatgaaagactgactctctctcttttgtggactttcttttgcgttggtacttggtaaggatgccgctcacgcatgcagggccataaattgtttggagatgactaaaaaccgtggttggctagttaattcaactcttgttgatgcagttctcacgaatccaaacggaaagggacgcttaacggcttaagttgacatctcatcagaggcaggcagctggctctgctttcgtcaggtaccacttaaaagataatatatattttcatttaattaatctagcaagacaggatggggtggtggcgcagttggctagcgcgtaggtctcatagctaaagcgagtgatcctgaggtcgagagttcgagcctctctcaccccaactttttttccgcttatttttttttgcaactccttaatccttctgtgacacaaattacatttttattttccttttctccaacttcttaatccttttatgataaaaattaattccacttaatttggaaatccttctgtgacacaaattacatttttgttttccttttctgcaacttcttaatccttttctgataaaaaaatattggccagtttgagattggtattagaccattcccaatagccatgatccgaaactgaaccagaacttccaggttaatagggaagaagtttgatcggaataaatataaattcttttcttatttctattttatgattgaccaatataaacatcaacaacttcaaattggactcgtttcccctcaacaaataaaggcttgggctaacaaaacactacctaatggagaagtcgttggcgaagtcacaaggcactccacttttcattataaaaccgataaaccagaaaaagatggattattttgcgaaagaatctttggacccataaaaagcagaatttgtgcttgtggaaattctcgagcgagcggagctgaaaacgaagacgaaagattttaccaaaaatgcggagtagaatttgttgattctcggatacaaagatatcaaatgggatacatcaaactcgcatgtcccgtgactcatgtgtggtatttaaaaggtcttcctagttatatcgcgaatcttttagataaaccccttaagaaattggaggggctagtatatggcgatttctcttttgctaggcccagtgctaaaaaaccaactttcttacgattacaaggtttattcgaggatgaaatttcatcctgtaaccatagcatttccccctttttttctaccccaggctttacaacatttcgaattcgggaaattgcgacaggagcaggtgctattagagaacaattagcagatttggatttgcgaattattttagagaattcctcggtcgaatggaaggaattagaagacgaggggtatagtggagatgaatgggaagatagaaaaagacgaataagaaaagttttttttgattagacgcatgcaattggcgaaacattttattcaaacaaatgtagaaccagaatggatggttttgtgcttattaccagttcttcctcccgaattaagagcggaacgaaaaggattttccctgagatggtaaatgaaaacgattagccccatacgaggtttgggaataagtgatgagcaaggaatatacgtctttctgctaaagaggatctattaaactcataattcattagatctttgttatcaatgtcaactaggtatcataagtaaacggatcccggttgttcaatcctttgataaccaaggtcattctttgctaaagagaaatgatcactatgagtcagactcaatagaattggatccattccaaatagcgagaattaggattctggatccctctcaatctctctttcaattcgaggatccagagaggtgttttcatagtcatctccgaatatttgccatctccgaatattttcgatttcatttttctatgatatgtctttctatatgaaaattggttatttacgatgtacgatgatccctgttaagcatccatggctaaatggttaaagcgcccaactcataattggtaaatttgcgggttcaattcctgctggatgcacgtgaaccggaacgttccataagtctattggaactggctctctatccatggaatctcatccatcatccatacataacgaattggtatggtatattcataccataacataagaacaataagaactcgaattcttatcgatactggaactcagagcataggagagaaagtcgatttatggatggaatcaaatacgcagtatttacagaaaaaagtcttcgtttattgggaaagaatcaatatacttttaatgtcgaatcgggattcactaagactgaaataaagcattgggtcgaactcttctttggtgttaaggtagtagctgtgaatagccatcgactgcccggaaagggtagaagaatgggccctattctaggacatacaatgcattacagacgtatgatcattacccttcaaccgggttattctattccacttctagatagagaaaaaaactaaaggagaatacttaataatacggcgaaacatttatacaaaacacctatcccgagcacacgcaagggaaccatagataggcaagtgaaatccaatccacgaaataatttgatccatggacggcaccgttgtggtaaaggtcgtaattccagaggaatcattaccgcaaggcatagagggggaggtcataagcgcctataccgtaaaatcgattttcgacggaatcaaaaagacatatctggtagaatcgtaaccatagaatacgaccctaatcgaaatgcgtacatttgtctcatacactatggggatggtgagaagggatatattttacatcccagaggggctataattggagatactattgtttctggtacaaaagttcctatatcaatgggaaatgccctacctttgagtgcggtttgaactattgatttacgtaattggaagtaaccaattaggtttacgacgaaacctagaaatcgatcactgattcaatttgactacctctacaggatagacctcaacagaaaactgttgagtaacggcagcaagtgattgagttcaggagttcctcatagaaaattattgactctagagatatggtaatatggagaagacaaaattgtttgaagcacgcacagaaccggaagcgccccttgtttcaaagagaggaggacgggttattcacatttaatttgatggtcagaggcgaattgaaagctaagcagtggtaattaagacccccgggggaaaatagggatgtctcctacgttacccataatatgtagaagtatcgacgtaatttcatagagtcattcgatctgaatgctacatgaagaacataagccagatgacggaacgcggagacctagaatgtagaagatcataacatgagcgattcggcatatttggattactttcctatatatccactcatgtggtacttcatcatacgattcatataagatccatctgtctagagatcgtcatattcatctagaaagccgtatgctttggaagaagcttgtacagtttgggaaggggttttttgagagaaaagaagaatctacttcaaccgatatgcccttaggcacggccatacataacatagaaatcacacgtggaagttcgagcctctctcaccccaactttttttccgcttaatttttttgcaactccttaatccttctgtgacacaaattacatttttattttccttttctccaacttcttaatccttttatgataaaaattaattccacttaatttggaaatccttctgtgacacaaattacatttttgttttccttttctgcaacttcttaatccttttctgataaaaaatattggccagtttgagattggtattgaactgctccgatttgagaattaagtttggtatcgagctgttccctgcgaaatcaccgtggcaggagtgttagggccctatcaatgatatatgcatgcatgcatgtaacctgaatatgctgggataactgaagccatgcatgagttgtcaaaggtcgaaccggttgtctattcagtgcgatcgatcgtttgttggccattggcttagaaaggagtttcagctacacatttttgcacttcatcatcttgcaacttgcaatcatccactcaaaaaaaaacgtacataagcatagttccccaccaatgtttgcatccccaataatcattatgcctttctcccactactacttccactcctacttcagaactaacctctgaataatctgaacatccgacctagtactcaactactgagagattgcacgtgcgtcggatactcagagattgctttgcttgcattgtaatctctttccttgatgcaaattgtttttgttaggccctctttatttatgcttaggtttattggcttaaacttttaagtcagtttattggtttatatgatttataagccggtggatttaatgtcctaagtttagtggtgaagtcatacatctacctcatataagccaaaaaaaaaaacttctccaacctagcttttggcttaatagtgtttgagtgtcttatggcttcaaaaaaagccaaacgaataagttgcttgtttgtttatgcttagattttttagcttataagttagcttataagcctaaacaaagagggccttaaaacagaggtggaactttgttctatttttatatttagaataagagaattaacctaatttataagaaaaatcaggcaaccatttgatgcaaattgttgatggtctcacaacatgtaatggccaatgggacatggggcttaatttgaaacataattgttgttacatattatctgcttgattatacagacaaaataaatatttttatagattataaataaacttaacaagtagtaacttatagcaagctatagtagaagatttttgttttcgagaaagaaaacaatcggttccaataattaaggctaagatgagtgagctagctcatctggctgtcactggctgagctgaaactgaggcccaggagagcagggagtcttttctggctttgatagacagtgccatgtgagggtgcaaccgcctcctatcctactcccctttaatacccttcccttatcttctctaccaccacagccgcggacacgactcttctgcgatagccgcatactccatccgtcaaaaaaaaaataatctagacaaagatttaacctcacttaggacaataaatctggacaaccttatatccagattcattgtcttaaatagtgtcacaccacctaggttgtctttttttagatggagggagtatgtagtaagagtcactgacatatgaaccctagaacgagggaggctcacatattagtctgcactactgcagttgcctaatataaatcaccatgcctaaatgttaacaaaaaacatacttcttttgtaaatcaccatacctaatgctgctttcattgactaatgaaactgccatgagttttgatcagcttgctagctgcaatgctgcattgttcattcggagtgcacatccttttttggaatctcagacaagaagttggcatcaatcgaatcgctgtgaaaagaaatgtactgttcgccattggctttgactgtagctgcggtcgcaacgcaatgttatgcgctgacgtggatgaaagcacaaggaatctggtgagagaggcgatgtatcgattcgattatgaaaggaaataagacgaatggagatgcagagattagtcttttcagtgatgccatatcgctaatgaagaagcaatgggattggttcaaaggggatccccactaatggcaagtggagcacctaaatatactttgctgctcctaagcactctctgctttccaaccaagaaatttgcctctcgaatcttttgatttttcatatgtagtaagtatcttgaactgatttgtgcgcatttttccccctccatttctctctctttctcttggaaaagtagaacaacaaacaaggaccaacttgcaagctttttctccttcattgtctgaatctttaagcatatattaacctatcgatcgatggcattacattatactactacatgatatggcttctggaaggaacacataaaaggcagaacaaatctattattaactaca

SEQ ID NO: 7078 - DNA, 51658 bp, Oryza sativa
  unsure (1)..(51658): unsure at all n locations
ttaagttgaatgaacagatttgctaaatctcaaccatgaaagtaacatttatatatggtcgtcgatcatggaacgtttgatggtttctcgttgacaacaatttttttagagaagggtattttttacccgacctctatatccaaccgaatatatacggctattaaaatagggaacttaaccccgcaaacaacccaatctgaaattcgctccataggagatttgaactcaggaccttggggtactacatataggcatataacgtttttccgagttgaaccaatgtgccctacatccatataccggcacgaggtatatctttccgtaagaaccatagagcaaaaatgaattattgtattagagacattacatccatgcatacagagcaaactcatctatctattatatactaaaagtccatgaaacttcctataaatacttataagccaccatgtatcgctcctataatcactcctaaaccaccaagtgacactacgaaatgatttttctttaaattggtgggtttaatattatcagccattagatctaataaaaaacaaaattcccctctccacatataccgatctcccctctccggttggtacgtatgtacgtatacgtacgtaggtaactcctcccctcatctcttttttcctttcctaatctccaatctctaatttaagccacatatcttattttttattgttattttaattttgacaaaataagtaatttaatatctatgttgttctatgcgccatatgctttatatggcaactagataaaacaaggaaatatttttaactataaaaaagttaacagcatatattattttactttaagtaattctacaaacaggtgtctctaaattatatccactatatccaatctatctataaaagtccatcaaatttccaataaacataactaaataccatgtgacgcacatataaatgctcctataacgccacgtgacgttctaataaattagataaaaaaaacaaattttcactaaaacagctagctctaataaatttctgtttaatcgttctctcattataactaaattaacaatataagattcatatgcctatattttgctatataattatagcatttgggcacagttcacctgtgcactttgcagccatctaaatactttaaagtcttacaacaaatattatatcactatgaatcattctacattctataaacatgcatagctaaattaaatctatagtatcgaaatagaaataaaaaacatattcaatttgacaatagaaaaagaaattgttgtcgaaacgacaaccgcatacgtcgaaagacgtggttactcaacagtggttggaaaaatgaagtgtattaaattttgaatttcacttggggatcccccgcgtttttactaccagggtttaggttgtacaggggaatttacatgattacccttatgaaagggacatttacaggggtacataatgtcatagggctcatgggcccctgatgggccgtctggcgatcgtcggcctgatgggccggaggggcttcctcagccctcgcgggagcgaacttgtcaaggcgaagtcatcctcctttggcagacagtcttcgccttgcacccttcgcctgagacgcctctggcctggcgctactcttcgccttgcgccgttcttgctccatagccttcgccatgggtttcagtaggttgggtcgaagggcctcatgccacccgccaacaagcccctcacgggcaagggtgagattggagcttcggccgagactgtgcaaactatgtggtatggtatgcggcgccccctttcgaccgatgctcctgccgaaacctacattattcctgcaaatgaagtttgttatttgtgcggctggtattatcttgccgcgcttcgcctcgtgggattgatagttatatatattcttttttcctgggccgaacggaacagtattgggccttcctatcttgggctttttactgtgccgctcggtcgatggaatttaccgtttcgcctacccttgcgatacgtgacactttattactggtaggtaggcgaacggtcgcctgggcgggctatatattcccgttgctctttccttttcaccgccacacttgccattttaccgtgtgcgctttctttctccgtctcttcctttcacagcatctttcgacccctcaggcgtttcgccgaatcacttttttcgccaccgcaaacggaccgttcgccatggccctccgtaagccaaacccctcttcggcgaaagggccagatcccggccgagtcgacgacgacagcaccgcctttctggggatttctcttgtgcacgacgtcgagctggagaagctggtcagctccggagcgttggtcgaggggcaggctttcgccccagggaaaaccgtggtgccgaaacttgtcgacaatcggacggtggtgttcgccgtattttttgaggcagggctacggtttccctgcaacgtgttattgccggagatccttcgcctcttccaggtggaacttccgcagctgagcccgtcggcgcttgttcggatcgctatcttcgactgggcgtgccggacttccgggtttgagcccaacgccgagctctttggcgccatatttttcaccaccgtgaactcgaagacggtgatcaccccggctggaacgaaaaaaaccgtgttcgggagcgtgaacttcaacgtttgccccgagcggtctgatctctggccggtgaacgctgctatgtcgaagtgggtccgccattggatggcgaggtggttctaccacaccatccccttcgaggctggttctgaatcagcgaaagctctccagtgccggcgtagggcaattgcgccgaaccggagacccaagatcgctgtggacgacgccatggaggcgcggttcgttctactgcggaaggtttgctcccgccttagctgctgtgacttggtggaggaattttgcatgcttcacatttttcccctctcccagtcatggcaagtcacggttgaacaaggcgaagaagtcgacggtttgccgaacctgatactccctgagggggcgaacaataagactgttcttatgttatataatgttgtgctttgttatttcgccttatttgacttttgacgtagcttcacgctctacttttacagtgttgaccctcgaccaggccgaagccgaagcccgcaggatgatcggcgatgtttcggtcgtcgagtatagtcagctgttaacgcgtcaagcggctgggcgggcgaaccgggtttacaatggcgaactgcctccccgggcgaatccccaaaaggccgacgacgaggcagggccttcgcgaaagcggatgtgtggacaagtgaagcttgcccccaagaagcgaagggttcctgcttcgtctgactctgacgccgacgacgaggatgatgccgaagaacgtgacggcgaggaggaaggagaggaagaggaggaggtggaggctgtggctgataaggccatgggtgaggtggtcgaagaccgcgccgacacccctgggtacactcctaccccaagtcctggtcacaacgaaaccagggtggagtcgaacagctccccccttcgtcggaaggatttggaaggggcgaaggccttagttgcgttctcttcgggagtggcggcgaagggaggccctgtcaaaaaggtggctaaaaagaaagggctcgttgatgtcgctcgcgtttttagcgacgacgagtcctccgacgggactccgacttcgcccgctggtcgcagccaggatctttcggccgcccccattcctccacttggcgccgctggagtggacggtagtaccgccgttggggcttcggcttctgcggaaagaattgcgatggccgcggcgaaagtattcggcagtcctccgcatcagccggtagcctcgccgctgatggaggcgaagggaaagggagcggtcgctgaaacgtccgcttcggaatattcgctctcggtaccccgcttcgcccctggcgacttcgcgacgcgagcggacctccttccttttgtggagggggtaagcaatcttgtactgcccgccagcgccccgagcttgttcaccgaactgaatgagttcgacgaggggtgctctgctataaaaagcctggctgttcgggtacgttttccccctctttttatctttactcttcctcgatcttgtttctacaattgacacttgttctcttcgccgctcgtattctgcgcccagatcctcgcggctcagtgctcaacagagcaaaccgtgcgagctcgacttgatgggttcaaaagccgtcttcgggccaaggatgacgaactaggccgcaagaatttggagatggaggcccttgccaacacccttaaggaggcgaaggccgaaaacaagcggattcaatcggaactagagaaaggaaaggaagctagggccgaagtcgattgcttaaaggccgaactggagaaagagaaggcccacaccgccgtgctcatagatgtggcgaaccattgtatattcggcaaactgccgctaaacctttaagaaggcttttttgcatacttggactgtatgataattttaaccactttttaacgatcaaagtctttggcatattattattttgctcattttgcattatgccataccttccccttctttcgcctattcttaccatgcaagatgtgttttgccttttctgcactgtctaccagggggtctgccgaaaatcatgcattcggcccccttctgggagctggcgaagtcaaaacgagaaatttgtggcattgaaggatttgccgaaggtacgatgtccatttcggcctgtttatcgcgaaatggaaataaacggtcgcagctataaagttttcaaggttgccaactggctgcgggcgcaccccgggcgaaccttagaagattacgatcttgttcattcaagacgtttggaggatatggctcgcttttggcgaaaccatcagaagactaaacgccaggaatcgatctttcagcattgttacagtttagtctgtgtttcaccccctactcctcttaaggttgtgtatgatattagtagtgatgacgaacctagttcgtccgaccattccttagggagggataatgattactggagcgaaaatgtaacttacttgtaaaatgaattgtatcaggttgtaaaccttgtactcttcgattattttttcgaagctaataaagaacgtgttttatttccttttcgctatttttcacatcatcacactttctgcttttgttaggtcggaacatgccggcccctttgcatatagtagcgaaataggtgtagtgacttttcagcttttcgtcgttcgttttcgatctgtagcgttctgtgtcgagagaaacgcttttgcgtttatgctgatcagtcgtaacgtcgttcggctatttattttccgagacaagctgttatggtttcaacgttcggcgagcaatgcttcggccgattcgtttcgccccctagcctttttcgctgatcaggcgtttgccttggggtttttccacaaattatcaatcacacgaaaagaaataaaaagaaataaaaagaaggcggaggagacagagatttttatactggttcgggcctccatggtggataatagccctacatccagtttttttttctcttctcttttttcctttttttttcttgccgaaaggcttacatagtgccgaaaggcttacatgacaatatgtacatttttacaagttggcgatttgggtgccacccattctagacatagaagcgcttgagggaggcggcgttccaggaatggtcgaactccacgccttcgagtgtcgctaggcgaaaagatcctgtcctggacttgtgtttgatgatgtatggtccttcccactttgattcaagcttgccaaccgctactaggttcgcctttttccttaggacgagatgaccaggcatcaactccgtgggtcggactttttgttgtaagttgccgaagtgcttgtggcgtacttgtgcatgtgctcgagcgcttcgacccttacaccttccaagagttcgagtgatacctcgcgcccctcttcgcccccggagaacataacccttggtgagttagcccctagctccgctggggtcattgcctcttcgccataaagaagcataaatgggctaaacttggttggtcttgtgggggtcgtccgaagggcccaaagaaccgataacaattcttctagccatttgcctttcgccgccccctcaagtcttttctttagtgcttctaggatcttgccatttgtacgttcggccgccctatttgactgtgggtgcgcgaccgacgcgaacctgatttctaggttaagcccttcgcacatttctctgaacttatcagagtcaaactgcttgccgttgtcagtaatgaactcttttggcaccccgaaacgacaaacaatgtttttccatgcaaactttggtactgctgccgaagtgattgccccaaggggttcagcttcgatccatcgagagaaatattccacagctacaattgcgaatttatactcgtttcgcgccaccgggaatggcccaataatgtccagtccccatctggcgaagggccatattggtgcaatgggctgcagatcatactggggcgcggcttggcttcggccatggcgctggcaactttcgcacttcttgatttgctcaacacagactttcaacacagtgggccaataaactccttgtctaaatactttggaggccactgttcttgcagcctggtgcgcgccacatagcccctggtgtatttcctttgccatttcttcgccttcggcaaaagagatgcaacgaagtaagggttgaagtaccccggagcggtaaagctgacccgagaccatcttatacttcgtggctctgagttgcaaacgcttcgcttctgcttcgtctaccggaagccagccagtttcaaggtgtttcacaaatggggttcgccagtcatatgggtcttcacccagtttctcttggtcgattgtcatgacttccgagctgtccatgggcacacttggagcatgtaggacttcgaaaaagatgccaggcgaatgcgggccaccacaagcagcggatttcgccaaggcgtctgcttcctcgttttggtctctaggcaagtgttcgaccgttatgccggtgaagcatttttccatggaccgaacagcctccagataccccttcattccctcttcttttgcctcgaaggatttgtcaacatggcctgctaccaacttggagtcagttcgaattagcaggcgccggactcccagtgctttcgcctttcttaggctcaggagaacggcttcgtattctgctgcattgttggttgtgtcgaactgcaatctcgctgcgtaccgaatcggcacaccattcggtgaaaagaggactgtcgcaacgcctgccccattgtgcgaccacgaaccgtcagagcacatcacccagaactggtcgtcgggctcggggtcgggggcaagtaccggtgtccattcagctacgaagtcagctagcacttgagacttgatagcagagcgtgcaacaaaatgcaagtcgaacggggatagctctgccgcccacttgctgagccggccagtgacttccttgcctcagagtatttcgcccaaggggtactgtgatgggactatgactttgtgggcctggaagtagtgcttgtgcttgcgcgaagccattactagagcgtaagcaagcttttccatttcaatgtaccttgtcttcactccttgcagtgtttcggagacgaagtagaccggtttctgtccggactctttcttgaacgagtgcagcactgactgccactggcgaagctgccaagtataatagcagttcgcttcctgggggtgggcttatcagagctggtgggctttgcaagtattactttagctcgtcgaatgctgcttggcactctggtgtccaattaaactttcccgcgccctagagggtcttgaagaagggcaaacctctttcggccgcctttgagaggaatcgactgagtgccgcaattcggcctgcaagcttttgtacttcatgtacgcttgacggaggcttcatttgttggatggcatcgattttctcgggattcgcctcgatgcctctttcggaaacaaggaatcccaacaacttgcctgcgcggacgccgaaaacacacttctccggattcagctttatgcctgccgcgcgcaagctgtcgaacttctcctgcaggtcgatcgcatggtcgaaagccttgcggctttttacgacgatgtcgtcgacgtaagcttccacattctgccccaactgcttgccaaggaccttgtacaccggcctggcgaaagttgctcctgcattccttaagccgaaaggcatcctgaggtgacaaaatgtgccgaatggagtgatgaaggacgttttggggatgtcgagcgggttcatgtggatctggtggtaaccggaatatgcatccaggaaactcatgagctcacatctagctgttgaatccacgagctggtcgattcgcggcaaggggaaatcgtcttttggacacgccttgttcagatctgtgaaatcgacacacatgcgccatttgccatttgacttccgcaccagcactggattcgccaaccactccggatggtcgatctcttggataacccccgcccggagtaatttttgtacttcggccttcgccgcttcttggcgatcggcagacatcttgctcaacttttgttttcttggcttaatattcagcttgactgctaggtgatgcatgataagatccgccgggacgccccccacttcatcagggctccaggcgaagatatcgatattctttttgagcacctctagtatgctctcaacttcttcttcgcccatgtcgcccccagtgatacgagctttgtggggtcggcatcatcaatctgcacttttgttaccttgccgtgaggggtgggcttcggcgtgtgcttcggccgctcatgcggttcggtctcaacattgtgcactgctctgttgattatggctagatcgcgttttgaagcggacgaaggctgaagccccttgactactatcacccctcttgggccaggcatcttgagcttgagataattgtggtaggaaatggcttcgaacttgttcagggttgcacggccgaagatggcgttgtagttgtatgggatgttgacgacgtcgaacagtatttgctcttcgcgcctgttttctcccgagccgaaagctatcagcaaaagtgcttggccaagaacttgcactgcctctccgccgaacccccggagcgacgttggtgccggtgtaagagcttgggttggcaagcccatcttagcatatgcttcggcgaagatcacgtcggccgaactccctccatcgaccaggattcgtcgaacttcaaaaccggctatctcagctgagatcaccagtggatcttgatgcgggaacaggactccttcgacgtcttctggcctgaaagagatcagctggttcatgtactgtggagccccctcacccgctgaagtgatgctgtggaccatgcggatctgcatctttctctgccgtttcgacaactggcttggtgggtcggctcttgtaatcacttggattacccttcgttgtgtatcctggcgttgttcggctgggggtgtttgctcctgaactgcttcacggggtgcttcgaaagttgccccctgctgcggccttgggtcttgcgcgttgccacgttgcctaatgtttcggcattgctccgtggtgtgcgaagagcgtccgtgaaaggcgcagtagaggtcttttcggaccttcttgcgggctggctgctgatagttgcttgcttgctgggcatcgaactccttgcggagggcttgcacttcttcgacagccatcacagccttgcccgctcgatctgttctgaactttctccaagtcatgggggcttggccttgccttggcggctatccctggatcgccggctgagactggcgaacagagaggggaggtggttcggtaatttgagcttgcacttgagcttgagcagtggcgacggaggctttatcgtactcagcttgtatagcttgtcgtcgcctagaatcctcctcgccccttgcgaacccgtcaataatgcgaagtaggtgctcgagcgtctgcggctccttgttagtgatttttcttgttagttcgccctcaagcagaccagccgatgcggcgtttatgaccgacgcctcggttatgtcttgaacttggcaccgggcttgcgagaagcgacgcatgtactcccttatcgactcccccggcctttggcgaatgccgagtaggtgttgttgcgtcttcggctcctcgtaggtgcctcgaaagttaaggacaaaaacatcgcgcaaatgctcccatgagtaaatgctattggctggtaaattgaaataccaagaacgggcgatgccgtctagagcgagatgtattaccttcgccttggtattttcgtcaccatgagccgcttcgatcgctgactcgtagatggagaggaactccttcgggtcagtttcgcctgactagcgcgggatgggtgggaacttgaactggggtggaattggacgagtcttgattcccccactcagcggtagccccttttcgcctcccgccctgtttacccaccttgctgcgggtacggtgtggcgaagggcgaaatcgcagcttgtacgtgaggttgggccatggcgttcggctgcccggctccaactggaggcacttgctgagccgctatggatgggtcaaaaattggctgcgaccacgtcatggcagcttggattggtacttggtttgttccgaagcctggggtcggagcttgctgccgaacggttggcgcctaagcaacgttggcacagtcgaactgcggtccctgattctacggcgaagctcccgagcctgactgaatcggtggcaaccaagtaggcgcaccttaacttgtattccccaccgggtgagccgatggggttgtacttgaaatgtagtagggttggttgagttgctgaaggaaagcttggtgttgcgtctgcagagctgaagccccttccgccactgtttgtggcacttggccaggtgattgatgctgcccggtgaagtacaccggcacctgtgcggcttgtggcggaaagggctgggtcgtcacttgcggatggacttgaggttggacatagcctgccgaatactgaaggattggagccgacgtggccttgacccgccttgccgcctcgtatgcttgttgttgttcttgcatttggcgaagcatgtcttggagccgtgtcatgttgtgccgcatagcctccatgtcggcttcggcttgtgcttcgaggtcaaggctggtttgggcctgtacaacggcgagcgcggttgtggtcgctgccggctgtgatggagcagcttggggcaccaccggttggcttgtcgaaaggatctccgccatggtctggagtgcccttgccgccgcagccgccttcgccacgtcggcctcgttcggctcttgcaccgaagttgcaggggccgaaggcggttgtgatggcgcttgtgctcctccagcttcggctacgggcgccgaaggctctgctccttcctcggcggccatgtctggtccggcatcgctctccgttcgcctggcaaccttctccttcatgaccctcttcggtggcattcgctctaagtggttttgctcggagtccccacggtcggctccaactgttgtcgaaacgacaaccgcatatgtcgaaagacgtggttactcaacagtggttggaaaaatgaagtgtattaaattttgaatttcacttggggatcccccgcttatatggccctaggggactatttatagccccattacaggttcttactaccagggtttaggttgtacaggggaatttacatgattacccttatgaaagggacatttacaggggtacataatgtcataggggctcatgggcccccgatgggccgtctggcgatcgtcggcctgatgggccggaggggcttcctcagccctcgcgggagcgaacttgtcaaggcgaagtcatcctccttcggcagacagtcttcgccttgcacccttcgcctgagacgcctctggcctggcgctactcttcgccttacgccgttcttgctccatagcctacgccatgggtttcggcaggttgggtcgaagggcctcatgccatccgccaacagaaataattcaacaatacaagtcacaccatgatctattttgaaacatgtatagctaaactcacactatataagcaagaataactagctgaaatatagataatctgagccactgcataagcaattgagtgcctttaactaaagaaaatattatgtttttttctaaatgtgctcaaataatccaaacaatctaaatgatcttctataagttttgattaatattctgcctttataagtttctcaaacacagtctacgattcatgcccacgcgaacgcgtgggctacctttcttgtttagtataaatactgcctaattgcaagcgttaatcatcacctctgcatacagtcagatagctagccaagctgagcaggactaagatcactcgtgaattcggagataccatgggaagtgtaccgaaaaaaggagctgcctttgctctgccggtggccattgcgaccatcgtggtggggaccaccaggaagatggccgcggacantacacaagatcctcacattttttacggcatatctgtgatgggctttagcattggtcagtgataagggtcacctttgacgggttctacgggacgcggtcattggtaaggcatctttttccaaccggtccaaggtactaattacctgtgacggttccatagtagaaaccgtcaaaggtgaggtaaatctcacctctgacggcttccacatccggcccgtcttacctgtgcgggttgcatccttataaatcgtcaaaggtgaggttaactcacctcaaacggacccatcactggagcccgtcacaggtggggaggggggctgactagactagtagatggagatatgtactcccttatccactctctctcttatccactgaaacaaaaggacctctctctctctcccttatccaaactcacagaaacaagaggggaggctcttgcggcggcggcggaggacccgacggcccccgggagaggcagcggcgtggcgacgacggcggcgccgcggcggtggttcggcggcgttgggcgacggctcagcggcgcgtggcagcggcggtggtgcggaggcgcagcgtcgaggtggtgcggcggcggcgctgggcggcagcggtggtgcggaggcaaagcggcgaggtggtgcggcggcgctaggcggcgagcggcgtcggcggtacccacatcctcctcccccttctttctcccctcctcctccttctcttatttccgatctggtgcgtggctcagcggtgcgtggcggcggcgaggaggtgagcggcggcgccgcggcctcaatccccgaccgccgacctccaggagctcggggtcactggcgccaagctcgagcgacgacgacgatgaccaccgacgacaaccgctgagtctgcctccaggacgcggatctggcctctaggacacggatctggccgccgacgcctcccccacctcccggccgccagcgcctccaccctttcttccccgccgatgtggtcgatatggatgcgcacctccggccgacgagtaccgcctccaaccgtctggcctcgcctgccgcgagctttgcttccccttcgctccggccggatgcgcctcccaccaaagggtgtcgccgcctccacctcccgaccgtcgatcgccatgactgccatccctcgctcgccgatcgccagatctgtcaccggtgtgcccctctcgccccctatccttttgcattgatatgatattgttgtctctgcattgagaaattcttgccatcccctttgtgtgaatacttctatatgagatctatcggtttgaatttttttgtgtgataatgaatgtgagcaaagcagctgtgagcctgtgacaacgagcaccaccacagcagcgtgcaccattgttttttgtttgtttttcacaccagtgacgggttgcacgctatttcttttttttttgttgggttaaagacatcagtgacgggtcacaaaataacaggtcgtttgagataatagtacctgtgacaggtttgatatgtggttcgtcgcaggtagccttcaccactgacgggccttcacccgtcaaaggtgatgagagtaatcagtgaccactaatctctgaccagagctatatccgtcagaggtgacagtttgggcccgtcactaatagccttacccagcgtagtgcgacctgtcggacgccgagaaggcacagttcgtcaagctccacaacgacgcccgggccgcggtcggcgtcaaggcgcaggtgtcgtggagcgaggcggtggcggcgaaggcccgggagcacgccagcacatgccgcacggaccacatacaggggccatacggtgagaacctgtggtgggggtggagcagcgccgccggctgggtcgggaagccagcggacgcgatggggagctgggtgggcgagaagccgtactacgatcgcagcagcaacagctgcgtcggcgggaaggtgtgcggccactacacgcaggtggtgtggagccgcaccacccagatcggctgcgcgcgcgtcaccggctgcaacatcaacggtcgcagcagcacgctgatcgcctgcaactacaacccgcgtggcaacattaacgggaagcgcccctactagctacgttaagccgatcgagtctcctctgatgaactagctgctctctctaacgtgggctactaatatatgggttcggtatagttatgaacctacatattattagttagagagcgtagtatgttagaggatccgtttccatacgtatgaatgctcgtaagatacatatatattacgtacaaatatatatacatgctgaataagagagtccatagtcattattgtatctatcaatatggtttttaccataaataaaaggaaaaagtacgaattacgagtctgaactatcgcggtcgaccgaattacccccctaaacccgaaaaccagacattttacatcctgaactttgaatactggacgaatttccccccttgacccaatccagagcggttttgtcctacgtggcgtacgcgtggcaatccagtcagtattttctttaaaaaaaattagtgggacccacctgtcatatctcctccccacctcttcccaatatctaccggggacatgcacaagagcagcagctgggtcaacggctccggcacggcgtccgccagcggccgccctatctgcggtggcctcctgtcgtatctctatcgctagagtgtcaacgtcgatgcactggcctgggagatctgcttagctccagtgcaggtctaaagattgatgagatgcggacgtgccagttagtttaatcttgcaactgacaaaatatgtaaacagtagataaaacaaccgattggctgacaagccaatggagtaattctagccaatagctgatattagccgatgccgataacaaccgatgtcgatagggtttttagcaatccgctatatgtccaatgtagataataatataaagacaatcggctgatgataataaaatataacaataatatagtccaatagaaaccaatcagctaaaaataatatgataggataagtactgatccgatagttaaagcatatatcggctagagattcgatgtcattaaaatcctcaagattagataaacagtaaaacctttgttgcaatcggctaaatccaacttgtatgtaatgcttgtaagccgatgcaacgtccagataacttatcggctagcacctcgataaaacactagcatgaacctatcgacttaacaagatttatcaataacaatctagtaggtcggacctaaccgatgcagcacgagattatatatgataatctaatactcgatgagccgatagatttgtctaatgtgatagatataacaaatctatttataacaacattgtgattgtagagatatatcggctaagacagaagatcggacctaaccaagatagttcctactaaaccgatgtatctctaaacataatgcaattagatatagaattgagatatcaggtaggcaaatatatcaaccaaaccagaccgttctaagagatcgaaagcaatgcagtcttgaataacaccaatgtagccgatagattcaccagggccgaaagaaggtaggacttacccatttgccggagatcgaactgaaccaatgtagccccgcgtcaggtgccaaattccggcggttgataagtaaaaacctcagaaaaaagggtggcgatgcgccgagagtagttgtattgatcgaaagatagtttgtaatgaccccgggtgtacatatttatacccatgggtagatgcttatccttgtaggacaagaaagaaactttccaaaagataaaacgaaaacataaagtccttatatgacactaaacatacttttctaaagataaaagaaaactaacaaaatattcctaattaatagataacttgccatgccgcatcctccttgaactcatgtacttctggataagcttcctttaatatattgatttccttaaccgattatagcaggaatccgactattggcgatatgataattatgttagaggcttaccaaatttcactattaacatctagctagatgacaaagcctataacctttaaggcgtttaacttattttattagtaggttaggcaacttgacttgatattgttgatattgttgctcaatgctggtatataggcaacaaatatcgagcatataggcaaggtttttagaacatatttgtgccttcttaaattaatgttgatgagtgggaggccaaggaatacgatgcttatgttttctttgttggctatataggacactaattttgcccttgacgttggaccaaggcttttgttaggagttgatgtttggtgatttaacccaccagcaggaacaggaagacgagtcaaccatttttttaaaacgaaaggatgacgctggtggatgtgaacgtagctagttaagtaatatgtgttaaaacgagaggatgacgcgagtgaagaggaagatgaaccgttgtagttgaacaggaaatagtcgcgagaagcacatccaaaaaccttattgccaccttctaccggtgcaggatgttgaaggtgaaggttctggagatctgctctcccgatcatcggtgcacgccaataagcgggatgaagtagaccacgagtgatgacgtagtaccaaggaagaggcaaaccctagattaatcaggacgcttgcacgatctccactccgtgtaaccgaactggataagtcacgtgtaacttatccggactccacgccatttcacgcacctgattattcggagtgtttccaaaaaataaatctaaatttcccgcagtaaaataaaactgcaaaaagagactgcatctgcgcaagggtgaggaaccaattttggcggaccattcgacgcgtacatcgtgcacgcgcgcgccatgccaggcgaggagagcatgtctcaagttgctaggagagcatcctcccttataaggaggtttccctctgctagaataggcaaggtgtactaaactccccatgcatgctatcccataaggtgagctttctttatttttctaaagaattatctttgaatgggctaacacccatctattaattccaacgtaatgttggtatataggctgtgacggacgccgtacccgattgagatggggttgccgcccgattgagatggtggttaccgttctagtgaatggtttaagaatatctatacatagatttggacataagacagagaattatgtgtgaagtgctcatgattattttattgtattactgatgtgttagtctctttttatggtattaatacaattccatttatgaaaagggacccaactttcaagacaataataatctgtagtggtgataggtgagtttatatctaagcatggactaagtgatttttttttttgaaatttgagatacattcttataatttagtatatcaaagtctatgatctatttcacggcataagtatttttcttccattttagttaccattataagataatttaccatctcttatggtgaatttctaagatgaatatggtgagataatacttcttttagtgttctctttatcattaaaaataaaatgcccgcgtatcagtgcgggcttccttgttacttaaatttttaaattttttgaataagacgaacggtcaaacatatttaaaaaaagtcaacggcgtcaaatatttagaaacggatggagtacataggcaacaaatatcaagcgtacgtatatgcaaggcttttagaacatatatatatatatatatatatatatacatacgtgtatatatatatatacatacgtatatatatatatatatatatatatacatacatacatacatatatatatacatacatatatatatacatacatatatatacatacatatatagtaaatttgtttggtgctccatggtgcccgggcaccattgttgaaattgagtatatacccaattcaaatgagtatgaaactttttcaattacttaggtattaatattaactactttactaactagttcaaaacaaatttgaactgaatttgaacttgtttttgttagattttgattcttggtatatagcatccatacatataattagttaggtatgtaatcatggattgtgaaataaagttaaatttgagttgttttgttgataggtataagtatgaatcaaattattataactaggtatatactcacaatttgaaaattttaaaaattttgagtgattttgtgcatttgataccatggtgcccgggcaccatggtgccccatatgatatatatatatatatatatatatatacatatatatatatatatatatatatatatatatatacatatatatacatacatacatatatatatatatacatacatatatatatatatacatacatatatatacatacatacatatatatatacatatatatatatatatatacatacatatatatatatacatatatatacatatatatatatatatatgcgcattctgaaattaatgtttatgcaagaagtaggatcgattggttatgttttctttgtttgctatataggacactaattttgcgcttgatggtggtctaacgctttttttaggagttatgtttggtaattaaacccaccagcaggaacaggagaagacgagtcaaccattattttaaaacgagaggatgacgcgggtggatgtgaacctagctagttaagtaatactacctctatatttaaaatatgtatgacgccgttgacttttggtccaacgtttgaccattcgtcttattaaaaaaaattatgtaattattatttattttattatgacttgattcatcatcaaatgttctttaagcatgacataaattttttcatatttgcacaaaaattttgattaaaatgaatggtcaaatgctggtcgaaaagtcaacggtgtcatacattaaaatacggaaggagtatgtgttaagttaataaaaaagattgttaagttgaatgaacagatttgctaaatctcaaccatgatcgtacgtcgatcaagaaaataatgtatgtttgatggtttctcgttgacaacatataggcatatagcgttgttccgagttgaaccaatgtgccctacatccataccggcacgaggtactactatatctttccgtaagaaccatagagcaaaaatgaattattatattagagacattgcatccatgcatgcaaagcaaagcgtgcccggaactagaagccggcaaccgactgatgcatatttgtctgattttgtttacgcttcagttcacctaaaaaaatcttaactagtaagtaactagttgaatggagatttctctcttccaatacagtgtacttgttaatggcaaaattgctccaagcaatattgtttgccttcccatcaatatacaactagaagcatttttagcgatctattccaattcaaacattttgctgcaagtatcatatgattcagcacatatccctcacctctgctacaaacacccccagtaaatgaacaaaaacacacagaaaaaagggagagtattagcttactttgattttaatttggatgtgatacgacgagccccatccacaggttggggattcaacgaaccctagaaaatacaaaaatgaagagatgttaaaaacgaaatcagaaaatcgatgaaaaaagaggattgagagaaaggggtatcgtgcgcaccgactccgccgcagcagccgccgccgcaaccgccaccaccatgctcacgccactctccctcaccggcacagctgacctcgtgcgcaccggcgtcgctaaagtggagtcgtgagcaggctccaccgccaccggcttcgtcaccgccgccggcccaccgccgcagccatgactcaaatgcttgggagtcatttgagagctgtaggtgtctgtttgggagctgctcagatgcttcttcagggtgtgtatctgattcgtgagggtctgtctgatccgtgagaaattgtcctgtccaggaccgaccccaaacggtatactggtaagtagcatttatttatgatgttttagtcataaataagttaagtcttcctttttcatggggttaaaaccttttctctttcgtttcatgtttttttctgtcctttgtacacgatatatgatcgggagttctcgaaacaccaagcacaataatatcccattcatgttttatttttgcattccatcagtgtggcgagttctcacaccaagcacatatatgtcccgttgattctcgatggatatcaggcgagaattatatttatattttattaaattataccgatgttaaacaaaacttgtgattgtgggatgggaagcaatatagtactccctccatcccaatcccaatataatcagaaaaaagaacttctggacacaaaagaccaagagaaatttatcatccgatattccgatcagtagctggctcatgcatgaagtttaatccagcgtgatccatttaatctccatctaagaaagctacatccatttaatttaatttatatattatttgtttttcataaaaagaatttttttaaaaaaaaatgagcaaactttcaactaaaaatttgaaactttcaatttaaaattttaaaaacttttaccacaaaatttaaaaaattaattcaaatttaataacttttaactcaagtttgaaactttcaacccacattttaaaattttcaactcggatttgaaattttcaaattaagtttcaaagcttttaactccaatatcataacttttcaactcgattgtttatatgttgttttattgtaaaaacactaaatacgaattagaaacgatattaatgctaagctagagttagcggcgggagttaagggcgcactgcgctcagagaacatgggccgatttgctttcagggataactgcgtgcaatagaaaggcccatcctaaagtttctactccctccgtttcacaatgcaatgcaagtcattctagtatttcacatattatattgatgttaatataaatgtgtgaaatgctaaaatgatttacgttgtaaaacggaggaagtaaaattttacataatatattaagactttcctccaatatgtatatatatttatgaaacgaacaacttttcaaaacacgagggagtagtaatttctaatgggactattaaaaaaagtattcgacattgaaatttcacaaggcgacagatgcaagcttattttggtcaaacaactaaattcggctagtttttaaaacccgacagatgcaacttctattgcgacatttgccatgtgaacgaggtatattttagaaaaatatgacaacaaatataatataatatggtagaagtagctattagaaaaatgcaaactgcgacatatgcaaggatattttggtcaaaaactaaatgcggctagttgtttgaacccgaaagtgtccacgctgctgacccttgcgcagcctttcaatctccgacgtgaaccgctccatggccgccgccggcagcacgaccggcacggccacaccatcttccccggcgccgttcttgacggcgatcaagtagctcactccataccaagcgtgcgagggcccgccgtacaccggctcgccccacccgaagtccacgcggtggaagccggcgagccggacgtcggagaggaggagcaggttcgccgtgtcgatggccggccgcccacgcatcaccagcgtgtcggccacggaccggacgtactcggcgttcaccgtcttcttcgcctcgcgcacctgctcgaccacgtcggcgagcgagccgcgccgccgcagcgcctcggcgggcatcgccaccgtcaccggcacgcacacgttgccgtagtagccgcggggcaggcggagctcgccgttgttcctgaagctgacgatgatcgccagccgcgcgtcctcgccggcgggggtctcgagcgccctggcgcgggcgcgccagacgaacgacgcgagcacgtcgaagctcgtcgcgcggccgcggaggtgcggcgggagagcacccttgagcgcggcgacgtcgccggggctgaaagagaaggtgcgcatgaccatgtcgccgagggcgcccacggacggcgccgccgggggcgcggcggcgaagtcgttgtactcgcggagatggaacgccagcttgggaggcttgcgcgcgtccagaagctcgcgtgaccacgccggcgagacggccggttcacgggcaccgcgggcgagatcggcgacggcgtccatgaactgcacgatacccgaggcgtcgcacatggcgtggttgaggcgtatcccgaggacgaatcctccgcagaggagacgggtcacctgttcgtccacggatcaagtcaacacgtggacatgtgccatgcatgccacaccattgccgatgcgtgaatgagcaaagatgaagcattgaagcttacctggatcagcagtaatggcgtgccgagcaccgcggcggagccgtccacgtcgaagagcagctgatccatgcacgggaacggcgccctgagcccggcggcctcgagctcgacgacgcggacgtcggcgtccgcctcgacgaacatcacgccctcgccggtgcagtcgacgacgagcttccggccttcaacctccctgagccgcccggcgaacgggtagtacggcaccagcgcggcggcgagcgcccggcggatggtgtccacgggatcagcggccgcggctgatgggcggtagacgaagacgacggggacctgccaccgcagcgactccggatcgtctacgtcggagaggcgcttcgtctcgcggggcgtcggcgcggcgggggcgacgagctccgtcgcgcggcggcgcacggcgaaggacagcgccatggcttttggttgtttggctttgcacctagttatatcaaagctattgaacgtaagttcaaatgttggccttcaagctagcctagacaattaatgggcgttttatatgatgaaacatgtacatgcttatattttctaggccctgtttagttctaaagtttttttctaaacttccaactttttgtcacatcaaacctttcatacacacacaatttttctatcacatcgtaccaatttcaaccaaatttccaaactagcgtgaactaaacacagccctattctaattccaaatgacttttcaaagtaattctcgacaacgcactgccggagggggtagctgaggggcaagcacgtggaaggaatggaggagctggtctacaccgtgtggatggatggtggcggtgcgcgacatggaggcccgacagtggtgcagatgacagggtggtgagagaggttgtggacggcagtggcctgacagtcgcttctctctcgccccctcctccttcccgcatttggcgttgacggcgacaacggcggcagcgggcgacgccctcccctccaccagatccggtgggatgagaggcggtgggcggctgcattatcctcccctccaccacatccggtgggatgggaggcggcggcaacatgcagcctcccaagtgacttcttcctctccctctccatcggccatccactggtggcgcgcagatccggtcggggtgggttggtggcggtggccaagggaggcagcggtgggtggccaaggatttttggcggcgacatcactgatgagttcgtgcatggattgttcttgctcgtgcagttcttgcttgtgtagttattgatggatttgttattgttgacatgtgattgatctgcgttgatctgtgattgttattgaccggggaatgggttggctcgtaagcataagctcggctcggcttagagccggcttctccttttttttttttgaatttaggagagcacaaagatgccggttctacgaccggcaccaatgacactaggtcattggtgttggctggaaaactgacacctatgggcatttttgtagtggtgctgttttttcatgggtataggtcttaggcaaatgataaggggaaaatttaattatttgcctcaaagaatgtgctattctttaaatgccacttctatcattgttcatattcttttaccacaatagccctatgaaatgtctattgtgcccctcatctctctcggccaagtaagagtgaaggcaatggcgcagtagtggaactctggcctaatgacaaaccgacgatatagcttgagctccacccttgatcaccaaagtgccagacgagcaggagaacttatgaatcgagatgggagagcgtgggcgcatggggtggagatggtggaggcaggtacctttcgagcacacagaggttgtcaaagtgatgcatagtggccttctcctaggggacgatgagagtggtcttttgactcttttccatgtgctgctaggcatttagtggtgttattctagttgtcgatgaagagtgcctcgaaccgccggtgcgcgcgtgagccggatgtttgggatgagctggctagcccaccccagtcaccctttggttgtgctcctctttctcctactcttctgtcattttatgggatcgatggaggagtccgggaaatgctttcgccttgttgtcaagctaaagcttcaacactactcaagccttgttgccatgttactaggctcgagctccattgcttgcaccattgtatggcttggccagcgagaagcaagaggcgagagtgggggagatgagggggtacaatgaacattttatagtgctatagtggcacatctttagaatagctccattcgaaaatataacaacctagtattgaattagatacaatttagtactatgaatctagatagggttccaaattcattatactagactatgctaatctaatacgatgttgctatattttgagctgaaagatgtactccctccatacttataaaggaagtcgtttagaacaatgtttaagtcaaaccttaggaatataaatcattaataaccctcaagttgttgagtttgaaaatataaaaattatatgaatatatttgtcttgaaaaatactttcataaaagtatacatatatcactttttaataataatatttttatagaaaaaagaagtcaaagttgtgttttggagactgcgtctctgtccaaaacgacttcctttacgagtacggagggagtactttctctatatctataaaaattcaatcctaactatgaatctgaacacacatgtgttcaggttcatagctagaatttgattttttttataggatggaaggagtactttcttcatctcaaaataagctaatttatgttataatgagacattatctaatacaacaaatttagaatgttttttcttatctaggttggctaacttagtttattttagggtggacaagtatctgttaaaattattttaggctgatctttagatgttactaaaacttgtaagtctttatcacattagatgtttgaacactaattataaatattaaatgtagactattaataaaacccatccataatcttggactaattcacgagacaaatctattgagcctaattaatccatgattagtctatgtgatgctacagtaaacattctctaattatggattaattatgcttaaaaaatttgtctcgcaaattagcttttatttatgtaattagttttataagtagtctatatttaatactctaaattaatgtttaaatatagaaactaaaattaagtttctggatcccaacaccaccgacttggttcgattttcagagagctctgggcacagtcaaaactcaaatccccaatcgtaccattccacacgcttccatttattattcacccgaaacgaccctggccccccaccccccctccctacccgccgcgggccccaccccctgccatttcccaacggaatccacccggccgacgccgggtttcccccatcccccccccccccccgccccctcctcgtcggcgccaccgccgccgcaggctcgccgcctagggttccttccactctcggcgcaaggggcgtagggaggttgagagggagcgagcgagcgatggaggggtgggtggcgacggtcgcgtacacgggcacggcgctggcgtgcgccgcggcggcgacggtggtggcgctgcgcctcgtctaccgccacctcctccactacgccgagcccacccaccagcgcttcatcgtccgcatcatcctcatggtcccggtaggcactcgcctccgcccgatcccctcctccccctctcgttcccccatgcgtcggctacgtccccagcttcgcgttcctaggcgggtttagtttgtggtagctccgatttgagagaggtgcgcgtgtcgattccttgagcaattttggtatcggcggtgacgtgagaggcgcggatactgctgctgcgttgtgagttgattttactacaagtcgatagttaatctgggtcgttggatactgggatgcgaggccccaagcctctacctgtttctcacttctgaacgaacaggtttctattggcgaattgttcaggaagtgattgtgaatctataagttggatgggagtgtatttttttttagtaatgttattgcagctagctaagttattccatttggcatgcaagctgcctgtatggatttctgggattgcggacttgcggtattgtttgttcagagtctatgtgctgattccataattcagtcaaggccacatggttccagctgcgatttgagtgcaagtgatacatcatatatgttggtctgttggtcaatttgatctgtgttggtgtcttcttgatggttgtggatttgaaaggaaaatactattttgtgtttattgttcatctcaaagtgaatttaaccaacaatgtgttggctattcaatggaattataacttgttagggaatatattctgcagttataggcttatagcattgatttaatccttagttctttatgagaaatgcaagtctttctgtttcatatatgcattttaatacttgtagtgaagctacaaaagcttcttagaatgccctgtaatatgcattattttttaatggtgctactattgtaattccaatcctgaatgattctgatatttgtcccatagaatcaaagatgtatgcttgtactataaactttgcttgccaatattcacttatgaatgtaaagtttgctggttcagtttagttgtcattttatttactcatgttctcaacattttatttcattaactatggataaatacattattgtgcaggtatatgctgtgatgtcatttctttcccttgtactacctggtagcgccatctacttcaactctattcgcgaaatgtaagtttgactgctaaccaacccttattttatcctgtacattgcgccagtatacttgatataggtattgatacttacttgtttatgccttgacacttcatacactatatttagtttcacgaatctcaatatcttggtattaagaagatggcaaaaataccaataggtgtcagctttgctccctattgcaaaaagatttccctgttacaaggttgtaaaggcactatatgctagttagaggttcattgatcatgacctcgaagttttttctgaagtttcagggcacattatcgtttttcatactgcagtttctgctaagtaaatagttgcttttgattaatgaagtgcggcctggcattttgcaccaactaattctttttgtccgtaatagaagtagtcagtatgtgattccagtttgttgatcgatacttctttgggtgattcaaggtgtagcattgattcggacattcagtaacaacattttctggattaggatgctttgttgcttcagatccttgatagcctctgtgttatgcatgaaatgtaatcagcaaccacttttttcactatgtatattgttttagttaggggtgggcgttccgtttccttggtttaatcggatcggttttttcgggttgcctggaatttggttttcgtaaaatgtaaactgaaggaagttccagaaaaatatcaaccgagcaaaataaaccgaagaagatcggtttggttgttttgggttcagtttttactgagaaagatctatgccgcacactgcggttgactttccgcaagtatgcacggcctgcccagctctgcctgagggcctgtgcttgatttggagagagggaataggatttggtggatctgttagctgtcatgtattttttgggccacagtgaaagttgggcttgatgcacacgttagtgggcctcgagcattttggattggctgaacactcatctgtttcttcggtctcgtcggttcacgtgagatagaaaccgaagcaaaagccgaacaccgaactacaggaaaataaaaacaggacaatcaaccgatgacccaaaaaacggcctcttcagttcggttcggcttggtttggtgcggttttcagtcttcgggattttttttgcccatgcctagttttagtcaactttgttcctatgactgatcaatcctaaatacgtttatctggttattggtttgctttgttttcattgatgattagaggacacgttttgtgttttgtgcatgcatgcgaacagtatttaatttcatcggtatcaaaatcactaaccacttttttcactgtgtattgttagtcaactttgttcctatgactgatcaatcctaaatacgtttatctggttattggtttgctttattttcattgatgattagaggacacgttttgcgttttgtgcatgcatgcgaacagtatttaatttcatgcggatcaaaaccacagatgcattgttaaaaaaaatactaacagaatgctgtaacaaagattaaagcacctcagcatatttcacatgttctctatatatccaggagcatattacgtttgtcttttatgctacgatttcatacagcttgaacaattacttgaaggtacattatttattttgtgcagtacttttgcagaattccattggtcataatccataagaccacaaaggctttgcatattgattagatgtggtttttattgaaaaatcatggaaaaaaaggctggataaagaatttttcgtaagcttcactataatttcttgaactctcatcaaatgtgtgttggtgtacttacaggcaaatctataaatgacagaaacacgaatgcacttacactgtttagtcatgtttactttcatatgaggtgacttatctggtattgtgtttattgtgacagtaaaatggtattaaaatgttattgagcttttcttcttttctgaattgtgttttagctatgacgcatgggtcatctacaatttcttttcactctgcttggcatgggtaggaggtcctggtgccgtggtagtaagtttgactggccgatctctgaaaccgtcatggttcatgatgacttgctgtttttcagctgttcctctagatgggtgagttctgcacttccatgtttgaaattgcctatggtaactagcattatcttatgaattttgatagtgcaagtgctgatgattgatttttcaatgttcgctacaggcgttttatacggagatgcaaacagggttgtctgcagtttgtgatcctcaagccaatattggttgttataaccttcattctttatgccaaaggaaaatatgaagatggaaattttagtgtcaatcaatcctatctatacataactatcatctacacaatttcgtattcgatggcactgtttgctctagcactgttctacgtagcatgcagagatcttcttcagccatataatcctgttccaaaatttatcattatcaaatcagtggtgttcctcacctactggcaggtaaagtgaagttattaggattagttatttcctttctctatatcttatctcggagcctctggtctgatcaaagtgctgtatagagttgcatttattgaaacaaagtgatttctatcacagaaaccctctttttacttgatgaggagaagtttagtactccctctgtttcatattataagtcgttttgacttcttttctagtcaaaattctttagctttgaccaagtttataaaataatatagcaatatttcaaatatgaaacaaacatatcattaaaatacattcaatgaaactaatttggttttgtagatgatgttaaatttttctataaacttagtcaaagtgattaataatatgaaacggagggagtaacaagttgaagcttttctcacagggcgtcctggttttccttgctgcgaaatctagattcataaaaaatgctgaagaagctgcttatctccaaaattttgtgctttgtgttgagatgctcatagcagctattgggcaccaatttgccttctcgtacaaggagtatgctggttccaatgcccgtcctttcggtggattcaggggaagcctttttcatgctctgaaattcaatgacttctatcatgatactgtgcaccaggtaaacaagatatcgcaatatgacatcccccactctgcccttcatcctgatgaagagtccttcatggcacaatgactccatttgcattatgggcttcatctctgtcttaatcatgattgttcatgtttctttgcagtttgcaccaacatatcatgaatatgtgctctacagtaacgaggaagaggatgaaccgacaaaatatagctctgccagtgttgtgtcaacagtacaggacatacagctggtagaagtctctgtcgtggactcgaaagctccgttggcatcagtcatcctaacacatgaggcagataaaacaatgccctcccatggcatggaagaaactgttgccccttcagagccatacgacctctcaaacttggttgatgtagaactgtccaattactctgctgaggtccctgcaattcctgatgtggggaaacaatgatattgtgtgatatatatccgtcagatgtaaatgggtagcgctcacgagttgttcatagattacactgtaaaggtatccttgtaatcctttgtttctgccaatttttccccgttgctagggacgtgctgatatctttggttcaaattgagctaaactgacagattagctgatggtgtcaagtaaatttgtaatgtagggagaagagaatgtaacatgtttctcagttttgttgttgctgataaagcatgtctggtcaaatgcgttatgtccttatgggtatcgatgcactcctgttacataatcagagtgggtggtttgacctggcaaggagcagatcaaattacatttcataatgtattaatccctttgtcataaaatatatagcaacccaggactcaaatatctcgacagatggtatctagtaatccaatctggacatgtggtctcttgttcagatttgtaatactaggcggtgtctaattaagtactaggttggtatattactatattttacacagaaatttctcgacaggtggtatctagtactccaatctgggcaggagtctcttatctagatttgtaatactaggtgttgtctacttgagtactaggttggtatatttaacgacgaagggagtaagtagtttctttttttttcaagttcatatgcggatatgccccacggcaggattaacacagtagaacgctatgattaaacaggcagcatgcgagtaagcaactcctgcttatctggaatgcaaatgttactgtcgtctgtcgcaaggccaaacggaggtctatatgcacatgcactcatacagtgacaatcatggattcaggatcaaaatggttaccaagcggcactcagggacctgcggttgtggattcttcaggggacatgaggctgcttcatgacagcttccaggttcatcagttcatcactgcagaagaaattgtctcaaacaggcagataattcatttttggagacggaccatttcatctttggagatgatccttactttttcctaaacaagtttggaagcgctatattgtagctatccagcacaatctataaaagagtacatatttggagacattgttaggcgaaaaagaacacctccagatgctacattatattctcacactaacactccaagctgactaagtgaagtagaagggcacttctggataccattactggctgttaacatcttctaaaaagatctgggcacaactctaagtctctaaattacttcctttctacacagatcatacagtacaaaaacaaggaaatcattcttcagtatctcatctgaagcaggccagcttaacctcattcatcgtcagtttcgaaggattcattccagcagctttcatctgatacaccaccctggtggcctctctgtacattccaccgcgagcatatgccatggccatggcgttccagcacactgcgtcgggtttgccatcaatagcctcaaatgccctggctgcatctgcaagctgcccttccttcgcgtacatatgaagcaaccctgacccgacgaactggttcatgtccaggccacgcttgatggcatcagcatgcacctgctggccatagcatcctttgttcttcgcctctgcacagaccgcaaggatgcttgacagagagaagctgctcctggcaatgcccgaggaagccatgcccctgaagacatcaatggcatcgtcaagaatgccgtcacgatggtatgcggtgatcaagctggtccaggccgcctcaggaactggttcttggcatgagaacctcatcatctcaagcacatgccgtgcgctgctgagctgcccactgtcgcagtacagctgtaatagcgagctaccaacatcgccacagactccatttttcttgacaacaaaagcatgtacctgctcaccgaactgaagctcgttcacccgagcacacgaacgcagcaccgccacaatggcatgggtgtagtgatcaccggtgatcccccgcacttggtgacacatctgcacgaatagctgtaacgcgtcatgatggaagcaaccatcggagtaggccgagaccatggtcgcccaggtgatgccattcttgactggcatttcatcgaacacctggcgcgcagccccgatgtccccgcacgccgcgtatgcaagcaccagccggttggcgaggggcaaagggaggccagagacggcgaattttccggcgatgtgcgcgtggacggaggcgacctcggcggcgtcggcgcagtctctgaggagggagacgtagacgtcctcgtcgggcgggaggcggagcgcgtccagcaggcggagcacgtcgccggcgccggacgagcacagagaagccgtcgcgcccgtcgccggcttcctccttatgtccccatcgtcgtcgctggaggtggtgggtacggggagactgggacgcgggtgcaggggcggcggcggtggtggtttggtgggtttccgcagggccggcagcggcagcgctcccctggcggtggtggcgttagcggcgagaagacggcggcggcggcggcggggagagaggcgcggagcagccgcggtggcggtggcggcgaacggcttggcgacggagaaacgcgccatggatggtgtcgcgaacgggggcaggaatggtgatgggcgcacgcccgctgcaaaacaaacgggctgtttttctcacagcgccagtggctgtttttgcttatcccctgcgcgtgcgctgccagcgcctgctgtagtgctgtctgttgagctgtacgagtggatgagattaagattttcgtgttaagctttttaaactactgaacggtatgtttcgtgcgaaaactttctatacgaaagttgttctaaaatatcatattaatttattttttaagtttgtaataattaaactcaatcaatcatatgttaatatcacctcgttttgcgtaaaaaacttaattttcatctccatctttatttttaggagaaaagaacaccacctatgatagagagtatattattatctcggttccagaatgttccagaatgcaagaatatttagggttggacacggttattaaaaatgttggtagaattaaatggaagaatgttgtgattggataataagtgaaagtaggtgggaaaattgaatggtggagggttgtgatttgttgggaagagaatgttgatgaagaagttgatatattttgggacaaatccctagaggctaaatattgttatattttgggacggaaagactagataagctattgataaaccatgaggtccacttgatacgctcacaactttggtcggcacgatctttcggtgagttgatcatagctacaatttggcgacctcctcccccacccgccggccggcttgtccaatgaggagaaaagtgagagagagagagagagagagagaggtggaagggagaggaggggaaagagatcagatgatgacatggcatcctgacaggtggggcccacgtgggtcccacgctgattcagccgtcacgtcggataaaaccgaggttaaaaccgccgaaggacctaaagtgaacggttttgtaagttgagggatgtcatatctggttttgcggttgggggacgattttataactcgatgacaagttgacggaccttcgatgtactttttcctataggtaacataacaccttgtttctgtgactgtggccaacatggatggaatttggggatgaggatggatccattggaaagaggatcccaagagtttccatcaaatacttacgagtcaaaaacggagctcgtatgcttggcagccgtttgaagtcaatgttgttgcaggtggccgaattagattcagaacttctacaacttgatctttgatatcttctagttgcctatgatgtgaaaaatggttgaatctatcgtagccatgattacatcagctataaggttatctctgtttttcttctcatctctctatctcttacctatacatttaatttattcatctaggaatatgtaaatagctagcttttgtatgagagacaatcctcttcaattttcaaatcctctctcctccacataagtcagttgacttatagcctactattaaactttctctaataacggcctataaaccaattactataaatttatgtgcaggagagaaaaaaaataaaaggtgttggttcttatataagagctagttctacatatgttttaaggtaaatacattaaatgcataagtaagaggaagagaggggagaaaaaaaaagtaaagcttaccttataagggcaatctcaatccaaacactgcaaaacagtttccatacttgccatgtcataaatacactaggtatagttactgtatgccgaatgggtggtgtcatcaaactaaattctcatccaatcacctctcttctctaatttaatccacctattctttattttcgttcttgattcttgtgtagagctggattcttgtatgagaaattgtttcttcatctttttccctcttctcattaactctcttgctatttcaactttttgcttatgtgatagtatatttaatgcttcgacaccagctgaggtggagggttgtgactgctctaagagcatcaccaacagtctacctatatgattccaaaaattgattttgagggattttagtaaaagaacagctccaacagatgccctactctcctacccgagttttgcagttcccttctcccgattcctcgctgcatttatatacgggcgcgaaactcgctcccaatcttgcactccccgcctttctcctcccgttcccgcgcgtgggagatagcgatctttctgcgtatgaaagaaacaaaaacggaattttctgttagtagtttaacataagggcacacttttaattttcgaggattgaatttaggctatctgttggagggaggagttttttcactttctattttcagtttaggaaaaccaaaaaaataattttggggaaagattataggtaatttgttggtgatgttctaactaatctatatatattggctctaacataggttaatagttaggagttagctcgatctgctattaagcttgctctaatacatttattcctccactttatcaaatctcaatgctaattgtttcccactttatctactcccaatacatttattctctacttttataaattgcaatgcaatgattacgggatagagggagtactccctccgtactcgtaaaggaagtcgttttggacagcgacacagtcttcaaaacacaactttgacttcttttttctataaaaatatttattggaaagtgatatatgtatacctttatgaaagtactttttaagacaaatctattcatataatttttacattttcaaactcaataacttgagagttattcatgatttatattcccaaggtttaacttaaatattgtcctaaacgacttcctttataagtatagagggagtacatattaagtaaccgtctgttgagtgatacgagatatttttagagaggtacaatagcaggctataaattagctgtaaacatattttaaggagataaataaggagagagaatggcatcgggctacagatttgtagccagctgcagcacggactccaagacgcagggtgtgtatgacaggtgagaccaggtattaatagtgtactatgtaactattgtatgaatgagctattagattggctatagataaattagagctagtagttggctatactattaaacttgctcttaggtatttacatgttaagtgatttagaatatatttgaaatttttactattgtaaaaatgttattggctggtaacctggtcggtgtatgcaatacattgagggtaggcacattaaaagggaatcgttaaaaaaccgacgcaacctttttaaaaaacttctagatataactatattatatggtagtgtaaatttattgtaatttttatataagagtgaaatacatggccggtccttaaacttgtggtgtggtgtcacttaggtccgtgaacttaaaaattgcacgttttggtctatgaacttggtttaatgtaccacccccggtccaatcgtcctttgactatgtttgaccgccaacgtgatatgccacgtaggcaacacttttgtgctcagccccctccatatatatgttcgcacataacttgccctgaccagtgcattcaacccaaatcccccaaaatatccctaaatcggctagggtttcgatggtgaggttagcggaagaaggccgagaggtagcggttgtggcggcctcgacggtgagattagcggcaaaaggcagcacggtgcaacggggttagcagtgacacagtgcagccggattagcggcgggaagcagcgcagtgcgtcttgcacgctaggcatctacatggattctccaagctcgtccctgtcttgaagtcaccgaaagaaggtgttgttgatcaagtgtccgttgtgcaaggataaagtcattttggagcgcagagcaatgtcaattgctaatcgggacatcattttctatacatgtaaggagaagaatgagagggaagaacaatttgaggatttttttgggattctggtgtcactatataaccacgaggagatatatgtgacgtgttgtaatatggagggggctaagagcaaaagtgttgcctacgtggcatgtcacgttggcggtcaaacacagtcgaaggacgtttggaccggggtggtacattaaaccaagttcatggacctaaacgtgcaattttcaagttcacggacctaagtgacaccaccacataagtttagggaccggccatgtattttactctttatataatttatgtgcaagttatatgcaatgtttttaatactcatatacatattatataaaaagttccattataactcattatattgccgtataattacatatttaaatgttttcaaccaaagattttttagacagtcctgcgtgaaagatggcatgcagaaagtcttttttaagtggcggtcgccttgggccatatcctctggaaatgcacacatttctatatttctatagaagcggtcgcctttggaccaccgcctctaaaaatacacacattttcatctgcttacgatgaccacatgtggaaatgatgatatttatacaggcgggtggtttttggaaaattgtttcctcttggacctcgaaagtaaagaacatatgatgctccctccatccaaaaaactctagaacaaaaattgttaaagtttagatgggaatagtattttcttgagtacctatatatttatgatgttacatttctcatcaaatcaatatttttattttaaagtacatatattttgcactataaattttaaaacttactacttacgctataattttactactgctatatatgagaatttagacaaaaaatggaatgcctcttttaaaaagaacaacatccatcccagtcatgaaatgcatcataggcaagatggtgaggagactacacgctgagtgaatgtgagagttccaggcatggtttacatagttatcgcggttatcacctgcgataaccttatcagtttttaaaatcatggtatgtctcacggtaaccgcacggttttcgtgataaccgtgcggtaaccaccaaaccgtgggatggcagtaaccacccaaaaaacggtttggggaaccctggttccaagttcaactcctatatactagacgcgcatatattcatgcgtaaaaaaaaatcagaagctggaaattcattttcacaagcggctattaagaaccgcacatgaaattgtttcttcatgggcgaatgactttgtaccatgtaaatatgcgattttcacaagcctttgtagatgacttatggggacaacttgtttttttaagtagtgatagattatcagtgttatacataaggcatacccaatagtttttggttgggcttggcagggtccaccatattacaagtcttatacataatcatgacacatatacaaaaggtgttccagagataaggaaagagagacaaaattcggtcggacccggagttcggccaaacttctgggccacctcccgggcctcccctttggtggggagacttcttaatgggccctcaacatcatatactatggttgggctcaatcctaaatggtttttactgacttatgggacctccaatccgtataaacgcatcttgattgttcggaggtgtattttatcacatgacgggtgtgttttcttcataaaatacctacatacacatatttacgaacactagtggaaatgattagtaatagtccctaccactaagttggataccatattttatatcattatatgcaggcattgacggtcggatattataatttaaggaccgtcaacagagatcgaagttgattatcatggaaaagttttccaagtgtatagtacatttaattttcttgtgtcgccaatcatggtgatgcaaccagtattaacctgaaaatggatacaataaaatgcaactctcaatcggagcatttagctgaaatcccattttcgtcatttctcccaactcaaaatgtgtttgccactttttagaggcatcatgaccaaagtgccccatattgggattgattcagtccaaacgggaatttttttttggcagaaacgatcgattcagcacacattaggatcaattcaaaattgtctaaacaagatatcaaagtcatcaaattggatgctttgtgagcaacaattctggatgcaattcagtgatgcaattgattgtgtgagaggcacacactgagctccccccagcgtagtgttgggccttggtagccaagaaagcaaccacaattcatggatgctgaaccagcccaataggatctgaaggtagcagccacaatccaacacaatgctttgtttccgcacttcaaatcttcagatgcaactttccttgaacattctttcaccaactgatgaaaactaagggcaacggagattcgatggttggagcaactgaggaggaaggagcccatgaggtatagcacagtgagcccatgcctcctggtgcctgaccacatccctttccctcttggcgtggcctggttccggtaaaaactgaagaagagaaagagagagacactgatggaatatgatgcagcatgctcgacctgacctgactgaagcagtacaatcagggacattttagatggcaaatattggaaaaaaaatgggaaagccattttaattttggaaaatggcagaaatggagtttcagcatacactcgatgatgagagtggctttttatcgaaacccattagcgggatgtcattccagtgatacccacttttgatgacatcgtatatccaaaattctctgactgaggaggtgtaggggatgagtatctaataggttcctgatcaatgtgcacaaaacttataggactcatttatatgcaatctctaggtgtgcctcccagactagttggagaaagccataaaaaaccatcaaaatgtgaccaagcggaacctaaactaaaattgctagaagatgatgatggaaaacaagagcagatgatgccagacaactctacatgttcaaagggtacatccacgtataacactcgctggtcatcgagatttggccaccaccaccactacattgtttgtgcaacgtcattgagtacaacactggactattaagtttaagtccaacaaacgtcgtacaaggcctgagctgctcaaacccactaggaattaggatgtacctcaaaattgttgtaccgctctgtagctagggacgatgaacctgaacttgccaccagttctggatactaggtgtggacacatgggaaagctatgtaacaacatggacactttagtacgtgctttcattaatattacaaataatctttatcatgtgccaagattaaaatgcctaatctctgactgataaactatgacaccccggagtaactgaagaaaaaaaagaaagagataaagagaagtgctagtgggctgctttggtggtttttgggccaagctagctagagtgcagtgtgtgcagaagttgaaatgcgcagtaccacatgtagtgttggactttagtcccacatcgctacttagttgagatggacatgtttataagttggatagcacccaatgacaagtaacacatgtttgaacctttttgcgtgaagtgaggactgaggacgaaagcacagagtgtaggtatggtccaaaagtgagttaggcttaatcattttttggagttaggtttgaatcatttttgggcctgggcaatacataaatatgttaatttagttcatacgttatattatcttgtaggttagttaatgttcaccatttttgtactactttttccttgattcttctaaagataaagaattccatatatataagccatggcaatgacattaaccctcttcttcttaatgataagaatgaactcttgaatccagttgatgcgatgacaacactatttatgatttctatcgtgatcaacaactaatgatgaatagtaacagcttgttcaggatcgattgaactaccactgataagccgttgaaaaataaatgaagcaaccaaaaataatttatgtgtacaacttttatatatgtattgttcgcggcttagaagccaaggttggaaaatagacataactgaaaaaaaaacaaaaaaccaactcaaaattgttctagctaataagccaacaagcagacaatgagatgcacacactgagctacacgcaacattctaaatcatagctggtatgggatgaacacatgtaagtgttttgcacggttgtagatacaaacatatacccacgacaaattgagcattttaggcttgcatttctagccattatagcataaccttatcactttgatcaatgtttatcctattggcagctcataactactagaccatttagtgtgatagctaacctttttgagatgttgatgcactcggcatacatggaacgccatactctagctttctttgtggccgttggattgacctagatatgaacggccgatgtatccctgcgtcccctatattatgagggaagtcaagtccccatcttcgcactgaccaatccccttgttgatttgctccatattgaggttgatttgccttccctaatatcctcccccatcgacaattctggcccttgcttccttccttgggaggtgaattatagtggctacgattgactccttcctcaaccaggagttggtgatggcaaccgacaggatgccggatagtcactttatggcctctagcaatggtggggcctgctaccaaaacactcatggtactccaatcactatgggggtccccaacttaggttgtcttgttgctagcataggcattgctccgtcaagctctcttatgccggagaggggtctggcaaccgctaattacaacttggttgctaactttccagaagatgctgccgtggtgcctcaacaacagcagttgcaagctgcatctagtaacagcaactcagggttgatcaaaggagggtggacaagagaagaggatgagtaagtgacggatcatccggcttcgactcagatttttactcttgtttctcggcatctcttccttctcatgaagagatcgtgtactatcattgtgttttcttgattgtagagttcttagacagatggtgcgacaccatggagatcgcaagtgggcagagattgcaaagagcctccccggtcggatagggaagcagtgccgcgagagatggaccaaccatctgcacccggacattaaggtatggatcttgtgacattcctttggttacatgtgtagatctaagggatctagttttttttctcaatgcaatttttgaggtggaattccttttcggatttacgtaaaaatcctagaaatttcatccctccattccaaggtgaccggttattaactgctgagtacggtagtcatattgcataacttttgttctagataataaatatgggaatttcttcattatggccattaatgtgtcccatacttagtcctagggaactcgtctggacagtactccaccaagtttatttatgttcttagtcgttgttgtctatgctaattaagcataatgttttggacacttatagttaaaaatgtcttagacacttattagtccaatgcctatgtttttatatgctgctttatcactataagcaagcaatatgacattctactaggtttaatatattctttatttgtcgccagagtaatcaataacattatttggcagtaccctgcattatcatgtatatgtatatatgctttttatctctcaataaatgtgctcaaattaagaaaatcattaaataagaatccgtaaagttccggatacattaacctttaattgccttatgctgttaatcatatagatgcatccaatattaataagtagcaaatataaattacactgcagaaaggcatctggacagaggaagaggacaggaagctgatcaaagctcatcaaacttatgggaaccgttggtcagcgattgccaggtcgctccccggccggtcggagaacaccgtcaagaaccgctggaacgcgaccaagcgaagcctaaactcaaagcgccgactgaggaagaaaaacaatgagcaagcagtgccaaggcagccttccctcctcgaagagtacatccgtagctgccagcacccactgcccaatgagacagcaccacccgcatcattcgatatcggtgggtacggtaccggtgggacgatcggtgcaagtccaaccccacccacagtgcatgcgttgggtggatctactccactagggttggtgatgttccttgacctacttaaccaggctacaccgcacccaccacagccagacttgaacttgttgaacataacaccggtggtgccacatctcaacactagtgaatactgcctacagctcgatgcgaggggcaactgtagtatggccagctgccggtgcaaccccacgggatcagcgcccaggtaggcccaagcaacgtcggcaccagtggcagaaccggcggcatggacaacaatggcgtcatccagatggcgtctaaccagttcgtgatgccatctgagggtggtggcattcctgacatggccaggtggatcaactgaggcttgcttgcagtattgccggatcatcactcgtttaataattattattattattattatcatctctgagttttttttctttttggaatttctccaattaagttgaactctcacctacaattgcagtttgtatggctatatgcctatactttgatttgtttggaacatctgagtcttgagtcgtccctgtggtgtgggagcctttattaatttcttgttctttttaagatattgtttaatgtatgaacctttattgtgttgtgcttattatatttaaggtgtcaatcaatgtatgagttacattgttctagaatttttacttttctttctcaagaaaagtagcatatttaagttttatattgttgagtgggagagtggtagtatctggtacccgtcccataatacaaatgattttatgggaacacgcgtggggagggggatgtttttttaatgttagaaaagctcaaatatgtaaactagacattagagataactagataatacgagagtcctccatttggctgtagggttaaataataaggtagctctgctcgttaacttaaatgagttaaaagtgtagcttggcaagctgagtataaactgctattttaagctcgctgacactgtctaatttatttattgcacctaaaaaattttagcatttgaatttaatatatattaacaagataatataactaaatggtgaagtagtgattaagtagtgatgtactaatcttggaagtaacttaaatcattaagtactaaataagaatcactaagtataaaatgataaagtttactttttgcctactatgctcaaagtccccttttttaccctgaagtccaaaactggttgtgtttttaaccctacttcaacgggaaactgtcttaacctatcaatcccacattggtcaaaaaccattcaaatagttatgaatcttttttttttaaattacaaattcatatgacacacacacacgcccacacacacacacacacacacacgcacgcacacatatatatatacactactttacaaaaaaaaatttagttcctaactcaactcacaaattgagatataaaaaaagataaatttagcagcatatgaataatagtggtactatttatacatgaatttatcttattttcaatgtgtaggtcatatttgaacttgatttttactggagtgtttaggtatcactatactctacattatcattcttttcttaaaaaaattttataactctttacattgaatttggaagaaaagtctaccttggccagctaagtgtaaactggcttgtcaagctcgctcacatggtctaacttatttatttcaccttaaaaatgagcattttaatttagtatatattaacaagacaacataactaaatactaaagcagtgattaagtagtaatatactaatattggaagtaatttaaagcattaagcacttaataagaagcacaaagtacaaaatgacaaaattaattatttttagccagctctcatgtggtgtagtattttttttgtcactattggtatttcttaacgacattgttgacggtcgttatagaccaatttcaaccgtcaatataactaaaataaaggagaactaactatgcttgcaatggatatttattttagaataacatagttacacctgtacttggagtattatttgtttgcagagattaatacataaatggagaagaaatgagaaaacttcacttctaagcaagcttaaggataagatgggctcacttgtcaggtgcaaccgtcccggaaaccgccataattgccacaaccgtcatagggacccacctgtcagtgaccctgggaagtgtggaggcctgctgggccggcccaggttcgaccgaaccctggtgacgccagctccagttggccttacatgtggacgtccaggattgcttgctgatggtggttgtggggcatttcatacaattcgcatcaattacaaccgtcatacttgcctatttcaggaggagctcattttactttcaacacgcactcaagcaagacttgatctcgatctctctctctaaagtttagtttagtgctctagtgctaagtgtagtagtgttccatctgatgcccaaatgttcccagcaacttttactgtaagggcaagagaaaaagagatgaatcaatgtttccctggggcctccacagataccacaatttaaaacaacatcatccggtgcacaatgtctcttatcaagcatgtcccttgtgtttaatctatcccacaacagatcaagccacatgaaaatcttgatcattttcacacatttggttttccagatccactagaaaggtcttggaacagagattctcatgaaattaggcctatagaacttatgagcgtaaaaggttagggaattccaaaaaaaaaaaaaaaccaagagtcacctctctatgtgctaggtcctaaaccatctaactctgattctagctacaaatattgtatataaacatgtggttcaagtggaaggttgaaacaatcttcaagatgcacattattataaaaacacaccaactcccatctgacagttgtatgatagaaaagacctggaaacttatactttctgatttttcccattccaaagatcatcccagaacaaaacagtagtcctagactagattgtgcattgtgatatggctctgtatatgtcagataggtggaaaattaaatagggaacttttgtcatgtaatatgaatcccaaataagtcttacccagcgcaaatcaacagtagtgtacaatttgtgaagatgttttaggagcagagccacattctgaatgtatagatttataacacctaaacctcttttgtctttcggtctataaactttgtcccaggcatatttttcaatcaaatgggcttgcttgtcattgacttaattttgtagctaagcttgcctcaagtgtgatcaacgttttactaaccatagtacgtacttgtggcaagccatcctatcttattataaaaatctacgcttaaaactaagcattgtgcttaacgctaagtcatttcagcttaacgctaagttgggatgggggcacgcgaccttgcgcggttgcgccccggagcactcctgcagtattagggtttccatgcatttgtacactggaagtgtgcctttatattgcccctccatttctacgtttgctccttcaagagacaggagctatactcgatcgagtagccggtatagctcctagcttgaaatcgactgccatggcgccagaggcggctgctcctcccgccggcgagaagatggccatccgcgtcgtgagccgccgcctcgtcaaggcctccgacgcctccatccagccacacgtagccgccgtctccaacctcgacctgtaccctaactgctagtctgctatcaagcctccatcgtctgcctctacccaaccaagcttcccaacgccggtgatggcgactttgacgccgtcgtcgccaccttcgaggccgttctcccgtcattgctcaaccacttctaccctctcgccggccggatcgtcgtggaccctgccaccggcctccccgagctgcactgccacaaccagggcgcggagctcgtcgtcggtgaggtcgacgtcgcgctgggcagcctgaactatgccgtgaccaactagtcggtgaagagggtaatggttccgtaccccaaggacgtgccgcgcgctgtcggtgcagctgctgcggttcgcctgcggcagcttctccgtcgtgtgggggaactacaacctcctccacgacggtcaggtcagcaccatgatcgtcaggatgtggtcggagctggcgcggacggggaggatctccgacggcttgccgattaaccacgaccggtcggtgttccggccgcggagcccgccgtcgtacggcgccgcgatcgacgccatgttcacggcgtacgacgacgggggccggctcgtcaacgccctgaccgcgcacgacagcttcgtcgagcggctgtactacatcgaggccggggacatcgcccggctgcgcgacgcggcgagcgccggcgccgagcagcagcgcgcgtcgcgggtgcaggcggtgtcggcgtacctgtggaaggcgctcgccggcgtggtggccgcgtcgtgcgtgcccgaggagcggtgctgcatggggtggtgggtggacgcgcggcggcgggtggcgtcgccggcgctggtcccggcgatgtgcggctactgcggcaacgtgacgtcgtacgctctcggcgacgcggccgtgggggaggtcctggagaggccgctggcggaggtgccggccatggtgcgggagagcatcgcgtcgatcgactacgacgagtacctgcaggagctggtggactgggtggtggggcacaagacggagaaggtgatggagaagggtgggctcgggctgggctcgccgacggtcaccgtcggacggtgaaccagacggtgttcgcgtcgttcccgctcgacaccgacttcgggttcggccaggcggcgctcgccatgcccatctgggaccacggcaagatgggctgcgggacgctggccgtcggagtgcgcccgggaggcgacgggtcgtggctcgtgagcgcctacatatggccgcggatggcggcggcgctcgagtccgacggcgtcttcaagcctctcacggcggcgtatcttggactcgtctagctttgctatatatgcgcgcgcggggcttttttttgccttaattattatatcgtgcctaagataacggccggccttgtgcgcttgcatttgggacttctgtgtatttcacttcaatttaccttttttaaataaaggggctgtctatacgacagccggttaaattcaatttggtttgatcattagaatttctgcctaattaaacgtacgatgttatcggccatcccgtatgccgagaattagttatttttagagtaactaggtattcaatttgtttgaagagtaactagtactctatttttaaagttatttttaactaatacttaattagttatacattaataaaccaccacgttttcgtgcggggaggtggagttccaaactttacctaatataacatataggaaaaagttcgaattaccccccaaactatcgcggcgaccgaattactgccccccccccacctaaaaactaaacattcctcacccctgaactatcaatactggactaattaccccctcaacccaatccagagcggttttattctatgtggcgtacgcgtggcagtccagtcaacattttcttgtaaaaaaaatagtgggacccacacatcattcctccacttcatctcttcataatctctctctctctctcgagcgggcacaagtgtgcacagcgatgcagaggggcaggcggcggaaagtggcgcgcgggggtggcagacgacggtggcgcgcggtgggcggcggcgcgtgggccggcactcaagcggacgtaggcgtaacagcagcagcaggagtgagggcggcgcgaggatccaccacgcctgatcctcgggagcgacgccggcgcgtggatgtggaggccttcatcctctagagcggccagcgggagtggacgtgggaggcgtccttctcctctaccccctcgccgtccccctttgccatcgccgccgcggcctccgccccctcgcctcacggccgccacccatccctccacgtgcacagtggcacgcacggtgcagcgtgtggacgggaggtgggcgccggcgcgcgggaatgcacggtgggcaacgagcagcaactcgacggtggcttggctgtgcccgagcaggcggcggcatgagacggttagcgccatcgcttgcctgagagcgtcgtcgtctttgagcttctaccgtgcggcgccgtcaccgcatggtccgagggccccgtgccaccgcgtgcagaggccatcgcctcctgctcctcctcaagccaccgcgctgccgtgtgccatccccttgttgtgctcgagcccctgcatagccacgggccactacaccgccaccatggcctcctcctcctcgtcgtacccgccgcaattgacaccgcctccacccgttcgctcccgcccatcccggcacgccgccgcccacctcccattcccgcgccgctgtgcctgctttgcgcccgagagagagatagaggaagagggaaagagggggtatgacatgtgggtcccactatttttaaaaaataaaatgttgactggatttccacgcgtacaccacgtaggacaaaactgctctggattgggtaagggggtaattcgttcggtattaaaagttcagggtgaggaatgtctggttttcgggtttaggggtaattcggtcaactgcaatagtttagaggggtaatttgtactttttcataacatgtatacaactataaaatatatgcaactttgtaacttatataggttacagtgtagttacgctattgttgtagtgtaattacattggtatactacgactatactatataatactatacatagttacaacttacaacagttttagcaaatcataagcaagcttataacaaattgcaagcatatgaaccaactaaagcgaggactcggtgctaccaataaagtttcacgatgtttcttaaaaaaatagtcaaagaacattcaattgaaaaatgagaacatcttgcttttaatctaaactttgttccacctgttttctatacaaagtaatacgcatgtccgcgtgaatgtactaactacagctaccttatcttaaagaataaatttcaaaaaactgcaactttagtgacaaaactatcagtttgctgcaacattagcgacatgtttcagattgctgcaacaatagcgtgggaaattatcacaaagctgcaacttttacgttatat

SEQ ID NO: 7079 - DNA, 9884 bp, Oryza sativa
caatggtatcagagcaaccctagtgtttagatcgtttcggggaaagaaatccaaagaaagaaaagcacaagatccgcacggatcaaaagaaccaaaaaccctaaccctaattcttacctcgtcgccggccgtcgttgacgccggcaacggagggggggaggggcaaagaggcgccgcctaggagccactcgacggccgcgcgcgcacctgcacgcgcgtgccggcgagggggcccgcggcggcgccgccatctccgtcgtcgccatctctctctcacacggtgggggttagagacggtggggggagcggagaagagaaaagaaaggagcgccggccatggcgcggcggcgcgaaggtcgccggcgatggcgacgccgtccacgcggtcgcgtgagagagagaagagaagagaagctagggttttcggcggccggccgggagaggggggtttttgatcctccgatctcggcgcccggccgtccgatcgaaaccctagctgatcggacgggcggcggcggccggaccgaaatcggcccaagtggggagcgcgcggcggcggctttcccggcccaggcccaggtttcggcctgggggaggggagggggcgctcgcccgcgcgcaaagtggccataggccgaccggcaaaggccggaaaagttcaatttaggtccctcggggccgaaaatgaataaaagagaacagtagcaatttttccattttattttgtcgatttttcatgcaaatttcaatagaattttgaatagatttttgcatgttttacctctgtttaaatttgaaccaacgggagaattttcacagagagagaattacagagattttgctactgttcatatgattttatatagtcttccgctgcaaatagatgaaattgatgaaaattagtgtttctaaaattaaatttcgaaccaacgggagaatttaattttaggaacattaattatgtgctatgatgttgtaattttctgaccaacgttgttaattgcaatattatagttatggttatatgtgttatgtctaattctgcccaacggtgatgtaggcttaatgcataatattttaatgttaattttgttctcaccgcacatgattatttcaggtggctactccttgatgggttgcattaaagatattccgaccctaaaaggagataactacgcagaatggaaaagaaaactcgaccttgcttttatcttgggagaggtggactgggtattgactaccccatgtcctatagaacctgctgaccttgtcagaggtgaaaatgagtcagatgctgactggcaaaagagacagagggacaatgctcctctcgtcatgtcgtatgacattgaacaaaagaaatggtccttagccaacaagaaatgtttggctgtggtaaagaatacgattgagcctaccatattgggctcgatcccagagtgtgacgctgtctcagagtaccttgaaagaataaagagtcagtttactggctcttcaaagacttatgctacacagctgatcaagcagcttgtgacagaaaggtacaatggaggtggtgttagagaccacatacttagaatgagcaacatggcttccaagttgaagccaatggatttgggcataacagatgactttctggtccatctggttatggcctcattgccaaagcagtttgacaattttattgtcaactacaacataagtccagagaaatggaactttgagaagctcattgctaattgtgtgcaagaggaggagagaatcaaagaatcaaatggtggttcaataaactatgttaaagataagaaaaagaaccacaagtctcccacctcaaaaggtaaacagtctcagcatctgcctcagcaacaacagttcgctgttgagaaagatcaatgtctccactgcaagaagacaggacactacaagaaagattgtcctgactttttgaaaatgatcatggcaaagaaaggtgagaacattattacatttgtaaatgaatctcattatgttggttactctagatccacatggtggattgattctggagcaactattcatgcttgtaattgtttaaaggcattccgttcgacgaggactacgcaaagaagagaaagcaccattagagttgccaatggagttgaagaaaaagttgaagctgttggagatcttcctctagagctcgcgaatggcttcatacttttacttcgagatgtcttttatgttccttctttgcaaaggaacttaataagtgtatcaaagttggattttgatggatatgattgccgctttggaagtggcaaatgtgaactatggcataataatgcatgtattggtcttgctgtgttgcgagacgagctttatttgttatctctttctgagaatgtgaatgttgtgtcctcgttgacaaaagaaaacaagaaaagaaagcgaactcccgatgtctcatcgaaattatggcactgtcgtttgggccatatttcgagggggagaattgagagactagttaagaatgaaattcttcctccattggaatgcatagaatgcattaaaggaaaatttgtaaagagcatcaaaaagggtgcaaaacgaagcgcaggaattttagagatcattcatacagatatttgtggtccatttcctgtgaaaagtgtggatggctatgactcgttcataacattcacagatgattactcccgctatggttatatttatccaattaaagagcgatcagaagcactggataaatttaagatattcaaagctgaagttgaaaatcagcatgatataaagattaaagtagtaagatctgaccgtgggggggagtactatggtcgacatacgccttatgggcaagtccctggaccttttgcaaggttcttgctagagaatggaatagtagcccagtattcaacaccgggcgaacctcaacagaatggggtagctgaaaggcgcaaccgtacgcttatggatatggtgcgcagcatgatgagctactccacactaccactcggtttatggatggaggcgttaaaaaccgccattcatattctcaacagagttccaagcaaatcggtgcccaaaacaccgtatgagctatggacagggagagtaccctcgctaactcacctccgtgtgtgggggagtcctgcagaggccaaagtatttaacccaaatattgggaagttggaccccaaaacagtcagttgccattttattggctatcctgaaagatcaaaaggctatcgtttctactgtccaaacagttatacaaagtttgtagaaacgagacacgacgtcttcttggaagacgaaatgattagggggagctcggtagttcgagaaattgatcttgaggagaggcgggtgtctgtacccgctccgtcgactcaggaacctttcttctctctacctgctgatgttgtgcctgcaatgcctgtcattgaggtaccagcacctgttgttacccctcctgtggcaacaatgaatgagagtgaggaacctgttatacaggattcaacagaaatggttgccacgccagaggaggagctacaacagcctcaaatagataatgtgccagtacaggagactcatcaagagcctcaggtacaggatgtgccaaatgtgcaggcccctagaaggtctgaaagagtcagaagatcggctatccgtgatgactataaagtttataatatagaagagtcgcatatggaggatgatcccacctcatatgaagaggccatgagaagcgctcgctcatctgaatggttggaagccatgaaagatgaaatgaaatcaatgaaactaaacgatgtttgggatttagaagaaattcctaaaggagccaaaacagtaggctgtaaatgggtctacaaaaccaaatatgactccagagggaatatagaaaagtttaaagcgcgacttgtggcaaaaggcttcacgcaacgagaagggattgattacaatgagacattttctccagtctcttgtaaagattccttcaggattataatggcactagtggcacattatgatttggaattacatcagatggatgtaaaaacggcatttctaaatggagatttggaggaaaaagtatacatggcgcaaccgaaaggttttgtcatgaaaggaaacgaaaatatgggatgtcgtctaaagagatccatttatggattaaagcaagcttcgagacagtggtacttgaagtttgatgggacaataaagaaatttgggtttcaagagaatgtcgaggacaactgtatttatccaaagtttaagaatgggagatttattttcctaattctgtatgtggatgacattctactggctagtagtgatgtcagtctactgcagaaaacaaagaaattcttgtcctcaacttttgacatgaaagacctcggtgaggcttcatatgttttgggcatagagattcaccgagatagaacaaagtatgcattggaactttctcaaaagacatatatagaaaaggtgttgaagaaattcaacatgtacagatgcagtgctacacctgctcctataatgaaaggcgaaaagtatggggcatcgcaatgtcccagaaatcagtatgagctcaatgaaatgaaaacaaagccatatgcgtcagctgtaggaagcctacagtacgcgcaagtgtgcacacgacctgacttggcatttgttaccgggttacttggcagatttcagagtaatccaggcctagagcactggaaattggtaaagaaagtcttgcgttatttgcaaggaacaaaaggcctcatgctgtcttacagaagatcagaatcactccagatagtggggtactcagattctgactttgcaaaagataatacaaagtcaacatcgggatacgtgtttaccctggcaggaggagctatttcatggaaaagctcaaaacagactatcactgcagggtctactatgtatgccgagtttatagcatgctatgaggcaacggggcaggtgaactggctaaagaagttcatacccggtttaaaggtggttgacagtattgagaaaccactaaagttatactgcgacaacgaacccgcagtaatgtacactcacaacaatcagtcaagtggtgctgccaaacacattgacataaagtactatgttgtgaaggacaaagtccgggatcaaacaatcagtctcgagcacattaaaacagaaaggatgctcgcggatccgctcacgaaaggcctaccacccaacgtgttcaaggaacatgtagccggcatgggtttaagggaagccttatgaatcctggactacagggcccaaaagtaaagtatctgtttctgaatagagatgtgtatagtggctgtcgaatccatcggcgattgaccgtgacgatgaaacatgctctatttacaaatctgtgatggaatagaaaaagctaaaagaaaaagtgagatcaagggggagaatgttagatagatctctctccccttgagcccaacggctcaagggggccttgaccgcgccctgatcgggggcgcccagcccaatggctggtgggcccccgtcacactgcgccatataaaagaggggtggaggccggcacggcacatggtacgagattcaccgccgccgccaactccaccccacaaaaccctaatccgatcgagagggggcgcagccagtgacgggaaacgccaccgccgcatccacgtcaagccgcgacgacaacgacgatgtccggcgcctcttcctccacgatctcctcaaccggtcggtatctaaaccctctccctttcatctacaatgtcgttcatcaaacccaaatagaaccacccgactagatctaacctaggtgatcctagtgcaaagtttaacacttatatgtggaataaaagtgttggtttagtaaaaagaaaaaaactaacgcttcattggagccaagccgagctgagcgtgagcatgggagaagagaaaaaaaaacatctttttaagtctcatccctatcctcccaacgctatcgtcatcaatatccaattcttctctctcgttcgctctcatcattttgtccttgctccctctctctcgtctccccacccgagcttggttggtgagtggcggccggacgcctctgctaggcacaaccaccataggcacggtgatggtttttttcgctctccccggtgcaacagcgactgcgtcttcctccgtcgtcttcctctcccctatgcagcggccatccgattccaccaacacaaaaggttctccactcgtgcctccctctcctctcctctactctcatgtcccgtgaggtggagaaggatgcgcgggggctagatccggcagcccccgagctcggcaccaccacgacggcgaggaggaggactggcgaagagtggcgatggtgataggcttggccttcggtgagcaactaatggccgcgatagcctcggtggactatgattcggtttttgtagttaaccttttgtgttgaatgttgatattctatatatcattcggtgattattctaatttgtgatggattaggattaaatttttgcgttggatttgtaattggattgggattaagtccttggctcaaaacatgtgctcaattcgagccgaagccgatgcgtcgagccacattattttttcatttctagaacctcaaaggtgcaccaacatctatgattctccacatcagtgtcggttacgaagtctagtatctatgtgggattctcaaatggcacccattaggtattctatagtaatgaggtggtttgttgttaaatatagtttctcagtataagaactattagcaatactaaaaaagagagatgcaaaatgcatgagccaataaaacttgcatccgagtctcaactgttcggctgctcagcttcttcatgacatacttgaggcttcatcggttggtgagtgggtcatgactatagatggccataaggcccgcccggcctaggcacggctagacacggcccaccagctatcggaccagcatggcccggtcggcacttcgtgccgggccgtgctggcccatgggctacacctccagccctgccacggccccgtgtcgtgtcggtccgaagacacgggtggtctatcgtgcctttttttaaataagtctattttctctccctcctcggtgggctgtgacatatgtatatatatagctaaaataagtccatttttcctccctcctctttgggctgacatattatatatatatacccaattcaaatgagtatgaaactttttcaattacttaggtattaacattaactactttactaactagttcaaagcatgtttgtactgaatttgaacttgtttttgttagattttgattctaggtatatagcatccatacatataattacttaggtacgtaatcactgattgtgaaataaagttaaatttgagttgttttgttgataagtataggtatgaatcgaattattataactaggtatatactcacaatttaaaaattttgaaaattttgagtgattttgtgcattagataccatggtgcccgggcaccatggtgccccatatgagtgtcctatatatatatatatatatatatatatatatatatagctaaaataagtctatttttagtccctattctttgtgtgtcgggcctggcctgtcggcccatcgtgccgtgccgtcccggtcattttgggccagcccaacgtgccagtggggggcctaggcacggcccggtggtcgggccgtgccgtgcttgggctgggccaaaatgtcatgccgtgggccaggccgtcgggcctcgggccttttggccatctatagtcatgacatgtcgacgtgttgtgctcctttgatggccaatccaaaaacccgaaagttttggccgtcttaccgagtctctgaaaatctcgacaccgcctatctataaatcttggcttcgcctcttatcacaagcatcctcttaattttaatggtgcatgaaattttattaccttaaaaaatattaatatttatgtgagggtgattttgttttatttaaaaaaagcacattcttttgttctattttgaacttgttaccttttcttctcaacggttgtgattttttttgaaacagggtacagacacatgcgcctatataagtgagcacacttgcacaccctatcttataagtactctaaaactaaatcggcatgatattcacaagtcaccacaagcgcatcaatagtgacatgtaagtcgtttatcgctaaaagaataaattttaattaccctcacaacatatataaattggagttctcattgttaggtgtatcttgagattcacgaagtcaactattatgatctttttctaattaccctcacaacatatatagatttaaaggtaaataaattatttaaaccatggaatgttgaactccgtggtatatcttcagctcaccaacaaagtatgcatgataagcaacatatgcttcattagcagactactgagttatctatctcatcaaatattttctttgttcattgtccgacactgaaagtattatatgggaagacattaaaacatacatggtcatgaccgtgtgagggtaggtggttactatgtgtgtatggatctcacctgcctagataccgtggagatactcattggagtactactgcctggcggtataatatttgtggtgtagctcatattttttttttagattttcaagcaatttttctttcataggatgcatttttaggcctagtttagttccgaaaacaaaaacttttcacccatcacatcgaatgtttggacacatacatggagtattaaacgtggaaaaaaacctaattacagagttcgagtgtaaattgtgagacgaatcttttaagcctaattgcgtcatgatttgacaatgtggtgctacagcaaacatttgctaataatagattaattaggcttaataaattcgtctcgcagtttcctaacggaatctgtaatttgttttgttattagactacgtttaatacttcaaatatgtgtccgaatatccgatgtgacaatcaaacccaaaattttttccaactaaacaaggccttaatgaaggggagagcatttctgtattcctatcttactataaagttatcccccactaactccttaaacttaacatgcaaagataccacatcatcatccactaattaacaagatgccacatcatcatccactaacaatcatcacattaaacatcatgcaaacatgctatatctttattctttttataatttaagagcttttcaaatacaaacatgttaaattatcatccaacataattcacataatgtttcaatgaatatctttattatgttttatgatatcctatatacttatttagttcatcctcacttagttagtgcttaaatgattaatctatggtccaaattatctttttcctttttttcctctaattaagtcatatcacataaattgtttttagcttttagatgattaatctatggtccaaactatctccctacttttttcttccataaagtcataccacctcactttttacgtttgaatcaccattctacatactatttaaatttaaattatcataaaccacattaatttacttaatctgatgttatatagctatcttacacgttattttttttttgttatcatactaaattcccgcagcaatgcgcggagtttcacctagttgttttaattgaaaggctttaaaaatccatcttcttgctttgagccaaaagtcgtcccatctcccttctcttcccttctcctcgcacgctactgattcacttccttctttttcttactccctctgtgtctcattttaagtacaaccataagttttcgcgctcaacttagatcgtccgtcttattt

SEQ ID NO: 7080 - DNA, 22959 bp, Oryza sativa
ggaggccgccatgtactcggcttcgcagctggacagggccaccacctgctgcttgaccgactgccagctaacgaggcactcgccgaggaagaagataatcccgctcgtggagaaccacgaccaaggaccacaaagacttatccatcaccgagggcgtggaatgccaagttggattccacgctcaagtggatgggcttcgagcaaagcccgcacgaggcggccatctaccggcggggcaatggagaaaatgccttgctggtaggtgtctacgtcgacgactttgtgatcaccggcaccaaggatgcggaggtcgcggcgttcaaggaggagatgaaggccaccttccagatgagtgatctatggcctctctttctacctggggattgtggtgcaccaggacgactccgggatcacgcttcgacagaccgcctacgccaagcgcgtcgttgagctggctgggctcaccgattgcaacccagctctcactccgatggaggagagactgaagctgagccgcgatagcacgacggaggaagtggatgctacacaatactggcgtcttgtggggagcctgctacctcacccacacacggctggacttggccttctccgtcggctacgtcaatcggttcatgcagcgaccgacgacggagcaccagcaggctgtgaacaggatcattcgctatgttgcggggactctcgaccacggtctctactacccgaggtgtcctagcaaggcacacttcgtgggtacagcgaccacgctggcgacatcgacaccagcaagagcacaagcgggattctcttcttccacggcgagtgcctcgttagctggcagtcggtcaagcagcaggtggtggccctatccagccgcgaggccgagtacatggcggcctccgccgctttgacccaggcgctctggcttgctcgactgcttagtgatctcctcggcagagacactggagcggtggagctcagggtggatagcaagtcccccctggccatggcaaaaaaccctgtttttcacgaacggagcaaccacatccgggtgaggtaccccacttcatccgagggcttacttggaagggagcatcaaggcgagctacatcaacaccaaggaccagcttgcggacttgctcaccaagcctcttgggaggatcaagttcctcgagctctactccaggatcgggatggcccaacttccccacaagacgacgcacaagacttagggggagaatgatggataagtctttgtggtccttggtcgtggttcttccttttcttttgagtagtttcaccttttcaggacagcatctacttctttagcatattttcagttgctaggacagctgcggttagtaggacagcagcagttagcatcttctttatacctcctttatgctttattcaatttggatgccctctaggacagcatcccattcaaatttcgaattttagactaggagagtgcagcgataggcttgcagccagctatggctatatatatatgtatccaacctctctcgggtaggtatggctttgagtttgtgaatgaagaaaactggaaaattgccccatcctgagtgccatcctcttctcaatgagagtaaccattgaaattctaacactcggtgcctgccgcaagctgtagagagccttgtgcaagcgtagcaccttgcattccttgccggggatcacaaatcccggcggctggtgcacgtagacctcctcaagtcgccgttcagaaacaccgacttgacgtccatgtgatggacgccccagccttcctgagcagccagcgcaaggagtcgcacggactccatccgtgccacgggagcgaaggcatcgtcatagtcgatcccctcctgctgcacgaaaccgcgtgccaccaagcgagccttttgcttgacgatggctccggcttcatcctcttcagcttgaacacccacttaagggtgatcgcacggtgaccacgagggaggtcagcaagctcccaggtgcggttctcctgaaccgcgtccatctccgacggcatcgcggcacgccatgccgcgtgtttctcggcctctgcgaaagaccgaggctcaccgtcgtcgcacgcaaggtgcaactgcgcctccaggtcgcgaggcaccagtcccggcaccggctggtcgccgagaagatcctccatcgtacggcaccgtagctgctcgccgtcgtggtacgcatcgatgcactccccgtcgtgggagagcggagtagcgaactccaccgggctgcactcaacacgagctggcgtcggagtagacgtgcccggaggagtggctgttggtgctggagcgcgtggtgtcgccggctgtggtggtgtcggcgaagagctcgtcgtagtcgaagtcgtggcccgagggtgtgttagtgtcggagttcggtggaggctcgggaactggggtagacacgctcggtgaagaagagctgcctgctcccctagctccctcgaagtggacgtactcgacggtgaagtcgtcgtacgtcggagtcgaaccatcgtccactgccttgtcccatacccaccctcgcccttcgtagaacactacgtcgcgcgctgtgcgcacacgctatctccgggtcgaggatgcggtaggccttcgagccctccgcgtagccgatgaacacccctggggtgctcctgtcgtcgagcttgccgatgtggccaagctccttgacgaacacgaggcagccgaagatccgtaggtgggagactgccagcttgcgcccatgccaagcctcgtatagtgtcctgccatcaagggccttagtaggcaagcggttgaggatgtagacggccgtcaccaccgcctctccccagaagatggccggcatccctctctgcttgagagcccgagccatccccacaaccatctggttgcgccactcgacgacgccgttctgctgcgggctgtacagcacagtgtagtggcgctgaatgccctcatcagcgcagtacaacgcgaattcagcggccgtgaattcgccgccgttgtcggtgcgtagcacgcgcagcttgcagccgcactccacctctgcagcagcctgtgcgcgcctgatggcgtctgcagcctctcccttgctgccgaggaccatcacccacatgtagcgggagaggtcgtcgacaagcagcaggaagtaacgtcgtcctcctggtgtggccggtgtcactgggccacacaagtccccgtgcacgagctcgagccgctccttggctcggaaactcgtctgctggggaaaggggagccgcctctgcttcgttaggacgcagacgtcgcagagctgctccacgtggtcaaggcacggcaggcctcgcaccatctccttggcgctgagccgcttcagggcctcaaagtggaggtgcccgaaacgctcgtgcctctgccacgcctcgtcccgacgagcggcgaggcaaactggttgtgcgacctgcgcactgaggatgtagagtcgattagtgcctctggttaccaagaaggtgacggcggcgatcccaaatcctcatgactccgtgctcgaccaacacgcgtgagccgttctcatccagctgccccacgctgatgatagagttcctcaacacggggatgtagtagactccggtgagcagcctgtgctcaccggacttggcggtgaaggtgacggagccgacgcccttgatctccacgcgggaggcgtccctaaacttgacggagcctcggacgctagggtcaagctcggtgaagaactcccgtcggccggtcatgtgatgggtggagccggtgtcgaggtaccacccatcacccttgtcgttgctggagccgttgcagagggagacgagtaccttcggctcatcaaggtggaggaaagcctctgcggccggtgccgctggaggtagctcgatgcttgcgtgtgccaggagcagagccggctcttcctccacctgtgcgacgtggacctggccacgtcgtggctgtcaagagtctttggcccaatggccaagcttgccacagttgcggcaggtgtcgtctcgtgtcggcttgtggttgccggcggcggcgccctgggcacctctgcgagcaccaccctcggcgcgtcttcgcggccaccgcagctggacacctccacgcgccttgcgcggcttgcggccgcctgtcgagggagaagactcccccttcctcccgtcactctgagaggcatcccactgctcccgagtgagatggagcttcccgccgatggtgataggccccaagagaggttgtggctcatcaccatcgacgaccttgaggcgacctaacgcctccttgatcgacatcgtggagaggtccagcagactcgatcgagcgagcgatctgcctatacttctctgggacgcaacggaagagcttctcgacagttctctcctcatcgtaggagtcgtcgtcgtactgcaccatcttctgcaaaagagtgttgagacggagggcaaagtcatcaacatcctcacctggcttgaagaccaggttctcccactccttgcggagtgcctgcagtgtggacttgcgggcgcgggcgctgccgatgcgtgccgcatcgatggcgtcctaggcctccttggcagtccgcttctaggaaagcgagaaccgcatctcgggagggactgcggtgatgagggcatccagtgcccgccgatcttcgtcgtagtcgacgtcgccgtaccggactgcctcccacatgtgccgcacctggagcctcaccctcatcaccgcggcccactcgatgtagttggttttggtgagggtaggccacccaccgccgggaccaaagtccctgaccaccgtttggacaccgtggtagccatagcgccggtcaggggagggagagtcgcactgcctgcgatggccgcgctctccgtcgaaccagccacctccaccgggagcgccgccgccacgcgcgcgctccgggctgccgccggcactcccgcgcccatctgggttcccgtcgacaggcgcgcggtcccttgggccgccgccgccgccgtgggggtgggctgctgcccaccgctctgcccgctcccgcgcccttcctcttgccagctcctcaagctccctgtcggcggtgatgtcgctggcgatggagccgttgatgctgctgcgcaaggtctcaacctctacctccgccgcacgtgccacatcttccgccgcctctgcttccgcctccaccctggctgctgccaactccgctaccgccagtctggccgccctccctgctgctgctacggtctgagccgttgctcgcctgcgcttttctgttgcggcgagctcggcgtcttgctgacgccgagtgctcgatgcgaccgaacgccgagaccgaacgtccgacatggcgcgcctccggggggctgctgcgtggagagggggaagggaaaggggaaggagtagccggtgctgctcctgctggctgagagctcaaccgagcttgggaaggggtggaacaagagatgtttagcctacaggaaagtgtggctctgataccagatgttagaatttcaatgattactctcattgagaagaggatggcactcaggatgggggcaattttccggttttcttcattcacaaactcaaagccatacctacccgagggaggttggatacatatatatagccatagctggctgcaagcctattgttgcaccctcctcgtctaaaattcgaaatttgaatgggatgttgtcctagagggcatccaaactgaataaagcataaaggaggcataaaggagatgctaactgctgttgtcctactaaccgcagctgtcctagcaactgaaaatatgctaaaggagtagatgctgtcctgaaaaggtgaaactacccaaaagaaaaggaagaaccacgaccaaggaccacaaagacttatccatcacgggaagcatatagctgaatccccatttttaagagataaacagcaattttcagaactcaatcagttcaactagattaacagttttacatgtaagaattcagcattcacaaagttttgctagcccatgattattgtttttcagataataaaatacatgcataagaatttctgacacaaaatgctatggatttgacataggatagggaagactgggggatagggcaccccgctctctacgagggccagaagagcttctccccatcatgatagaggctatgaggaatactgaattaaactttgtagattcattgcttatttcataatggattgcatgggcccttttatagggaggatgtcagtgctacataaaccataaattgtcactcgggaatgcttcctagtaaaccatatatttaacttccctaactaacagtgaggatatgtcataggtaggggccgaggggtcgaggcccatgggcccaacccctggcgagtgaacagtacccgcggtactgtagcagtaggttgggtgataggataggattaagaaatagataaatctagattagatcaagttagttacctaggggttaagtttctccatctatataaggatgggactatatcgttattctaattaagcaatgaatcaagattagtctcccctaacctaagtccccctctcatccctagcagccgtcaccgcccggctatcctcccagtggtgtttatcacctatgaaccataacccataataggataacaataaactaattcatatgcactaatcccaatgtaacacaaactaacaagattgatggccttaaagtaacgaagtatttaagcaagttacagtactgaaataaaaagcaataagcaatgctactaggtggacataactatcatcctgtatatatgtgagcaagtgtccaacctaaggaatattccaattagactacaaagatttgagtcagtgatatcaaacttcaaacctcccttaattattacatttctcatgttcctagaatgcaaatgagagaaccaaaaaaaagcttgcatgcaaattacagcaaagagagagatagagagagagacagacacacacacacacacatagagacagagagagagagagagagagagtcaggtgttaatccatgccaactgttccaaacgaaaagagtcagcagcagaggctcaaagggcggtggtggctggcactatggtttgagagataagcgtgcagtgatgtgcagtagccctggcggtgggaagtggtggacagctggatattgggctgcctcttttcctttatttttttctctcttgcatttataaatagcaccataatttattcaacgaccaaggctcattggcacggatttatttgggttgcctccggtatcccaggctatcatcacaaagaatactactctagtttgacccaaagttttagccacccataacccaaatccctcaaacccattcctcaacccaggttcctggtgctggtggctttgatctatctgctctgcgaactgtagttgcgcaataatctatttaactcacgagatatgcaaagagaagtgcaatattgatagtcccccaaaaacacgaaagttacaaatacaaacatcatgtctagtcccatttcacaatcatgcatataaaatgtaaataacccgataaaacaggaactttcttataaaaagaagtatactgacctactaataataacaaagtaggatatctctacacagatgtagggtagatagcacatataaagtcacatggttctatcaaattagaacttacatctgtttagttccatagaagtacaccagtatcttctttttaacagacgtctggccccactgctctggctcacttatctgcaacattatacaaattcatgggatattaagatgatttcttagtatgtaatctccatgttcattcaaactgatgtgcaagacttaaaataggcactaacaagcctataatagagcagttccacacttccacaggagttatcctttaaccaaaagtaaaccattgtgtggtgacacagcaaaagatcagatcaatacaataaatactatatgcaaagacttgcacggatgttgatgtgattgtcctaagttacatctaattcagaacttagcagcaaagaatgccagatatgatgtgaaacgcaatgttccttgctaatccttgtcctttttttaaaaatgaatccttgttcttttgttgtaatgaaaggacaaatacatcactaaacactgcactgctattcaatacatgtatgtagcctagcccttcataggcctaaacctaataacaaatttagaatttgcaccatgtatatatcgcgcttaaccctaccaatcctggaagaattaattaagcaaaacctacaacaaaagaatcttttaaaaaatagccaaatgttgaaaaggatcgtggctcaaaataaaatcaatcagtgatagatcaaacgaggagaataggagagtaaaggtctactaaatcaaatgctatctgcacatttacgcatcttacaaagtgtatagaatattgctcccattttgcatattagaaaggtcagccttaagtcctcaagcatactaaaccacctcccaatatgagaaaagggtagtctgttcatgccagcctacctgtgtatggtccaaactaaaatcaaattcaacatgcaaggaaatatgtagtgttgtttccctttgctgatgtgcacacaaactaagaaaagcaaacagatagcctatcattttggtttctggtgttcaggcactatgtaagaaaagttagataacaattttaagagaagaaagagtacgattatgattaagtagtgcttttcctaaatagtaaaaggaaacatctcttcattcccaatgaaataatcagaaaatcctcattgaaacttaccgaaggtaactaactattaactcgatgacaaataattaagaataaaagatagaatcacatctgtaaccaacgaatagagtgcaggtaacatgatatcaccctgttcatcctaatcccaagaccatccatgccctaaatcgccggcaacgtcaaatctcagcaataaagcagcagctaaacctagaaattaacaggaaccggggcgaactagatcatatttacagtacaaattatcagttaatctgaagagctcagcaggaagtggcacgaagaaggcttgtttcggtcgaagatccaatctttcttaagtacatgtacctgaaacccccacatacaccaaatcgcagtgacaagcatccgcaaaaccacgaagctagcacggattaacagctaaaatagccgaatcggggtagggagaccatccaagaacctaagatttatcaagaatggacatgccgcgtcccaaaacctggcctcgcacgcccccaaacgaaaccctaacctgctactccccagaatcccctaaccccaaggcaccccccctaagcaaagtatacggccatagatcagagagaagaagagcaagcagccgcgaagcatgctagcctaagaactcaccatggccggccacgccgggaagcccttcatcttagcgagcacgaggtcccccaccttccactgcgccgcggccgccgccgccgccgccgccgccgccgcagcagcagcagcagcagccgcgcgcttcttcctcgccggcgccatatccgccaccacccaaccgtctccaccacaccccccgccgcccaaaccaccggcgatcagcaacccacggggggaggaggaggcgcgcccccaccaccaacgacgacggctaagctaccgccctacgccgccccgcgaggcggccgcgccacaagaggcagcggcgggggcacccggctgccgtcctcctcctcctcctcctctcctcgggctccgcggcggcgatggcggcggcggcatgggagggggagggctgtggcttcgacttggggatttttttttccacttttgtttttctttttttcctccgagttttattcgtgggctttttttttctttctcttggctgctctctctctgcgaagaagagaagagaagggaggagaagagggagggtggggtggcgcagcgtgtgaggtgggtgggtgggtagttcggcggaagaggaagagggagagcgtgggaagggtgaagtgggggtgggggagtggcggtgcgcgtgacgaagaggaagaaagggggttatgtggatggagtggcttgccgccgcttgccatctgcctctgcctgccatttcccattatttcctttttttctcataaaaaattgctgttcttgttaggaggataatagtatctatttgttttgttgcatgtaagtaaattttgcttaaaattcacttaaatttttatacatgcagtatttgtttactatataaattttgttcgtgtagctatttgaaatatcaatatgcgtgctgtccaaatgcactacttggcttatgagcctagttcctcgaggaaatatgggttgttgggttatgtgggatctagagcatatggcacgagtagaaaatgtggagagagattatcatgctcgttagatgtaaacttttgcaggcggtaatttgtatagggaatttgattttctagatgtattttgtgtgcatattatgcacccaaaattgccaatttgttccctttcggataagaattgagatatctcatattctaataaactgattcatattcacaagtgttcaattaatatatcttttatccctatatataatgtgagaaatcaactgctatattaaatttactgctccgtttcctttcaaaaaaaaattactgctccatttggcaaaacaattgtatgatatttgaattattttaagtttatgaagtgtgtatttgatcataattttatattagggagaatagccattatggtccctgaagtttcgctatgagatcattttagtccctgaccattgtccaagcaaacccttaaactttatcatatggacatatatagtcattggcccatcaaaaattgccatgtgggcatgccatgtcatctttcgatacaaatatatgataaaatgcccaatttgcccttacacatatcatagggaaaaaggagagaaagatgaggtaggtgatatttgattgtctctgattatactatattttaagtatttgtggtccaccgaaaatgagacaatcaaatacagtcaagcagtttcagttccactaaaaatgggagcggagctgggtgaagctctctcacaaaataaactagagatgtgtagctggatttagacaactctacaactccactccaaacacaactcctggagctaaatttaggagttagagatgtaccaaatatgcccttaacattgaaatgcaattacgtacatagaaattatttggcatggtaattatatatttagtggctgtagctaatttaactttgtattagcataatccagtgaaaaaagtttgtcatatatccatagtcacattggacaaagttcgtaaatcattttcattatttttgtatggtatatggaagtgtaaattggacatttcgcgacatattttgcatgagaggataacatgacatgttcacgtggcgatttaagtgagcccaaggactatattagcctacatgacaaattataaggactcgtttagacaatatgaatggtcagggaccaaattgatcctggagcaaaacttcaaggatcatgttggctattctccttttatattacatgaagtttacagtaatacatttataagaatatgaaatgatttttgtgccaaatatgttacagtaatgtatctttgtttagttttttggtcattgggatattggaacttatttgccaaaattatacaatatcttttagtatttgattgtctcatttgcattctacgggaggtagtttacggaggaaaacttgagactttctggatattttatttgcaaattccacaccaaaaattgacatgatgtttccttttggacaagaaatgagacatcctatattttaataaattgctaatgtgcaaatattcactttaatttatcttcgtgcatctacataatgtgggcttagccatgagattaaattcactacttcctttgggggagaaaacaatgtttgaattatattaagtcttcatgaatttgaccataatattttttttatattacagtaagtttataataataaagttataagaatatgaacctattttttgggctcaatgagtacctagtactaatggtaacgaaatggattaatggaatggttaagttgatgataagaagtgggagggaagccctaagaggagaggccaaaagcgagtgtttttctctttgtttttatcatatattgatagcaatagttataatctatctattatattataaagatagctcgaaaagaagacactatatttctaaattttatctaggaaaagataataaaatatatgtcgttatatcatggtgagaccaaataaataacactgtatactgatagcaatagttatataaaaagtacaattgcatatgtaggaatagagaataagagttgtatattaaaatataattctatatatgaaaatataagctaagaattgtgtaccgaatccaattgaactagtctgcacaaaagaagtgttgggaatcctctaattatgacaataaagattccacgcatcctatcttactataaagttatcttccattgactccttaagcctaacatgcaaagatgccacatcatcatccactaacaagatgccacatcatccattaacaaaatgccacatcatcatccactaacaatcatcacatttaaacattatgcaaacatgctatatctttatagtttttataatttaagagcttttcaaatacaaacatgttaagttatcatccaacataattcacataatgtttcaatgtatatctttattatgttttatgatatcctatatacttatatagattatcctcacttagttagtgctcctatcttactataaagttatccctcactaactccttaagcttaacatgcaaatatgccacatcatcatccactaataagatgctacatcatcattcactaattaacaagatgtcacatcatcatccactaacaataatcacatttaaacatcatgcaaacatgctatatctttatagtttttataatttaagagctttttaaatacaaacatgttaaattatcattcaacataattcacataatatttcaatgtatatctttattatgttttatgatatcccatatacttatatagtttatcctcacttagttagtgcttatatgattaatctatggtccaaatagaattatctttctccttttttcctcaaattaagtcatatcacatcaattgtttttagccttttagatgattaatctatagtccaaactatctccctacttttcttcttctataaagtcataccaccttactttttacgtttgattcactattctacatactatttaaatttaaattattataaaccacattaatttacttaatatgatattatctagctatcttacatgttattttttttattgttatcatactaaattcccgcagcaatgcgcggggtttcacctagtaacaagaatgcttgttcacaaagaataacattatccctaactggttgataaagattttagtagtataatatgtgaaggaaaaatcaatagattgatattacctctttaaaatattcattccttagtgaattaagtctttgtcatgatcagggtccctcttaccgttttcggcgcggttaccggaccacgcgtgtcggtgatatgggaccgggagtatcatgaccagaggcttgaggcagacgcaatcgcccacgtggcctggcaccttcggggacgtcgggcccgagggtgaggtgtccgccctcctcctgatttcccccgaggggggggggtcgggttgcgtttgctccggccccgagggccggggcacccccgaccccttaaagaagtctgcgccacgtatatgggataagtgagcacagctgtgctcacctaacagcatttattgcagtctggtcaagcgtgtcacgctgcatgcaacgcagtacagcacgctcttttatccggtctgtgaccggtcacagaccggtcagatcaagggtcaggtggcgactggcggtctgacgcacgccttgccccatcccgtcaagacgaaagcctctaggcactcgtctcaagccggagctagcgtgttatttcttagagatggcacgttagccctggttaaatgaataccaggcttcatcctaaccattacaggcaaggcgttacacgaagaagggcaaacatgcacgttgttaaaccgacgcgtggtggacaagaatgaccggtctgacactggtcgcatcagcaacgggcagccacgatcccacgttgcacctgtctccgtcgggagtggaggcaggtatgggctgtcccatcaaagtgtcatttggacggcaaccataccgatctccgtccataaagagaagaaaagtccagtttggaaagggaagggtgcatgtggtatccccttgaagtataaaaggaggaccttgcccatttagaaaggggttggttggttggttgattttttcccggattgagagctgagaacgggggagaagtcagctgacactttgtgactcgttcatacacagatccaccaaaacacaggagtagggtattacgcttcgcagcggcccgaacctgtatacatcgccgtgtctcgtgtttcttccgggcagacgatctttacacatacagagagagagagagcttgagatctcaccctaagcccccggccgaatcagcaaaggggggcctgcgcggtctcccggtgaggggccacgagctccgtcatctggcgcgccaggtagggggctcagcgtgtgttttctgagctctcagactcttccgtgggagccaagtttttcttgttcagcctaatggccgagcaaggagaagcgcacgacctctctccgagtgtgagcggcgacgacggggagccgaatccacgccgtcgagctcgtactcccccacctcctccgcgccaaagccctaagcagggggaggcgcttgagaaggtcgacaagtccatggcatcaccagttgcgggtggtgcaggaggacggcaagatggggagcgccgcctcctcgtctacggcgacggcagcacgcctcagggtgcgcttcaggctgctggcgcgctcttacgacacccacctgtcgtccatgacccggagtctccagcccaacgatggctggaagatgtggccaacttggtcatgacggctcagcagcgcttgggtgctggtggacggtccgccaccaccaagacctccggcgccgccaccaccggttccgtgtcatcaaggcggagggcgcggcgagcggcggcggctgcacgtcattcggctgctactccctcgtcgacgccttcgactcgggaggatcagcatggggagccggatgcccgcctcaacatcgagcgccggcgtaatagccggcgtaccccccgtgcaacggagggtgcctcctcgtccagagtgtcacctcgacatggacgtgaagatcagccctccgtgcctccggctggtggtgttggctgtagagcctttgtggcgagtcttcggaatgtccgttggcccccaaggttccggcccgccatcaccgagaagtacgatgggagcgtcaaccccaccgagtttctccaggtctatacgaccgggatcgaggccgctgggggtgacgacagggtcatggcgaacttctttcccatggccctaaaaggacaggcgcggggttggctaatgaacctgccacccgcgtcggtccactcctgggaagatttgtgccaacagttcaccatgaacttccaaggcacatatccgcgcccaggcgaagaagcggacttgcatgcagtacagcgaggcgatgatgagtcgcttcgctcgtacattcagcggttttgccaagtccgcaatactataccatgcatccctgcacacgcggtgatttacgcgttcagggggggtgtgcggcacaaccgcatgctcgaaaagattgcctccaaagagccccagactaccgcggaactttttcagctcgcggaccgagtggctcgtaaggaggaagcgtggacatggaactcctccggttccggagtggcagcttcggccgcccccggatccaccgctcagacagggcggcgtgacaggaggaggaagaagaggtcggaccgttccggcgacgagggtcatgtcctcgccgtcgagggcactccgcgggccacccgaaaggggaggcctgcgagcgacaaaaagaaagaggctggtactcccagcagggagcgtcccgccggcaggtggtgctccgtccacaacacctccctccacgatctcgcggactgtcgcgcagtcaaaattttggctgagcgaacgaggaagtgggaggaggacaggaggcaggaacgccgtgagggcaagtccccggcggttccttccggcaaacggcgaagtgaggccaagcagaaggcccccgctgttgacatcgatgatggtgatgatgacctaggtttccaagaacctggggccaccattgccaccgtcgatggaggagcgtgtgctcacgtctctcgccggagcttcaaggctatgaagcgagagcttctgaccatggcccctactcatgaggcgatgcgtcgggcgcggtggtcggaggtcgctctcactttcgaccagaccgaccacccaccgtgcgttgcccggggagggcaggttgcgatggtggtttcccccaccatctgcaatgtgaagttggggcgtgtcctcatagatggaggagcggctctcaacattctttcccccgcggcctttgatgctatcaaggccccggggatggtgctccagccgtctcaaccgatcatcggtgtgacgccggggcacacgtggccattaggtcacatcgacctaccggtcaccttcggtggacccgccaacttccgcacggagcgggtaagcttcgatgtggcggacctcagtctgccctacaacgcggtcctcgggaggcccgcgttggtgaagttcatggcggcggtccattatgcctacctccagatgaagatgccgggccctggtggccccatctctgtccgtggcgaccttaaagtcgcgcttgcttgcatggagcagcgcgcggaccacctcgctgccgcgaccaagcccgagggtggtgacgagaggcttggcacctctgcccccaccgccccgaggcagcggatcgccacatgcgacgaggtcccggtcaaggaggttgccttgggcgacggcccatccaagaccacacggatcggtggtcttctggatggcaaataggaagacgcgctcgtctccttcctgcgggcaaacgctgacgtcttcgcatggagaccagcggacatgcccggggtccccagggaggtgattgagcaccgtctcgccgtgcggccgggcgcaaggccggtccggcagaaagtgcggcggcaggccccggaacgtcaagccttcatccgcgaggaggtggcgaggcttctggaggccggattcatccgtgaagtcatccatccggagtggctggcgaacccggtggtcgttcccaaggcgaacggcaagcttcggatgtgcatcgactacaccgaccttaacaaggcatgtcctaaggatccttaccccctgtctcgcatagatcagatcgtcgactccactgcggggtgcgaccttttgtgttttctagatgcatactctggttatcatcagattcgcatggctagggaggatgaggaaaaaactgcgttcattacccccgtaggaacctattgttatacatcaatgcccttcgggttaaagaatgcaggtcctacttttcagcgtactactcgaatttctttgggtagccaaataggacgtaatgttgaggcgtatgtcgatgacttggttgtaaaaacgcgcaaccaagaaactttactttcagatctagcggaaacttttgagaacctccgctccgcccgcataaagctgaaccccgataagtgtgtgtttggtgtacctgcgggcaagcttctcgggttcttggtctctgcccgaggcattgaggccaaccccgagaagattcgagctatcgagcggatgcgcccccctagcaaacttagggatgtgcaatgcgtcaccggttgcatggccgccctaagtcgtttcatatcaaggctgggagagaaggcgctacccttgtttaagctcctcaagcgctcggggccgttcacttggacggaggaagctgaaaatgccctcgcccagttgaaggcgtatctcagctctcctccggttctagtcgccccggagccaaatgagtccctgctactttacttagcagcgaccccccaagtagttagtgcagcgttggttgtggagcgcgatgaggacaatcctcattctgcgcacccccactctgtgccgacttggcccaggagcaggcagggaggagaggcccccgagtcaaacggtggcctaaggcccctgacgaccggagacggccctctgcccgcttgtcaaacggtgctgggtgtccccgaccctcaggaaggccccgaggccactgcgggaaggccgcacttaacgccctttgaccccgaggctaaccctgtgctgagccgacccgggaaagagcagggagaagaggcccccgagccgaacggaggccagaggcccctgacgaccggagttggccctttgcccgcttgtccgacgatgccaggagcccccgacccccaggacggccccgaggccactgtgggaaggccgctcctgtcgtcctccgaccccgaggtcatcggcacagaagacgagtgcgccccaaggggccacttggacgaagaacgccccgggggtacggcccctagcaaagaggatcggccccaccgaagggtgcagcggcctgtctactttgttagtgaggccctccgggacgccaagacccgatacccacaggcccagaagatgctttatgctattctgatggcctcgaggaaactgcgccattatttccaggcgcatcgggtcactgtggttacgtcttaccccctcggtcaaatcttgcataatcgagagggtacagggcgagtggtaaaatgggcaatcgagctttctgagttcgatctgcactttgaaccacgccacgctatcaagagccaggccctcgccgattttgtggcagagtggaccccggctccagagaccgtctcaatgcccgaggccagtgcgaacccctcacagctgcctcatgccgcccactgggtgatgcaattcgacggttctctgtctcttcagggcgccggtgcaggggtcacgttgacctctccaaacggagacgtcctcagatacttggtccgtctcgactttcgagcgactaataatatggcagagtacgagggactccttgccgggctcagggtggcagccgggctggggatccgccgcctcctggtgttaggcgactctcagctggttgttaaccaagtctgtaaggagtaccggtgctccgacccgcagatggacgcctacgtgcgccaagtacggcgtatggagcgccattttgacgggatagagcttcggcatgtgcccagacgggataatgtgattgccgacgaactctcacggctcgcgtcctcgcgagcccagaccccaccgggcgcctttgaagaaaggcttacccagccgtcggcgcgacccgaccccttaggggagacggatgcgcctgaccggcccccgaggcccgtcggagtcaaggcctcgggacccgaagggagcgctccaagctcccttagattgattgcttggatctctgagatccaaacatacctcacagataagactctacctgaggaccgcgaagggagtgaacgcgtacaacgcatttccaaacgctatgtgctggtagaagggaccctctatcggcgcgcggctaacggaatcctcctgaagtgcattcctcaggaacaaggcgttgagcttcttgcagacatccatgagggcgagtgcggagcccattccgcctcgcgtaccctggttggcaaggcctttcgtcaaggattttattggccgacagctctcaatgacgcagtcgatctggtccggcgatgcagagcgtgtcagttccacgccaagcaaattcatcagccggcccaggccctgcagatcataccactgtcatggccatttgctgtctgggggcttgatatcctgggaccgttcaaacgggccccgggcgggtttgagtatatgtatgttgcgatcgacaagttcactaagtggcccgaggcttatccggttgtcaagatcgataagcactctgctcttaaatttattaagggcatcacggcccgttttggagtgcctaaccgtattattacggataatggcacccaattcactagtgaactcttcggcgactactgcgaaaacatgggcatcaagctctgcttcgcctcacctgcccaccccagaagcaatggccaagtggagcgcgccaatgcagaaatccttaaaggcctcaaaaccaagaccttcaacattctcaagaagcacggcgattcatggatcgaggagttgccagcggtgctctgggcgaaccgaaccacaccaagccgagcgaccggggaaacgcctttcttcctcgtctacggcgcagaagcggttctcccatctgagctcaccctgaggtctcctcgggccaccatgtactgcgaggctgatcaagatcagcttcgtagagatgacctcgactacttggaagagcgaaggcggcgcgcggccctccgagctgcgcgctaccagcagagcttgcggcgctaccatcagcgccacgtccgggcccgatcactctgcgtcgacgacctcgtcttacgccgcgtccaaacgcgtgctggattgagcaaactctcaccaatgtgggagggtccgtatcgagtgatcggtgtcccccggccgggctcggtacggctggccacgggcgacggcacggagctgccaaacccgtggaacattgaacaccttcgtcgcttctacccctgaaggggggggtcgggtgtcaggttttggctcgggctaaccccacacccccctcgggtgtgccgggttagccgggggctaccacacatgcacatatattcctttttcctttatttcagcatttcaatagaagcagtttcaattttctaaaggttgtgtctgagccgttttttccttttgaggaatcttgacttgaaataatgtcattcgtgctcaaccccaccctcgggggctcggttcggtcagctaaaatcgccaaacggggcccagaaccgagccgtgccccggggcgtggtgaactccgggggggaatcggcaaaaacccacaatcgggtcacccatacccctcggtcaccacgttcccggcctggccagtctcgacatgtggatctccccaggcactggccccgacccgagccattcgaggactgggacttgggcacgagcccttatttcaagctaaggcgcaaaaggaccatggcacagatcatcctcatcgcatatgtatagcaaaataaaactaacacaaaaattttttcatcatttcgtttctgattgcagattgagttaatttatacaaaaaagaggcatgaaggccttagaagaaagaaaaagaaaaaaagtaaagattggcgggggctcgggggctcattccgatgcgcccgggtagccggcctcgtcgccaccgtcatcctcaccgctggcgtcgccctcctcgtcggagctggagacgaacgcgagccgaggggccgacccctcgaagccgttgacgatgtggtcggcagcatccccgacccgcgcgcgcgcgtcgtcctcggtcccgggagggaactcctccagcgccatccagggagagaaatcggggtcccgggcctggtaactcgctagcacgagttcgaccgccccccgggcgaggtccctcgaggatgacttgatggtcttctcgagctcctcggggagtcgttcgaggacccaggccatcctgttgaggtgcggagcgaggccttccaggttgcaagggcgcgtcctcgtctggcctttccagaggcccgcttgccgaccggcgcgatccatgcgggagaccgagtcccaaagcatgtcgggccccatctcgcccgccaagcggagggcctcggcctccccgatggaagaatccagcgcgcgctgcatgtcagcgacggtgtgttcggcagccgcgaggcgagcggctaagtcgctttcgcccgcagccgccccaccgatgcgcgccctcgcggccagctctttctcccgtgcctcgaggttggcagcccgctgctccagcgcggctctctcggcacggacgcattcaaggttgcggcgcgcctgctcctcttgcgccgcctcgcggagggagaggctgttcgccagccgttgcgtcgtggcctcggcctcctcgagagctcgctcccgctcagcgagtacatcctcgcgaaggcggagcgcggactcctcctcggcgcaggcggcctcgtgcgccgccagcgtcgtctcccggagagcagtggcggcctcgcggtccgtgaagcccttctccacggtgccggcgtgttcttccagcgccatggcacgggcctcaagggcctcctcgcgccgccgggacgccgcttcggcttccgttgcccgccgctctcgggcagcagcggagtcaagaaccccttgggcggcgtcgagcttgttcttcagctccgcctcccagctcccgtgttgaaggcggagggagtcctgcgcctcaatcatcgcggtggtggcgacaagggcggctctcgctccttcttcacctctcgggcgatctccgccagcgccgcttgcgggcttcaagctccgagatgtg

SEQ ID NO: 7081 - DNA, 37409 bp, Oryza sativa
ttcgctccctcgtatctcgctatctcgctccctcgtttcccgtgcccacgcttccactaatcccattcgcccgcttacggcgcatgaagtggatatgcggttgtggcaatcgaaatggattgtatcgtgcgcgcgttaattaccctcgccgtccgaagcggcgttaccgtatctccaggcgagacaaatctgctcacccagattcgcgcgctgctcaagtggtgtggcagtcttgaatagaccgcccattatggacaaccaaagttatcaataccaatgtgcatggattgagaccgttgggcattttgcccaactacggagaccggtcccacctgtcaccaggctttaggggtggcgtcacacttgaccgcttcccttgggaaaggaaattgctctggcataacgccgggggctactgtcggtgatatgggaccgggagtatcatgaccagaggcttgaggcagacgcaatcgcccacgtggcctggcaccttcggggacgttgggcccgagggtgaggtgtccgccctcctcgtgatttcccctgaggggggggtcgggttgcgcttgctccggccccgagggccggggcacccccgaccccttaaagaagtctgcgccacatatatgggataagtgagcacagctgtgctcacctaacagcatttattgcagtctggtcaagcgtgtcacgctgcgtgcaacgcagtacagcacgctcttttatccggtctgtgaccagtcacagaccggtcagatcaagggttaggtggcgactggcggtctgacgcacgcctcgccccatcccgtcaagacgaaagcctcaaggcaactcgtctcaagccggagctagcgtgttatctcttagagatggcacgttagccctggttagatttataccaggcttcatcctaatcattacaggcaaggtgttacacgaagaagggcaaacatgcacgttgttaaactgacgcgtggtggacaagaatgaccggtctgacactggtcgcatcagcaacgggcagccacgatctcacgttgcgcccgtctccgccgggagtggaggtaggtgtgagctgtcccatcgaagtgtcatttggacgacaaccataccaatctccgcccattaaagagaagaagaacagtccagtttggaaagggaagggtgcatgtggtatccccttgaagtataaaaggaggaccttgcccatagagaaagggttggttgattcttgccagatttagagcctagagcgggggagaagtgggctctcactttgtagctcattcatacacaaatccacaaaaacacaggagtagggtattacgcttggcagcggcccgaacctgtatacatcggccgtgtctcgtgtgtcttgccggcgagcatctttccacatacagagagagcttgagatcgcaccctaagcccccggccgaaccggcaaaggggggcctgcgcggtctcccggtgaggagccacgagctccgtcatctggcgcgccaggtaggggtctcagcgtgtgctttctgagctctcagactcttccgtgtgccccaagtttttcttgttcagcctaatggccgagcaaggaaaaacgcacgacatctcgccgagtgtgagcggcgacgacggggagccgaatccacgccgtcgagctcgtactcctccacctcctccgcgccaaagtcctaagcagggggaggcgcttgagagggtcgacaaatccgcggcgtcaccagccgcaggtgatgcaggagaacggcgagatggggagcgtcgcctcctcgtctacggcgacggcagcacgcctcagggcgcgcttcaggctgctggcgcgctcctacgacacccgcctgtcgtccatgacccggagtctccagcccaacgatggctggaagacgtggccaacttggtcatgacggctcagcagcgcttgggtgctggtggacggtccgccaccaccaagacctccggcgccgctaccaccggctccgtgtcgtcaaggcggagggcgcggcgagcggcggcggctgcacgtcattcggctgctactccctcgtcgacgccttcgactcgggaggatcagcatggggagccggatgcccgcctcaacatcgagcgccggcgtaatagccggcgtaccccccgtgcaacggagggtgcctcctcgtccagagtgtcacctcgacatggacgtgaggaccagccctccgtgcccccggctggtggtgttggctgtagagcctttgtggcgagtcttcggaatgtccgttggcccccaaggttccggcccaccatcaccgagaagtacgatgggagcgtcaaccccaccgagtttctccaggtctatacgaccgggatcgaggccgctgggggtgacgacagggtcatggcgaacttctttcccatggccctaaaaggacaggcgcggggttggctaatgaacctgccacccgcgtcggtccactcctgggaagatttgtgccaacagttcaccatgaacttccaaggcacatatccgcgcccaggcgaagaagcggacttgcatgcagtacagcgaggcgataatgagtcgcttcgctcgtacattcagcggttttgccaagtccgcaatactataccatgcatccctgcacacgcggtgatttacgcgttcagggggggtgtgcggcacaaccgcatgctcgaaaagattgcctccaaagagccccagactaccgcggaactttttcagctcgcggaccgagtggctcgtaaggaggaagcgtggacatggaactcctccggttccggagtggcagcttcggccgcccccggatccaccgctcagacagggcggcgtgacaggaggaggaagaagaggtcggaccgttccggcgacgagggtcatgtcctcgccgtcgagggcactccgcgggccacccgaaaggggaggcctgcgagcgacaaaaagaaagaggctggtactcccagcagggagcgtcccgccggcaggtggtgctccgtccacaacacctccctccacgatctcgcggactgtcgcgcagtcaaaattttggctgagcgaacgaggaagtgggaggaggacaggaggcaggaacgccgtgagggcaagtccccggcggttccttccggcaaacggcgaagtgaggccaagcagaaggcccccgctgttgacatcgatgatggtgatgatgacctaggtttccaagaacctggggccaccattgccaccgtcgatggaggagcgtgtgctcacgtctctcgccggagcttcaaggctatgaagcgagagcttctgaccatggcccctactcatgaggcgatgcgtcgggcgcggtggtcggaggtcgctctcactttcgaccagaccgaccacccaccgtgcattgcccggggagggcaggttgcgatggtggtttcccccaccatctgcaacgtgaagttgggacgtgtcctcatagatggaggagcggctctcaacattctttcccccgcggcctttgatgctatcaaggccccggggatggtgctccagccgtctcaaccgatcatcggtgtgacgccggggcacacgtggccattaggtcacatcgacctaccggtcaccttcggtggacccgccaacttccgcacggagcgggtaagcttcgatgtggcggacctcagtctgccctacaacgcggtcctcgggaggcccgcgttggtgaagttcatggcggcggtccattatgcctacctccagatgaagatgccgggccctggtggccccatctctgtccgtggcgaccttaaagtcgcgcttgcttgcatggagcagcgcgcggaccacctcgctgccgcgaccaagcccgagggtggtgacgagaggcttggcacctctgcccccaccgccccgaggcagcggatcgccacatgcgacgaggtcccggtcaaggaggttgccttgggcgacggcccatccaagaccacacggatcggtggtcttctggatggcaaataggaagacgcgctcgtctccttcctgcgggcaaacgctgacgtcttcgcatggagaccagcggacatgcccggggtccccagggaggtgattgagcaccgtctcgccgtgcggccgggcgcaaggccggtccggcagaaagtgcggcggcaggccccggaacgtcaagccttcatccgcgaggaggtggcgaggcttctggaggccggattcatccgtgaagtcatccatccggagtggctggcgaacccggtggtcgttcccaaggcgaacggcaagcttcggatgtgcatcgactacaccgaccttaacaaggcatgtcctaaggatccttaccccctgtctcgcatagatcagatcgtcgactccactgcggggtgcgaccttttgtgttttctagatgcatactctggttatcatcagattcgcatggctagggaggatgaggaaaaaactgcgttcattacccccgtaggaacctattgttatacatcaatgcccttcgggttaaagaatgcaggtcctacttttcagcgtactactcgaatttctttgggtagccaaataggacgtaatgttgaggcgtatgtcgatgacttggttgtaaaaacgcgcaaccaagaaactttactttcagatctagcggaaacttttgagaacctccgctccgcccgcataaagctgaaccccgataagtgtgtgtttggtgtacctgcgggcaagcttctcgggttcttggtctctgcccgaggcattgaggccaaccccgagaagattcgagctatcgagcggatgcgcccccctagcaaacttagggatgtgcaatgcgtcaccggttgcatggccgccctaagtcgtttcatatcaaggctgggagagaaggcgctacccttgtttaagctcctcaagcgctcggggccgttcacttggacggaggaagctgaaaatgccctcgcccagttgaaggcgtatctcagctctcctccggttctagtcgccccggagccaaatgagtccctgctactttacttagcagcgaccccccaagtagttagtgcagcgttggttgtggagcgcgatgaggacaatcctcattctgcgcacccccactctgtgccgacttggcccaggagcaggcagggaggagaggcccccgagtcaaacggtggcctaaggcccctgacgaccggagacggccctctgcccgcttgtcaaacggtgctgggtgtccccgaccctcaggaaggccccgaggccactgcgggaaggccgcacttaacgccctttgaccccgaggctaaccctgtgctgagccgacccgggaaagagcagggagaagaggcccccgagccgaacggaggccagaggcccctgacgaccggagttggccctttgcccgcttgtccgacgatgccaggagcccccgacccccaggacggccccgaggccactgtgggaaggccgctcctgtcgtcctccgaccccgaggtcatcggcacagaagacgagtgcgccccaaggggccacttggacgaagaacgccccgggggtacggcccctagcaaagaggatcggccccaccgaagggtgcagcggcctgtctactttgttagtgaggccctccgggacgccaagacccgatacccacaggcccagaagatgctttatgctattctgatggcctcgaggaaactgcgccattatttccaggcgcatcgggtcactgtggttacgtcttaccccctcggtcaaatcttgcataatcgagagggtacagggcgagtggtaaaatgggcaatcgagctttctgagttcgatctgcactttgaaccacgccacgctatcaagagccaggccctcgccgattttgtggcagagtggaccccggctccagagaccgtctcaatgcccgaggccagtgcgaacccctcacagctgcctcatgccgcccactgggtgatgcaattcgacggttctctgtctcttcagggcgccggtgcaggggtcacgttgacctctccaaacggagacgtcctcagatacttggtccgtctcgactttcgagcgactaataatatggcagagtacgagggactccttgccgggctcagggtggcagccgggctggggatccgccgcctcctggtgttaggcgactctcagctggttgttaaccaagtctgtaaggagtaccggtgctccgacccgcagatggacgcctacgtgcgccaagtacggcgtatggagcgccattttgacgggatagagcttcggcatgtgcccagacgggataatgtgattgccgacgaactctcacggctcgcgtcctcgcgagcccagaccccaccgggcgcctttgaagaaaggcttacccagccgtcggcgcgacccgaccccttaggggagacggatgcgcctgaccggcccccgaggcccgtcggagtccaggcctcgggacccgaagggagcgctccaagctcccttagattgattgcttggatctctgagatccaaacatacctcacagataagactctacctgaggaccgcgaagggagtgaacgcgtacaacgcatttccaaacgctatgtgctggtagaagggaccctctatcggcgcgcggctaacggaatcctcctgaagtgcattcctcaggaacaaggcgttgagcttcttgcagacatccatgagggcgagtgcggagcccattccgcctcgcgtaccctggttggcaaggcctttcgtcaaggattttattggccgacagctctcaatgacgcagtcgatctggtccggcgatgcagagcgtgtcagttccacgccaagcaaattcatcagccggcccaggccctgcagatcataccactgtcatggccatttgctgtctgggggcttgatatcctgggaccgttcaaacgggccccgggcgggtttgagtatatgtatgttgcgatcgacaagttcactaagtggcccgaggcttatccggttgtcaagatcgataagcactctgctcttaaatttattaagggcatcacggcccgttttggagtgcctaaccgtattattacggataatggcacccaattcactagtgaactcttcggcgactactgcgaaaacatgggcatcaagctctgcttcgcctcacctgcccaccccagaagcaatggccaagtggagcgcgccaatgcagaaatccttaaaggcctcaaaaccaagaccttcaacattctcaagaagcacggcgattcatggatcgaggagttgccagcggtgctctgggcgaaccgaaccacaccaagccgagcgaccggggaaacgcctttcttcctcgtctacggcgcagaagcggttctcccatctgagctcaccctgaggtctcctcgggccaccatgtactgcgaggctgatcaagatcagcttcgtagagatgacctcgactacttggaagagcgaaggcggcgcgcggccctccgagctgcgcgctaccagcagagcttgcggcgctaccatcagcgccacgtccgggcccgatcactctgcgtcgacgacctcgtcctacgccgcgtccaaacgcgtgctggattgagcaaactctcaccaatgtgggagggtccgtatcgagtgatcggtgtcccccggccgggctcggtacggctggccacgggcgacggcacggagctgccaaacccgtggaacattgaacaccttcgtcgcttctacccctgaaggggggggtcgggtgtcaggttttggctcgggctaaccccacacccccctcgggtgtgccgggttagccgggggctaccacacatgcacatatattcctttttcctttatttcagcatttcaatagaagcagtttcaattttctaaaggttgtgtctgagccgttttttccttttgaggaatcttgacttgaaataatgtcattcgtgctcaaccccaccctcgggggctcggttcggtcagctaaaatcgccaaacggggcccagaaccgagccgtgccccggggcgtggtgaactccgggggggaatcggcaaaaacccacaatcgggtcacccatacccctcggtcaccacgttcccggcctggccagtctcgacatgtggatctccccaggcactggccccgacccgagccattcgaggactgggacttgggcacgagcccttatttcaagctaaggcgcaaaaggaccatggcacagatcatcctcatcgcatatgtatagcaaaataaaactaacacaaaaattttttcatcatttcgtttctgattgcagattgagttaatttatacaaaaaagaggcatgaaggccttagaagaaagaaaaagaaaaaaagtaaagattggcgggggctcgggggctcattccgatgcgcccgggtagccggcctcgtcgccaccgtcatcctcaccgctggcgtcgccctcctcgtcggagctggagacgaacgcgagccgaggggccgacccctcgaagccgttgacgatgtggtcggcagcatccccgacccgcgcgcgcgcgtcgtcctcggtcccgggagggaactcctccagcgccatccagggagagaaatcggggtcccgggcctggtaactcgctagcacgagttcgaccgccccccgggcgaggtccctcgaggatgacttgatggtcttctcgagctcctcggggagtcgttcgaggacccaggccatcctgttgaggtgcggagcgaggccttccaggttgcaagggcgcgtcctcgtctggcctttccagaggcccgcttgccgaccggcgcgatccatgcgggagaccgagtcccaaagcatgtcgggccccatctcgcccgccaagcggagggcctcggcctccccgatggaagaatccagcgcgcgctgcatgtcagcgacggtgtgttcggcagccgcgaggcgagcggctaagtcgctttcgcccgcagccgccccaccgatgcgcgccctcgcggccagctctttctcccgtgcctcgaggttggcagcccgctgctccagcgcggctctctcggcacggacgcattcaaggttgcggcgcgcctgctcctcttgcgccgcctcgcggagggagaggctgttcgccagccgttgcgtcgtggcctcggcctcctcgagagctcgctcccgctcagcgagtacatcctcgcgaaggcggagcgcggactcctcctcggcgcaggcggcctcgtgcgccgccagcgtcgtctcccggagagcagtggcggcctcgcggtccgtgaagcccttctccacggtgccggcgtgttcttccagcgccatggcacgggcctcaagggcctcctcgcgccgccgggacgccgcttcggcttccgttgcccgccgctctcgggcagcagcggagtcaagaaccccttgggcggcgtcgagcttgttcttcagctccgcctcccagctcccgtgttgaaggcggagggagtcctgcgcctcaatcatcgcggtggtggcgacaagggcggcctctcgctcctcctccacctctcgggcgatctccgccagcgccgccttgcgggcttcaagctccgagatgtggcggcggtgggccttacggcccacctccaccatggcgtccaccgagcgccgcccctcctcaacacgcgcccatgcggcctcgagctccgctcgttctgcgcgcagggcctccacttgggtgttgaacccatccagcactgcggtgtttgcggcggccagggcctgcagaaggggctcggcgctcagcggggcgacagaagatgaggagaagagccgccttggagaaaaggcgacgcggcttggccccccggaggatgcgctgggctcggggatgtcccccgggcccgtttgatcctgggcgtcgcccggtgaggtaggcccaggcgatgcgcccgcggcctcgtcgcgagccgcctcggaggatgtcgcctgagggccgcccgagggagtgggcccaagtgacgcgccagcagcggctgacgcctcagcctggcgagcccgggcggcctcctcccgggcagcttcttcggcttggcgagcccgggcggcctcctcccgagcagcttcctccgcttggcgaacccgggcggcctcccgggcggcctcttcagcttcccgaaggcgggctgcggcttcacgccggtcagactctcgcctccgctcctctgcggccgctggatcttcggcctcggactggccggacttggggtggcgggaggaatgcgacgggacatcgctgaagcagaaaaaaaaagccagaagacgaacaaagtgagcaagaaaaaaacttctttttggagaaagatggttgcaatgagagtgagacgaacctgcgagggggtcggttgaatgaccaccttggaggggaaatcaggtttccccggcacggttccgtctcccccgtcttgcggagccgcttcttcttgcgcaccccctcgggctgcgacgtcggcgcggccccctccgggcgccgactgctggcacgcgccgccctgccccctcggggaggagatgggggaggtgtacctcccagcttcctcttcccctgggcgtcggcagggcggctgctccccgagcccccgacgcggggcccagaagcacgaccccctcctggggcaggttgttccctccggcgtcgctcgcccgcgccgtcgtggcccttaggggctctctcctctgaggccccgacccccaacataatggttagaatggagacgcggtcgggatctatgcagagggggaggatctcctgaggaaggcgagacgcctccgcggagctaagattcagcaccctttggactacgatcttgaagtcctcaggagcccaatcccatctggctccctggtgggtccgcatgtagtcttcaggcccagtgtactcccaggcgctccgggcgcgccgttggagcggcgcaatccgacgacggaggtaatcgccgaacaccatggccccggtgagcccctgggatcgcaggcccgccaggcggtcgaggacggcgtcgtactcctcccccagatctaccggcgcccgccagctggagacctgcgccgggggctggcttggaagtcggaggcgcgcttcgtcggcgaggggggtgtagaaccagtcgctcttccagtcgtcccacttcttgcggaggacgcaggggatgtagcggttcaacaccggcccccgcggctggaagtagcagccgccaaccaccgacggcggtgacaccgactgcacggtgaagaaccaccggaacagctgaagagaggggcgcaccccaatgaacatctcgcacaggtgtgcgaagatggccaatgtcatcaccgcattgggggtgaggtgcgccatctggagatcgtagaactccaggacatccatgaagaaatgagaaaatggcgggaccagcccagccattgcgaaggggaggaagaagatggaccgccccgggtagtctggtgccgggcgcccctcgcccagcatcactatctcccgaccggtggcggactccggcatgaagcggcgcggcagtccggcgtgcctctcgttcacgatgcgggaaggcggcagtacactgccgtcgagcagagcagagccccgtgccatggcggtggaggaagagatgattgggaacgagcgtgtgtggcgaaagtagggcgtagcagagaaagagttagagctcaggcggcgaaggcaagaggaacaatggcgaaaggaagggagcaaatccttttctcgatgcttttatacccttgcaatcgctgggcctggctcctcgtttctcgcgcccactacttcgctccctcgtatctcgctatctcgctccctcgtttcccgtgcccacgcttccactaatcccattcgcccgcttacggcgcatgaagtggatatgcggttgtggcaatcgaaatggattgtatcgtgcgcgcgttaattacgctcgccgtccgaagcggcgttaccgtatctccaggcgagacaaatctgctcacccagattcgcgcgctgctcaagtggtgtggcagtcttgaatagaccgcccattatggacaaccaaagttatcaataccaatgtgcatggattgagaccgttgggcattttgcccaactacggagaccggtcccacctgtcaccaggctttaggggtggcgtcacacttgaccgcttcccttgggaaaggaaattgctctggcataacgccgggggctactgtcggtgatatgggaccgggagtatcatgaccagaggcttgaggcagacgcaatcgcccacgtggcctggcaccttcggggacgttgggcccgagggtgaggtgtccgccctcctcgtgatttcccctgaggggggggtcgggttgcgcttgctccggccccgagggccggggcacccccgaccccttaaagaagtctgcgccacatatatgggataagtgagcacagctgtgctcacctaacagcatttattgcagtctggtcaagcgtgtcacgctgcgtgcaacgcagtacagcacgctcttttatccggtctgtgaccagtcacagaccggtcagatcaagggttaggtggcgactggcggtctgacgcacgcctcgccccatcccgtcaagacgaaagcctcaaggcaactcgtctcaagccggagctagcgtgttatctcttagagatggcacgttagccctggttagatttataccaggcttcatcctaatcattacaggcaaggtgttacacgaagaagggcaaacatgcacgttgttaaactgacgcgtggtggacaagaatgaccggtctgacactggtcgcatcagcaacgggcagccacgatctcacgttgcgcccgtctccgccgggagtggaggtaggtgtgagctgtcccatcgaagtgtcatttggacgacaaccataccaatctccgcccattaaagagaagaagaacagtccagtttggaaagggaagggtgcatgtggtatccccttgaagtataaaaggaggaccttgcccatagagaaagggttggttgattcttgccagatttagagcctagagcgggggagaagtgggctctcactttgtagctcattcatacacaaatccacaaaaacacaggagtagggtattacgcttggcagcggcccgaacctgtatacatcggccgtgtctcgtgtgtcttgccggcgagcatctttccacatacagagagagcttgagatcgcaccctaagcccccggccgaaccggcaaaggggggcctgcgcggtctcccggtgaggagccacgagctccgtcaatatgtaataaacactagcccaagatgcaattcactctttaaatagtttcataaaaaaaatcaaaacatcgtatatataatataatatgaaaaggagaatatatgtaattaacaagtaaaatcttttgtctactcccttcataaaaaagagtcgatctacgtagtgatgcgactccacctagaacaacgagtctaaacaatgaagtagatctttagactccaagagaggaagcaaacttagcgggagagttgatcgacgacgagcggcgagttgttgacggctgcagctaaccgccgccgccgtctgattcgccgacaagctgtgctgctgggcagcagctagcaaccgggatcagacactccctgaatcggattctccggaccagagtcagactcggattggcttctccggaccagcctcgaatcggacaacctgtagctgaatcgatcgcctacatacgtataccagtactactatatattttggtttacccccgtacgcacgtagagtcaattgatcaatatcgatcggcactatagcgagcgagagatcgatcgatcaagatgagtggatccgtgatgatgatgcagcggttggcgcgtcaagcggcagcacgcgtggtcacccagcatgccaggagcggcagcggcagtggcctcgcgggagcagttcgcggttacaacaacgtctcggcgtcgcacgcagctgctgctggtagtgccagtggttcagccaacaaacaggcggcaagggcgatggcgacgacggcatcgcggcagcggcaagtaacagaaacggtaatggcggcgtcgcagaataatgcagcaaggatacgcaagttagaggaggaggttatgttttacagatccttcgccgctttcctactcggtgcttacgtagcagccaaggtgatggaaaaagcgtaattatgtactactccatttgctattttttcgctcggtttcttcaattcgatttgctatcttaactgtacaagtgttaagatagggggtcaagggaccgactttaatttgtatagctacgctacagtacttgtggtaattagataatacgaaataatattaccccgtccattgtataaatccgtaatactaagacgacaggtaatctagcataagcatccataggctcgaaccgctccatccatttaattttcttgtagttgattgaagtggcattgctatgactgcatcaaatttgctccaccgttaaactataaaagatagctcatgaaactattgcatgagagccccctccttccatggccaaccccaccggccaagggggtatatctaccagggggacagcaagggttcaagccttctactaaagcaagaactatagaaacccccacaaagctcccactaatttattttgtcatacataaataagaagggaaagttgtagctctgtctagttcattcagatcccttgctatttattcctggatccattggctggccacacttcatgacagctgccactccagccccgtcatccacctctagcatcaactattgcttcagcctcgtcacccaatgtcacttgctccttacggcgccattaggctgtgttttgaggcgaaggttacgaactccaccaccccgcacatagaatagagcgatccattcgtatataattaattaaacattagcaaaaaaataatttgaaaatggattagatttcttttaaaaaatattgtttagaaatttagaaagcgtgcacacaggaaaaaagaggaagtataagttgaaaaaggtgagtgcccaattcagccttagtctaatttccatctagcgttcagccatggattccctttacctatgcgaggtggcaagagtctcccaactctggagcttccaaccagacctgttgaccaatctcatatgtccagtagtggttttgggttttgggttctttagacctatatcatctcgtcttgattcctagtaccgtctcgtaaagaagtcgaaggttctctatcatcctacctagcccaccatccatctctccccctccttaatcaagtgccactgcaacctatgttagtcatgtgctccgatccagctccaacatcgccgcctcctactgagcgcgcctcctttagtcactgcctctggcccctatctcactgcttggccatctcatccccacaccaacaacccatccctccatcggatctagaaactgtcatgacaaccaatccctcctgtcgagcacccgtgtgtgttgaccctcgccggtcctcggagtatgcatcctaaccacatccacttctaccagacagatttgtaatatttcgacgctttagaaattagaaattaggccttgattatttgacatcctaggcaaatcaatccacagcacaaggcataactctccatatagctccgcctacaaatcacctctaaataaagtaaaagaaaaggagtacatactctatggacttcactggagataactcatatgatacgtacctgttatctatatttttaaaagaagacgtcacaaggatcaatcgaggtcagggagcgtcttttttccttgttaatctgtggattcttgcacacgtacccttcatccttcgagttttggctatctcaagaagccgtagtgtactgcacgactcatctagtcatcttgtgtccgatattagttagcagaacacgagtgcacaacatcttaactaccacgcatccaaatttaaggagaaaaggtcgagtactcaggttaccatttatagggatgaaaacggtcggaaacgatcggaaaacagcctcaaccatttccgtaaccatatttttctcggaaatgaaatcggaaatggtaaattcggaaacgaaaacgatatcggaaatatcggaaaaccgaaaacggaacaatacggacggaaacatgtcggtacagatcggaaacaggtaacaaatacggatacattaaactataaaaacatatatttaactttacataagtatgttatatgtatacataaattcaagcttatactatataaattataaattaacttcattttagccatgtacaaaagttagagatttgattgaagagtcagtcaatatgtaagctgcgggtcaagtatagacatgctctataaatatcgacatatttagaatatggtaattaccatattataagaaacggtaatttccacaagaatacggtaaatacggaaacgatcggtataacagcaaaaccatttctgttttcatttccatattttttaccattttcatttttgtttcggtcgattaccatttccatatggctcggccggtagaaagtcgaaaacgaacgcccacccctaaccatttatgaggtatacgaatcactgaatagaacaggtcttgcgtgatcctacgaggtgtccacatccaagcaaaaaggttctaaaatagggttattaccaaaataagtgttactgaaatttaatttggcattgccaacagaatttgccgaccatttcgtttcgctaccaagatttggtaatgcttgtggtcaagccttcttggtatatatggcttacgtatatatggctgcttcttcgttaattattatctccattaatcttagaatattatgaccagatattgttcaaatttaaaatttggcatgttcttttagcaataaatttataaatgcttaactgttcggctggatgaggctgataagccatagaaaaataaataaagtaattaaaaataatttgtaggtaaatttttatatttatattattatagcgatttaaaagctggacttggaaaatagactacaataatagaatcccaaaatcaattctaagattaatttttgaaaatttaaattttgatcatgacggataaactacgtacccaccggacaatgagtgtacagtttgtttcatcatacacaaatacaaccaagaaacttccgtctcataatctaaccatttaaaagttatttcttttcgaagttaaaacatcaaagtcaatgtggagaaatgtttggaaacaaatgaagtaacccaagtaatagtagcctacgcaaccttggcgactattgagcacttttctggtactagcagagtaagcacggttattttgccacaatatatattagataaatgtaaaaagcataatgttattaatatttgggtatggctcgtattgacaaacagaatagaataacccaatattaattagattgttacgaggcagcagtttttgtgcttctaaaattttaattattacattcatacgaaaatgcgaatatcaagcgaactttatgcgtcactaacccacgtccttctgattttacgtgagaggaccagtttctacccagtactactatctttatattttaatatatggtattattgactttttagatatcgataattcgttttgtttttaaaaatatttaattggtatttattttgttgtgactttgatatatcaccgagactccgtgcaccgctatatatatggggcttcgtcgtccgcgcgctccgtgtccgcgcgttggtacaccgcagtacgtctcgtgggcacgcagcggcgtgtaccacccctgcaggtgcgcggcggcgtccaccggcgaggagatcaaggagcgttccggcgcgctcgtcctcgatcggtaccaatatatccatgccatcattcaagctgtttgcgtatatatccgctgattaatcattcgagctcaccaacgtacgtacggccggtgcgtggctgctgcagatgcagaggcgccgtgagggcgagcgcgccggcgcgcctcccccgtctcctccccgttggacgcccgcgccgcaccggccggcgtggtacgcgccgctgcgcttccacggagacgagacgacgagctcgcacgcacgtacgcgcgcggccgggtaagttgccaagatgaagccgcctcagcgcgcgtgcgcgcgcgcgcgctctccgcacgcccgcgccgcgcgccgacccgatggatcatgcaactgctagctgccggccggtgcgcgctcgggccggcttgttgaatcatgcaagagtggtggcgcctgctcgatctgctgctgcttgatttggctcggttagtttctgctgtatggatcgggcgatcgatacagcagaaaaccatctacaaatagctaggaagaaactccttttgacgcattatcctctcacatgagttactgatatgttggccaccagtagtgggttcacatatcagtaactcaaaatcagataatagtaagttagaggatttgtttctcttacccttcctctattttattgttgctgctatttccatcaagttaattggggctattagaccactgcaaactgatatgagaatatcttcctctgtatctcgtctcctactctcggttcgcagtccgttagagctcgtagtttgatctaatcgcaagccacaattactagtacatctttttttttcaagtttagaaaaaagaacaagtttaaattgaagttcgtcaagtgaatttaaatttcaaatttaatttatgaatcctatgataagaatctgaggttttaatgcctgaatcattaaaattcttagaattaaattgattttttaatcatgaaacccaaaattgaaacataaatcccgaagttcagatttttaaaatctagctgatagtcaaggacctcatcatatttcatatatatctacctgataataataatctaattaggagaacaaataaatgcccaaacatgaataaccataatggaaaaacagacagttaaaacagagggacgacgacgacgacgacgcgagcaacgacgtgacgccaacccaaactcagctcggtaatcaaccacgatcgagtagcttgcattcgcctcgccggcggcgacgtcgccgccggctagacaccgccgcagcggtaggtgatcttgcacgtccttccgaccctcaccacgtacgtgtgctgcggcttcaccaggaatggcggcagccgcatcagcgcgtcgcacacgcagtccttggacacctcctgcagccaccggcagcagtcgcggtacgccctcagctcctcgtcgtggtgctcgtcgtggtcgtgctcgtggtcgtcgtcgtcgtcatggtggtcatcgtcgtcgccgccgccgccttcgtcgtcgtcgtcaccgcgaagacggccgcgcctgccatggccgcggcgccgtccgcggcctccgccgcggccgccacggccggtgcggttgccgcggtggcccgcggtgtcgttcccggctacggcgggtgcgatctgcgtgctgccactgccgttgcccgccacgagcgccgagaggtcgaccacggcggcgtggccacggcgcccgcggtcgcggtggtggcggtggcggtggcgcacacggtggtgatccccgccgccgtggtcgtcgtcgtcaccaccaccaccgtggtcgtcgtcatcgtcgtggtcatcatcgtcgtcgtcgtcgtcgtcgtcatcatcgtcgtcgtcgtcgtcgtcgtcgtcgtcgtcgtgctcgtcggggggactaggcgggaggatggagcacgcctggctggcgatggcgaactggctgatgcagaaggccttggccttggactgcgccgcgacggccgcgaagagggaagggaggaggaagaggacggcggcgatcgccgccgcttgaagcgccgacgccgccatggccggctagctagctaagctatagtgtatagatagccgtggcctcactctctggctaagtgccactacttatatatatataaagacttaattgttttcaagtagttgggtaacgtaacttaaccaagatagagggggggggggggggggttgagaagagaagcatggttaaaattaggtgcttcataccagtggcatgcaatgggatacaaggctttgttcagccatgcccatggccatcctgttgacatgcacagatgcactcttggtgaagggttagtgacattttggttaatggttatgtgcaaagaaaaaaattgagtgaagtgcatggacggtgtttaaacttgcacagatgtgtcatctaggtatctagacactcaaaatacatttttgagtccccgaacttgttatgagtgtcatgtaggtctaaacggactccaacccgctccgtgagatgacgtggcatgccacggtgacacgtgttaatgggatccacatgtcattcgcataaaaaaataaaatttaaaaagaaaggagagagagatgagaaaaggatgtttttaattttgaaaaaataaatgaaaaaagagaggaaaaaattgttcttaattttttctatatatgattgacatataggttctactgacacatgtgccaccatggcatgccacatcagcacacggtgtgagttggagcccatttagacctatatgacaccctaaacaagttaaggggcccaaaaatgcattttgagagttcagggatctaggtgacacatctgcacaaatttagagaccgctcgtgcactttattaaaaaaaaaggtctttgtctacatgtatattgctttctataagatgcatgtatataagtatattgatgctgttatcatggcaatgttatcatggcaaatagacagtttatactacctcctcaaaaagacagtttatactacctcctcaaaatataagaaatttttactatgcatttgtgttgataaatttgcttatattttaagacggaagtgattttgactatcatttgtattgttaagattgcttactctttccgattttataattcttgatattttggacaataacagtctccagaatatatatttgactgtattttttctattataatatatacaataaataaatatatatttacttttattatagcactccctctatcccaatttgaatatcacctaagcaaacacacagagaccaaggacaacaaaaacttcactattatgaaattaatcatcatcagtcaaggtgctatgttgtttcgtgtctcatagattgcatcacgttttatatattgaatggagtttcaccaatcctatcttctatatagttggtacccattaaagggcatttactcctataaagtaagacatgcaagaagccacatcatcaacaattttaagccatcacatcatattagtataaagataacaaccgttggatcaagaagctacttattcttccaattcaatcatttattatttatccattcacctcattttgctctacttcatagtcacacatagcactgttacatattttatgcataacaccatgttttcctaatacaattcaaattattgtttaatatgtgtgttttgttttattatgcatgacaagatagcatataattattaggtatcgttacctgaatctatttttagaaaaaaaaaacttgagtgaagtagagagatgcaaattgtctaactacaacgatacccatatattacgcatgaaattcatatattataacaatgcacaatgacgcatggaaaaataaagcatgaattatattgtaataacataaggcatatataaatccacattatcatatagtttgtatgtatatagagttgtaccttaactatttaaaactatgattttgtttgatgataaactacaaaacccgcggcaaagatgtgggatgccaactagtataaattaatattggttgattgcatgtagcacattcaataatgctcatttactatttgcacaaataaacgaaaagacactttgttagaggatggtcatttaggaagaccttaaaaatcttatatgatgatcaataggggcggaactaggcctcgggcagctcgggccatggcctgaggcctatgatgcaatcccactatgaagtttgtttttccacggaataagtcaactttgactatctacatggaataagttaactttgactatctaaaaagtgaccctaatctaatccatgaccctaaaccgcaaaaccggatatctcgacccccgaacttttgaaactggtacaatttgactcccttaacggttttgctgacgtggcgcctacgtggcggtattgaccgggtcttttttacacgtgacattgacatggcgcttaagtggcattagaattaaaaaaataattcatttatcattcacacaaaggatggcatgcggaacccactgacatgtggggctcacatgtcatcctctctcctccctctctctctcccttccctcattcagcaagtctgccacaatcctcttcctggtggtaaccacgatcttactcccagctcgaccaaatctgaggggagctaacacatcagtccacatatccctgtacgaattctcattctcatctttattccagacattctcaagaatcagcaagaaccggcgcgacgagacattctcaaaaaaatgatagccgcgacggggatggtgtcagaagcggcgctccgatcctcgccttcggtcgtgctaccgactagccaagacaccaattattgctcatgccccttgtcacgcccaaacacctcagcatcctccagaatcgagccggtgatcaccggaccatccgaggttaggagggtgctgctcgactcgccggaccctggcttggtcagccccgccgcctgcatcagccgcccggagctcgcgcggatgtccttcagtttctggacgacggccttaagcctattgaccgactcgtccttgccaacgagctgcatgcttgccgatcttgccaatggatgaagatcctagtaggctgaccttgccgtcgttgcgggagaccgcagaagggcagcggcgggcaagcggagacggcggcgagcgggggagatgcgggcatggcggggagtgaagacggcggcatccggcggtggccgccatggaaagggcgaggtcggggatctccccgacaacgtccgccgccgccgccgccctcctacagctggatcaacggccgctgccaccgccgtcgccatggcgtgcaggccggcaattcggatcctttgcattagaggtactaatgcagaggatgaacagtaccgcacattaggggtactgtagaccgtccaatcgagaatggaaggatatcctgtagctatagtaaatagccactgtttatgtccttagatcgctgttcccctcacatggacagtgcttccctgcagtactgtaggcgatccggatccgcaggtcggccgtgtgctccgcctccgccctcgcgccgctgcctcctcccattgggagagaaagagaaagaagggagagagagaggaggaaaaatgaaggacacagggaggactgccatgtgggcaccacatgtcggtgggcccacatttctctttttgagtgactaatgaatcctatgcatattttttaattctaatgccacttaagcatcacgtcaacgccacgtgtaaagaagacccggtcaataccgccacgtaagtgccacatcagcaaaaccgccctccaaaaccgcctagagagttaaattgcaccggtttcaatagttcggggtcgagttatccggttttgcggtttagggttatggattagattcgggtcacttttaaagggtcaaagtgaacttattccgttttccaccatgtaattgatattggaaaaagtccatttagactcccttaattgttcaccgaatttaattcgtgacccttaactggaaaaccagataggatgactcctcgaattattggaaccagtgcaatttgactccttcagtggttttgaagggcggttttgcggacgtggcgctgacgtggcgataccaacccggtcttcattctacgtggcgctgacgtggcgatactaacccggtcttcattccgcgtggcgcctacatggcactagaattaaaatatatccgtggaacccatctatcattcacacataaaatatatcatgggacccaccgacatatggggccacatatcatcctttctccttcccttcttcctcctcgctccctccttctctctcttttctctccccttttctcttccccctcttcccccttgggacgcatcggcggcagcggcggccgggtggagtggcgatggatctgggcagcatggccgcggcccctcttctgggcgtcgatttcctcgccttgagtgataattaatactcccactagctgctactactacatcgctagcttagctaatgacgtcaccgagcaaccaagaacactaaattaccactaaattaaccaactaaacacaagctaattaagctagtgtcgtcgtcatgttgcctagctagctagctagctagctaattactacttcggtgagtggatggcgccatgccgccatggcggcgtggcagcagcacgtgtccatgtcagcgtcgtcgtcgctggtgacgagcgtgagcaactcgcgcaaggggagtcccgaccgtggtggtggccttccagagggtgtcggcgacggcgatgtcggcggcggagtgcaccggggcgatggcggcgccgtcgttgctggaagggagattcgggctgggcgggagctcgcggcggcggtcgagcctgaacgcgtttgacatcatctccttttctccggcaactccaacgccggcggcggaggtggagctttaccgccgcggcagccgcacccgacacccgaacttcccaccgccgccgtctcctcgctacaggatacgcgacagcagcgaccgcggcgactggcagctctcgatgccgccgcagcgctgctccgccctaccttcatgccggccttctccacccaccgccgcccacggcttcgcacactcccttgccactctccgctccgccatccgttgcctcggcaagctctccgcgctgctcgccgacgggaagagaaagagagagataagggagagagagggggaggaagaaaggttgggaagagaatgacatgtggactccacatattagtggatcctattataatttttgtgaataataaatgggtcccacatatatatttttaattataatcttacatcagcgtcacgtgggacgaagaccaagttaacactgccacatcagcgccacgtcagcaaaaccgcccttcaaaaccattgagggagtgaatttgtaccggttttagtaattgggggagtcgttctaaccggttttctggttgaggggtacgaattagattcgttgtacatttaagggagtcaaagtggactttttccattgatattcatagctcaagctataatgggctggcccaggtcgtggcccaattttgggtccgcccttgatgaatgatgatcaaggccggctccaattatggatccgccccctatgaaaactagaatagagaactttgtaaaataaatctatatttgttattctaatggctttaaactaaatatttttaaagttattgatagttgaagttataaaagtttgacaacaataatatccaaaacaccaagaattatgaaaccagggcggaggtagtaatcagcaacagcatcataatcacctaaataccgagctcatgtgcaactacttaacacggtggcacgatagtatcaagggagtatattttgccacaatataattgataaagtgtggcatgccacatattgtatggttatgaatgtgttagccacaattgtggtaaaaaaaatcattcaatgacaagaggactagtcttagttgatcaaacttttttgccacaagtttggctaaggttgacactaaaccaaacaggccaattcagtcattcagtgcacatctatgttggaaacactgtaaattcatcagccaagcttttgcattcataatgtccaaaactggttataaaccgtaactgttttattagcaattagaaaataatttatctaaaacttctatatgtgttcttaacaacttagaaatcaatgtaaaatgctatgttaaaaatatcttaaaaatcaacttcaaaattaggttttaaattttaaaatttggctttgctttagctttttagtgtaaccaatggggctggcgactcatttcaaactaaattcgcaacaaataatccatggctgatgtgagacaatatgtgaatagcctaacctttttgacaaagtacattacagcacaatttctagtgcaaatatggtaaaatttatctcgcaaaccattagcttctaaatatttacacaaacgcaggcgctgaaaaaagctaatgatgtgctccaggaacacaagcatgccttgttctgcagctatgccaggtgatatttacacaacaaaagaactgcggcaaaatgatttgtatttatttgtttatgtacgatgagaccaaacagtttcagtaaatcatttggggtagttgttgtcagaggggtaggagggtttcatgaatggacatgaacaatgagattctccgaagagaaatacaacattgttaggctaacaatacaacctatggctaaagattgatgcattgacagcctctattcctacaatacattgatctgccttccgcttctgcaatcctactatgctaagatacatatttacaaggaggaaggcaggtacttatctccctcctttttggtgggtcttcatgtgaaggaaccaaaccgatgaatcagaaagcatcaacgaaagcatctcgaagtgcccagctgacaaaagcatcgaccctgaaaagcagcatgtcagatgaatcagagaagaagataattgtggcatatggtggtaacaagaggaacggaacaaatggcgtaccattcacggatagcaaaaatgttatcttggtctccagctaccatgtgctgcgataaaagatgatgaattagtatcctgtaatctgatgcgacctgaagttactttctttggaacagcttgtgttattcttacacgtattatgccaagcatttcgtacagtacaaccaaaatatgtcatgaacttggacgaaatattgattaggactagtgtaggtaatattagaaaggaaacaaaatggtcccaagactttggtcacaacattaacaatgttattcctctctttcaagcttcccctcatgactttacagtttacactctagttctacagttaaggttgaaaagtttctaccatataaatgctccttacaggacaaatgcttatgaaactggattctttggacaaaccaatatctagtggtaagaggcaaatcaatgcaagttacattatgaagcaggacgaaagagcatgtaacatacctcctacatgtggaactggaggctccatagaatgtctggagggagaataattcgatgaccgaggaggcatagaccacccagagcaaggacctggtggaggatctgatggtcgtccgtagtgcactggtgctgctgacgatgcttcaaaatggtctggaccaggaggccctggacaataatcaagaacaaagaacatttagtctgctgtttttgagggtcctacagcatgggatagattaacttaattgggtaatcatatatctataaagttcatccccactaagtgtaattaatgctaattctctcttctctcatgaagccacatcacctcaattgtttttagcttttggatgattcatcaagggtttaaattgcatctcttccccccaaaaggcacactatacaacccaatcatttataacctatggataattgataaaggtaaaaaatacataaacatataaaaaaaatcgtatagtaggtactccctctgtccaaaaaaagacaaacctagggtttccgtgtccaacgtttgactgtccgtcttatatgaattttttttataattagtcttttcgttgttgttagatgataaaacatgattaatactttatgcgtgacttgtctttttaatttttttcatatttttttcaaataagacagacggtcaaacgttggatacagaaacccagggtttgtctttttttgggacggagggagtaagaatgaaaattttagaactcatatctactatattatcacacaattctcccgcagcaacgcgtggagtacccatctagttgtacaataacaattcatggctggtgtttctagggtgaccttacaggatgaaaactgtgccaggaaaaaagcgacaatgattcacgaaaaaagtacctggaggaaaaggaaatctgcccctgtcagcaacttcgtggtgcattggtcccctaatagctctctcatcaaaggaacgtcctctgtcatcaaaatggtgtcctctatcatcaaaataatgtcctctatcatcatagtgatatcctctatcatcatagtggtatcctctatcatcaaagtgatgtcgtctatcatgcccatgatgtcttctatcatgcctgtgatgatctcgatcatgtccatcataccgatatctctcaggataggatgaactattattactccaaggccgtggtctttgctgaggttctggtggtcgataggggcattggtttataggaggtggagggggtggtggttgcatatgatatccttcgttaggtaccgatgccattgggggttgatgatagttattcccatgatatggtgcaggaggtgcaggaaaattgccatggggtccaggcggattaagtggtgcaattgggggcggcggtggcatctgatttggatgccccccatatcctgaattacagaatggtggaggctgcaattgcgctacagaaggattcatactgcctgggcgttccacaacagaatttggctgttgcgtctgaatattctgcaaagaaaatgaatcattagtttctaaaataaaaatgcataaattccttcttgcacagaaagcaaatatgagcatacattggtagctcttgtaggatgcggaccaactggatcagatgccattggtaatgttcgctgcaactgtccagtctgagtaattggagcaggtggtggtggcggaacaggtggaggagatgatggcaatggcgggggcgatggaggcctatcatcagggaggggaggacctaaagtatgtcgatcagatgttctgcatttggtatcaatttgttctggccgacatctggtgctagcttcaacttcagatggtggagctacatcctccatctcaagctcgccatcaacttcttcaaggatgcgatgatgcttttctgcgggcatttgtgattcttccttctcatcagtgcaaggagcatcatgttcaggtgtaacagcttcaaaacttctatcttcagaggagcttccgtcctcatcttcaagtacttttgtggaaattaagtttggtagttgaaaaccagcattgctgcggaaaacaatggaacatacaaacatagggaaagaactggatgagatacatctatataattgaatatgtagaacatggagctatgaagtaatgaggacatattcatgcactgcatgcattaatgcatatcttgttttatttaaaatagctttgtctcacagataatatgaaaaaggacgcccactaaaattcacccccaatatttcaggaatgactcctttttctagttatttattcatggtgagttttatccaatattagctaattggatgttagcatcattcatatatcatagaacactgcttaactgaccaacaagactacctgaagaatacccatgctctaagaaaattactcaaaattgcagtgttccatcaaatctaccgtggctttgcctgcttctctacacttcgacacgtgatcccattttgtctgcacaattcatctagctatcgtttatgaacattacaatattatatgcatgccacactacttttcatacatcagtttgacaagcatacctgccatactcatcaacaagcattccttcgttgtcacgcaacgggtcatttaaagctctttctgtccttgaaggacggcgagaacttccaaaagatgcctcattgataacctcaagttctctaatatggtggcgaatgatgtactctgggagtgttttcctctcaaaccaaagcttcaaaacctgaagataaaatcacaaagtttttaagaggagaaaaggagaattgcacatgacaccagttctatcaaactgctgaaggtgcctgcctttagacattgccttcgattctcccatgccgaatttccaggaggtgcagcagcataaagtaatcgaggtagaactgcctggataagagacgggtaaacatctccagctccacctgcaaatttcttacagaatttaaaaaaatagagtgcaagcgaaatagacagaaaaagatcatgaaagctatatgttacctttctggttacgagagtattgagttattgaatccacaagaaagaaaaggtccactctcttatataaattcgactccttctccaagcgttcaacgataatatcaatcgcctaaataagaaaaaaaaatcaggaaaattgatatttggcaattggttgcatagaaaggtatgtaccctctttttattggtaatctaaaagcaccatgcatgtgtctgtagatgagatttcataatctaaaagaacatagaagtggtaaacaaagcaacatctaccagaattatcacaggttatttcgaagtccataagttgctgagatatgttgtcatatcacatcaaaagcatgtagcaactacgtattataagagatggtacacttcaatggtaaataagattgatccttgagaagcaacaataagttccagatgcctgatgatccatcacaaaaaagatggtagttggcacttggcacagagaacatagcactgtaattactaattagcctaggcaaatcaagaatctaacttccccgtccaccaacaaaacaaagaaagcaacaatgtttgctacatctataagcaagtaaatgatgatactacttaagaaagacacagtaaatgcatgataaatgaggatcacgtgccaaatagaaaactaggagtgacatgcatggacgcatggtctaacctctccagcaacgccatgtttggcacactcaattgcaagacgtgttgcacgcgctatattttcttttgttcttgtcagtgtaccaagaaaagatccaaaagcctttcgtgctgcattagcctcatcatgtcctgttaatttgctcaagttcttctgttgctgactatcaaaaggactcctagaatgaatattatcatttgtagatgtggatctgattatccggttcaaaggtgacaattgcttctgtgatccttccttgaaagcaggtgtatcaactacagtttcaggaatatacttggcattcagaaagttatctggaaaagaagttgatcgagagaaccttctagcttgtgcaacagcaataagttctttcataggcattgaatctggagaagtgctcttatcctttaggtttctatggttcagttcttttaatgccaaagctgagaaggtgtgcctgcaatacaacaataagtattgtcatgccttttcagaagaccatcttaaatcaactaatcaagtatcaaatttataaagtactaatccagagttgttataggagtaattcaaaggtacaatataaaccaaaaaagttgctattccaggcattctacatgaataggtcataagttcatcagactgtacgttgcaaaataagcattcctgctaagaaggttcaaaaggtgtagagctcaatgtatagatttcagacatgaaccataagaatgatgtttccattgggacctaaatattgctctccagtctccactggctagtaatgtcaggctccaaaaataggctctatagttaaagccaaaatagagcagacaaataaattagggacgtatggaggtagaaaacagtcccgattaattctccttaataaaggattgtgaaggaactgaaatatcccacaaaacatatattaggatccacaagcccataacatggaaagatttagaatctatatgatataactaaagacgttataatcagaatatttgaaaacccaagtatccagctcataaagcaacaaatctacacaagacaggagcattagaataataagatccttgttgatgagtaaaacaagataaccattcatgccatttatccagattccagagtgaatcaatttgcccaccttttttgttcagtcaactagattatgaagtgttacctatgtttaagacatacattgacccattattgagtctccaaagaaatgcattttgatggatgaaaacatcaggttgacattacaaggaaaagaatttcgtaggaaaagaaaaatcaaattgcatggatgcttcttcttcacaactttctgaagtttcaatcagaaaatgccagcataaatttggaaaagaagcatgcatgtcctaaatttgtcacaaaaaggttatgaacaagaagatatggagcatataatgataaacaaatatctcatgcagacataatggaagatacaatttggcatgaaagcttacacttcaaatgtccgggtgtctgcatcagattgtatactggaagatttagtggccagcgaagaggtgcttgctgtatcagccacattgactactgtttcagctacaacagtttcattatgcagtacagaatcactgatcgcattattgttagaagaaagcaactttggtcggtaaattggctcatcacatctttgaacacttctgtcagtatcatatgcaggacggtcaactggttttgggccttcattgaagttgattggtttggcaacctcgctaacactagctgtccccaaagatgaagataaacgatcaggtacagctacagtctgtgtaccaccaagagcagactcattcagcttcattgaaagagccaagcctttcccgcagtcgtcattgccaacttcactagagaccaacaagcaatcagtagttttgctatcaacgtgagtttcttcacaaatattgccttctgtaacatgactgtcatcttttgcttctgaaggaactgaagcagaagcaggaacactgttattttgcagaattgattctgaggagtgtgttttgcactttgggctatgcatggattctgtgcacaaagatggcctagggctttctgctattgcagatccgttagtggctgtgactactgcatctgcagatttattagagtggctgttttctgaagccacaaaaccatttggaatcaattgctttgaccctgtcacttcaggcagattattagtttcagcaacattagcggacatagcttctaaggcacgatgaagacgttttgatggaggcaaagcagcttcaacatccaatgttaaaacctttggttgatattctttgttcttccaagcagactgaccttcacctgaggggccaggcatgtataacttggatgattgatttgaaacagtatttgcaactcttcctgtcaaggaaacactatttaccactgctgactgatcgactgaacaatcatcaccaggtagtgcaactgtgttatgcatattacataggtctgcaagcatagcaagctctggtctgttattagtaacatcaatcccatcaactggtgagtcttccaactgaggccttcccattcgaacccttgcccttttgaccaatggcaagtgctcatctccatctgacttatttacttcagtctttggatttggagaatctgccgttttttcacttaactcagcctgaaattcatcatccttatccgtagaatgagaaaaaatatttctacttggctttctctttctcttgaaaataactgattttttcatgggaatgcttgatgcatcatgcgatttaaattgtgtctctaaagccccattttgagatgtttcactgtcgcaggtactatctaccttagtggtataattcagctttttattgttgttactggtgccaggtgtgccaggttgattgtcgatgcccgcacttgaatgcaaccaaacatcatcctgtgttgaaggggaacctgagttaccttttacatcctcaacatacacatgatgactggaaccttccttagtaccatcagcagccaaatcaactgaagccaaacaggttccacctgaaagcttgccagaatcctgagcttttcttgtgtcagtgttcagtgaacttcttgacctccgcagtgatgaaaccctactccgtgtgtagcaattttgaggctgtgcatcccttagcttctttgaaattgaactcgtagacaaagggatgtttctcatttcatcaaggatagacacattttcagtagggtcatcaggagcagaatttacaacacatcgctcacttccaactgcggtaacagaaggctcatcagaatcggccgtattatgaccacttgcaactatggaatggtcttcttgctttttatcactacccatattagagctactcactagaccctccgtatccaagctgctgttattattagcaagtttttctacacctggtttcacttcattggcaaccaaaccgagcttattattaccttccttcaaagaatcataaacatcgattatctcatcaactgccctcaaaaaatcagatccttttccctgtcgcttagcaagtagagacctccgtttctcttcagtgaatgcttcaagatctgcatagttgcagaaagcactacaataaaaagaacaggaagtcagatgtaagtgcgtagggttataggtaagaaaatcagtataacacattgaaattcatgcacagctaatggtggaccagggaaaaaacacagatgcttccatgtcttctctagaagttcctaattgtagcttttaactattagaccataaacaaattaaaaataaaaactgaaatttcacactttttattggaacaacacacaggccaccaatagtgattagtgagttttagttagtccatagcccatacattgagaaatacatcgcgcaaacccaaaaggaacacaaccacaatgggtcatcgaggatcaaagcgagatagtgatacattcacagatcaagtgtcaaaaagcaaatctttacatgtctaagatgttttcatttcctagtcctaaacagcaccacgatatcatggttcattccttcaaaactcattataaacaaagtagcagatttcatagattatttcatagttcatcgaccctgaggagcatttatgcccttggcatatacataatacattgacaacagtgtactactagtccaaatgacagctttaaccaaacctatcgatggttcaactttcttaactatcagagaaatatttaaagccaactaatcaaaattttctcaacgcttgatagtacaactaatttggggggaaatggttatatgtccccacaaatgatatgtgcaatctttgcgggatgtcagaatttcaatggttactctcattgagaagaggatggcacaaaggatggggcaattttccggttttcttcattcacaaactcaaagccatacctatccgagggaggttggatacatatatatagccatagctggctgcaagcctattgctgcaccctcctagtctaaaattcgaaatttgaatgggatgatgtcctagagggcatccaaactgaataaagcataaaggaggcataaagaagatgctaactgctgctgtcctgctaaccgcagctgtcctagcaactgaaaatatgctaaaggagcagatgctgtcctgaaaaggtgaaactacctaaaagaaaaggaagaaccacgaccaaggaccacaaagacttatccatcattctcccctaagtcttgtgcgtcgtcttgtggggaagttgggccatcccgatcctggagcagagctcgaggaacttgatcctcccaagaggcttggtgagcaagtccgcaagctggtccttggtgttgatgtagctcgcgttgatgctcccttcctccaagtagcctcggatgaagtggtacctcacccggatgtgcttgctccgttcgtgaaaaacagggttctttgccatggccagggcggacttgctatccaacctgagctccaccgctccagtgtctctgccgaggagatcactaagcagtcgagcaagccagagcgcctgggtcaaagcggcggaggccgccatgtactcggcctcgcggctggatagggccaccacctgctgcttgaccgactgccagctaacgaggcactcgccgtggaagaagagaatcccgcttgtgctcttgctggtgtcgatgtcgccagcgtggtcgctgtacccaacgaagtgtgccttgctaggacacctcgggtagtagagaccgtggtcgagagtccccgcaacatagcgaatgatcctcttcacagcctgctggtgctccgtcgtcggtcgctgcatgaaccgattgacgtagccgacggagaaggccaagtccagccgtgtgtgggtgaggtagcaggctccccacaagacgccagtattgtgtagcatccacttcctccgtcgtgctatcgcggctcagcttcagtctctcctccatcggagtgagagctgggttgcaatcggtgagcccagccagctcaacgacgcgcttggcgtaggcggtctgtcgaagcgtgatcccggagtcgtcctggtgcaccacaatccccaggtagaaagagaggccatagatcactcatctggaaggtggccttcatctcctccttgaacgccgcgacctccgcatccttggtgccggtgatcacaaagtcgtcgacgtagacacctaccagcaaggcattttctccattgccccgccggtagatggccgcctcgtgcgggctttgctcgaagcccatccacttgagcgtggaatccaacttggcattccacgccctcggtgatggataagtctttgtggtccttggtcgtggttctccacgagcgggattatcttcttcctcggcgagtgcctcgttagctggcagtcggtcaagcagcaggtggtggccctgtccagctgcgaggccgagtacatggcggcctccgccgcttcgacccaggcgctctggcttgctcgactgcttagtgatctcctcggcagagacactggagcggtggagcttagggtagatagcaagtccgccctggccatggcaaagaacatcgtttttcacgaacggagcaaccacatccggg

SEQ ID NO: 7082 - DNA, 79889 bp, Oryza sativa
acgctccccatctcgccgttctcctgcatcacctgcggctggtgacgccgcggatttgtcgaccctctcaagcgcctccccctgcttaggactttggcgcggaggaggtggaggagtacgagctcgacggcgtggattcggctccccgtcgtcgccgctcacactcggcgagatgtcgtgcgtttttccttgctcggccattaggctgaacaagaaaaacttggggcacacggaagagtctgagagctcagaaagcacacgctgagacccctacctggcgcgccagatgacggagctcgtggctcctcaccgggagaccgcgcaggcccccctttgccggttcggccgggggcttagggtgcgatctcaagctctctctgtatgtggaaagatgctcgccggcaagacacacgagacacggccgatgtatacaggttcgggccgctgccaagcgtaataccctactcctgtgtttttgtggatttgtgtatgaatgagctacaaagtgagagcccacttctcccccgctctaggctctaaatctggcaagaatcaaccaaccctttctctatgggcaaggtcctccttttatacttcaaggggataccacatgcacccttccctttccaaactggactgttcttcttctctttaatgggcggagattggtatggttgtcgtccaaatgacacttcgatgggacagctcacacctacctccactcccggcggagacgggcgcaacgtgagatcgtggctgcccgttgctgatgcgaccagtgtcagaccggtcattcttgtccaccacgcgtcagtttaacaacgtgcatgtttgcccttcttcgtgtaacaccttgcctgtaatgattaggatgaagcctggtataaatctaaccagggctaacgtgccatctctaagagataacacgctagctccggcttgagacgagttgccttgaggctttcgtcttgaccggatggggcgaggcgtgcgttaaaccgccagtcgccacctaacccttgatctgaccggtctgtgactggtcacagaccggataaaagagcgtgctgtactgcgttgcacgcagcgtgacacgcttgaccagactgcaataaatgctgttaggtgagcacagctgtgctcacttattccatatatgtggcgcagacttctttaaggggtcgggggtgccccggccctcggggccggagcaagcgcaacccgacccccccctcaggggaaatcacgaggagggcggacacctcaccctcgggcccaacgtccccgaaggtgccaggccacgtgggcgattgcgtctgcctcaagcctctggtcatgatactcccggtcccatatcaccgacacatatgttgcatattggactagctagtagcaagttttttcactttagaccatgttttattacctaatattgcgttttggactattttagtgagcatgtcagtcaccaaaagcatcttcttccacctttcatccctaaagacaattccagagcatatgctgctaaatttggtgaggagaagtgaatgtttttttttttgaggtgaacgacggcaggagctctgccggaatttcattagaggagagaaaaatagttcagagaatacaggggaagacatcgaaggagaagaagggagaaacctgaaaatacaaagggaatccgaaaaagaaaagacaattaggggggttggaaagcagtgtgtctgagatcaagttcttcctttactattctcgcaacgcgatcctctgtgtaagagatgttttgaaaaattcttctgtttctttccaaccaaatgttccaccaagtggcgagaagagatcctttaaccctgaatttgaaaggtttggggtgtagttgattgagatcagcccaccaagctgtgttgtcatctgcaggctatgcccccgggatgttttgctattggcacaccataagccaaacttttctgaagaaggggcagacattaaagagatggttagtgtcttcaaacgcctctccacacaggctacaaatccaattgcaaggccagtgccggtgcaaaagattttgggccgtgagagttttttagtgaaggattagccatccaaagaagcgcatctttggttcagctgggcacctccaaatggaatgaaaatcaatcggagagaaggacccttggaactgaaataaataagcactgtttgcaaagtaggatcccgattcattcaggttccaagtgatgtcgtcattggtttgcggtagaagctgaacattttgcagcattcccccaagctggacaagatcgctaatttcttcaattgtagttatttgccgaaaggaaaggagccaagaattgtttgtcaattccgttttaaccgatctctgtttgcgcttagctaggttgaaacacaagggtgcaatgtcttttggacatgtattttgcagccatttatcatgccaaaatttgttttttctccattacccacagttatcgtagtggcagcctaaaagagtcttttgtcgcagtcatcacaaggtaaatccattccaacccaaggcttgttgtcctctttccatttgaaccagagccaccgtagtcttagagcgcgagaaaatttctcaaggtctggaattccaaggcctcctaaaaatttaggtctacagactgtaccccaattaaccaagctacttcccggatttgttttgtctgggtcttctcccttccataagaaggatctgcggtaacgatctattctgctgattacccatttgggagcttgaagggcagttagatgaaaggtcggcaatgcacttaacactgattgcacaagaattcttctcccttctgacgtaaagtagcgtcctttccagctagggagacgcgatccaatcttttcaattagaggcaagaaatccactttcctaagctttcgaaaatgtaaaggtaagcctaggtagcggcaggggaaggatttcaaagttccagggaaagaagtaatgacatgtgtcaagtcggtggtgtcgcaacagataggagaagtgaatgtgaaggtagctcaactggcacaggaccaaaggcaacaatgacaagcatgagcagtgtggtgcttgagctcagggcagcgaagaagttggagccttcagaaagcataagcgtggagaccatctgctcattttcctagtcattaaggagccaacgaacagaactatgtgggcactgggcaggggcggcttgatctcgttgtgccctgctcatggctacttgctcagatctgcgtggctcttgaagaatgttgtggcaggggtcaccaccattcctccatattcggcccaaaacactactaaggaggagattgagtctttattctaagtatccgggtggcaaagagtcattcgaacaggaaaacggtaaaataccattcgagttggaaaacactattcgagcaagttcttgctactaagccaaatcatatgttttgagtgttttctaagttaatgacaggtcaattgccaggtaagccgaaaagggtggtcgagatggaaaagacaacttgccgtagaaaagacccatggagaagacccttggtggtggaaaaggctctcggtcatgaagaaggcaatttgagcaataaagatgccaagagaatattctcggggaccacttgaacactctatctagcttgcgccaaaagactataatgacccctgaaatataccaaaataatcttgggattgctgatgtggcggggggcaattgtaatctcacatgggcccaatgaggggcacaattgtaatctcacatgtacagctatgaactatataaagtagataaaaagcctgtagcagacaggacatattggaatactaaaaatctcatcggtcaaagcgtgtgtacattttgtattcgggctcattcctcatgataggcgggaaaatggtgttttctcgtctatcccccaatcttgtccgtaaccttgggtcacaacaaagaagaagaagaaagagaggagagagatggggcagctggaggagaagacaggtacaatgtaaaacattttgcaaagaaacctggtctaaagtgaaaagtgtattgtaaccttagtccaaagtataacatgggtaaaaatacatggtccaatgtgcaattctctcttaaaaaacgtagtaatatttctaacacaaacaaatatattgtcaaaatatatcatgtgttagctttagtacgtgaaactaatttgttattgtatagataccactacatttttctataaattttaaatttaaaaagtttgacttaaaagttcaaaaaaaattataatgcaaaacagagggaagcaacaagaacaaaataaaataaaataaacagtcccacttgtcaggaataagagggtatgggtgagctacactgccctgacgcatcaatgggttgaataggacacatgcacaatgctccctcctcccattttaagtatagccatgatttttcatgcccaattttgatcgtccgtcttatttaaaaaaattttaaaaaaattttaaaaacataaatcacaagtaaagtactatacatgttttatcatctcataacaataaaaatactaattataaaaaaatttcaaataagacggacgatcaaagttgagcgcgaaaacttatggttgtacttaaaatgagacacagagggagtaagaaaaagaaggaagtgaatcagtagcgtgcgaggagaagggaagagaagggagatgggacgacttttggctcaaagcaagaagatggatttttaaagcctttcaattaaaacaactaggtgaaactccgcgcattgctgcgggaatttagtatgataacaaaaaaaaaataacgtgtaagatagctatataacatcagattaagtaaattaatgtggtttatgataatttaaatttaaatagtatgtagaatggtgattcaaacgtaaaaagtgaggtggtatgactttatggaagaaaaaagtagggagatagtttggaccatagattaatcatctaaaagctaaaaacaatttatgtgatatgacttaattagaggaaaaaaaggaaaaagataatttggaccatagattaatcatttaagcactaactaagtgaggatgaactaaataagtatataggatatcataaaacataataaagatattcattgaaacattatgtgaattatgttggatgataatttaacatgtttgtatttgaaaagctcttaaattataaaaagaataaagatatagcatgtttgcatgatgtttaatgtgatgattgttagtggatgatgatgtggcatcttgttaattagtggatgatgatgtggtatctttgcatgttaagtttaaggagttagtgggggataactttatagtaagataggaatacagaaatgctctccccttcattaaggccttgtttagttggaaaaaattttgggtttgattgtcacatcggatattcggacacatatttgaagtattaaacgtagtctaataacaaaacaaattacagattccgttaggaaactgcgagacgaatttattaagcctaattaatctattattagcaaatgtttgctgtagcaccacattgtcaaatcatgacgcaattaggcttaaaagattcgtctcacaatttacactcgaactctgtaattaggtttttttccacgtttaatactccatgtatgtgtccaaacattcgatgtgatgggtgaaaagtttttgttttcggaactaaactaggcctaaaaatgcatcctatgaaagaaaaattgcttgaaaatctaaaaaaaaaatatgagctacaccacaaatattataccgccaggcagtagtactccaatgagtatctccacggtatctaggcaggtgagatccatacacacatagtaaccacctaccctcacacggtcatgaccatgtatgttttaatgtcttcccatataatactttcagtgtcggacaatgaacaaagaaaatatttgatgagatagataactcagtagtctgctaatgaagcatatgttgcttatcatgcatactttgttggtgagctgaagatataccacggagttcaacattccatggtttaaataatttatttacctttaaatctatatatgttgtgagggtaattagaaaaagatcataatagttgacttcgtgaatctcaagatacacctaacaatgagaactccaatttatatatgttgtgagggtaattaaaatttattcttttagcgataaacgacttacatgtcactattgatgcgcttgtggtgacttgtgaatatcatgccgatttagttttagagtacttataagatagggtgtgcaagtgtgctcacttatataggcgcatgtgtctgtaccctgtttcaaaaaaaatcacaaccgttgagaagaaaaggtaacaagttcaaaatagaacaaaagaatgtgctttttttaaataaaacaaaatcaccctcacataaatattaatattttttaaggtaataaaatttcatgcaccattaaaattaagaggatgcttgtgataagaggcgaagccaagatttatagataggcggtgtcgagattttcagagactcggtaagacggccaaaactttcgggtttttggattggccatcaaaggagcacaacacgtcgacatgtcatgactatagatggccaaaaggcccgaggcccgacggcctggcccacggcatgacattttggcccagcccaagcacggcacggcccgaccaccgggccgtgcctaggccccccactggcacgttgggctggcccaaaatgaccgggacggcacggcacgatgggccgacaggccaggcccgacacacaaagaatagggactaaaaatagacttattttagctatatatatatatatatatatatatatatatatataggacactcatatggggcaccatggtgcccgggcaccatggtatctaatgcacaaaatcactcaaaattttcaaaatttttaaattgtgagtatatacctagttataataattcgattcatacctatacttatcaacaaaacaactcaaatttaactttatttcacaatcagtgattacgtacctaagtaattatatgtatggatgctatatacctagaatcaaaatctaacaaaaacaagttcaaattcagtacaaacatgctttgaactagttagtaaagtagttaatgttaatacctaagtaattgaaaaagtttcatactcatttgaattgggtatatatatatatatatatatatatatatatatatatatatatatatatatatatatatatatataatatgtcagcccaaagaggagggaggaaaaatggacttattttagctatatatatacatatgtcacagcccaacgaggagggagagaaaatagacttatttaaaaaaaggcacgatagaccacccgtgtcttcggaccgacacgacacggggccgtggcagggctggaggtgtagcccatgggccagcacggcccggcacgaagtgccgaccgggccatgctggtccgatagctggtgggccgtgtctagccgtgcctaggccgggcgggccttatggccatctatagtcatgacccactcaccaaccgatgaagcctcaagtatgtcatgaagaagctgagcagccgaacagttgagactcggatgcaagttttattggctcatgcattttgcatctctcttttttagtattgctaatagttcttatactgagaaactatatttaacaacaaaccacctcattactatagaatacctaatgggtgccatttgagaatcccacatagatactagacttcgtaaccgacactgatgtggagaatcatagatgttggtgcacctttgaggttctagaaatgaaaaaataatgtggctcgacgcatcggcttcggctcgaattgagcacatgttttgagccaaggacttaatcccaatccaattacaaatccaacgcaaaaatttaatcctaatccatcacaaattagaataatcaccgaatgatatatagaatatcaacattcaacacaaaaggttaactacaaaaaccgaatcatagtccaccgaggctatcgcggccattagttgctcaccgaaggccaagcctatcaccatcgccactcttcgccagtcctcctcctcgccgtcgtggtggtgccgagctcgggggctgccggatctagcccccgcgcatccttctccacctcacgggacatgagagtagaggagaggagagggaggcacgagtggagaaccttttgtgttggtggaatcggatggccgctgcataggggagaggaagacgacggaggaagacgcagtcgctgttgcaccggggagagcgaaaaaaaccatcaccgtgcctatggtggttgtgcctagcagaggcgtccggccgccactcaccaaccaagctcgggtggggagacgagagagagggagcaaggacaaaatgatgagagcgaacgagagagaagaattggatattgatgacgatagcgttgggaggatagggatgagacttaaaaagatgtttttttttctcttctcccatgctcacgctcagctcggcttggctccaatgaagcgttagtttttttctttttactaaaccaacacttttattccacatataagtgttaaactttgcactaggatcacctaggttagatctagtcgggtggttctatttgggtttgatgaacgacattgtagatgaaagggagagggtttagataccgaccggttgaggagatcgtggaggaagaggcgccggacatcgtcgttgtcgtcgcggcttgacgtggatgcggcggtggcgtttcccgtcactggctgcgccccctctcgatcggattagggttttgtggggtggagttggcggcggcggtgaatctcgtaccatgtgccgtgccggcctccacccctcttttatatggcgcagtgtgacgggggcccaccagccattgggctgggcgcccccgatcagggcgcggtcaaggcccccttgagccgttgggctcaaggggagagagatctatctaacattctcccccttgatctcactttttcttttagctttttctattccatcacagatttgtaaatagagcatgtttcatcgtcacggtcaatcgccgatggattcgacagccactatacacatctctattcagaaacagatactttacttttgggccctgtagtccaggattcataaggcttcccttaaacccatgccggctacatgttccttgaacacgttgggtggtaggcctttcgtgagcggatccgcgagcatcctttctgttttaatgtgctcgagactgattgtttgatcccggactttgtccttcacaacatagtactttatgtcaatgtgtttggcagcaccacttgactgattgttgtgagtgtacattactgcgggttcgttgtcgcagtataactttagtggtttctcaatactgtcaaccacctttaaaccgggtatgaacttctttagccagttcacctgccccgttgcctcatagcatgctataaactcggcatacatagtagaccctgcagtgatagtctgttttgagcttttccatgaaatagctcctcctgccagggtaaacacgtatcccgatgttgactttgtattatcttttgcaaagtcagaatctgagtaccccactatctggagtgattctgatcttctgtaagacagcatgaggccttttgttccttgcaaataacgcaagactttctttaccaatttccagtgctctaggcctggattactctgaaatctgccaagtaacccggtaacaaatgccaagtcaggtcgtgtgcacacttgcgcgtactgtaggcttcctacagctgacgcatatggctttgttttcatttcattgagctcatactgatttctgggacattgcgatgccccatacttttcgcctttcattataggagcaggtgtagcactgcatctgtacatgttgaatttcttcaacaccttttctatatatgtcttttgagaaagtcccaatgcatactttgttctatctcggtgaatctctatgcccaaaacatatgaagcctcaccgaggtctttcatgtcaaagtttgaggacaagaatttctttgtttcctgcagtagactgacatcactactagccagtagaatgtcatccacatacagaattaggaaaataaatctcccattcttaaactttgaataaatacagttgtcctcgacattctcttgaaacccaaatttctttattgtcccatcaaacttcaagtaccactgtctcgaagcttgctttaatccataaatggatctctttagacgacatcccatattttcgtttcctttcatgacaaaacctttcggttgcgccatgtatactttttcctccaaatctccatttagaaatgccgtttttacatccatctgatgtaattccaaatcataatgtgccactagtgccattataatcctgaaggaatctttacaagagactggagaaaatgtctcattgtaatcaatcccttctcgttgcgtgaagccttttgccacaagtcgcgctttaaacttttctatattccctctggagtcatatttggttttgtagacccatttacagcctactgttttggctcctttaggaatttcttctaaatcccaaacatcgtttagtttcattgatttcatttcatctttcatggcttccaaccattcagatgagcgagcgcttctcatggcctcttcatatgaggtgggatcatcctccatatgcgactcttctatattataaactttatagtcatcacggatagccgatcttctgactctttcagaccttctaggggcctgcacatttggcacatcctgtacctgaggctcttgatgagtctcctgtactggcacattatctatttgaggctgttgtagctcctcctctggcgtggcaaccatttctgttgaatcctgtataacaggttcctcactctcattcattgttgccacaggaggggtaacaacaggtgctggtacctcaatgacaggcattgcaggcacaacatcagcaggtagagagaagaaaggttcctgagtcgacggagcgggtacagacacccgcctctcctcaagatcaatttctcgaactaccgagctccccctaatcatttcgtcttccaagaagacgtcgtgtctcgtttctacaaactttgtataactgtttggacagtagaaacgatagccttttgatctttcaggatagccaataaaatggcaactgactgttttggggtccaacttcccaatatttgggttaaatactttggcctctgcaggactcccccacacacggaggtgagttagcgagggtactctccctgtccatagctcatacggtgttttgggcaccgatttgcttggaactctgttgagaatatgaatggcggtttttaacgcctccatccataaaccgagtggtagtgtggagtagctcatcatgctgcgcaccatatccataagcgtacggttgcgcctttcagctaccccattctgttgaggttcgcccggtgttgaatactgggctactattccattctctagcaagaaccttgcaaaaggtccagggacttgcccataaggcgtatgtcgaccatagtactcccccccacggtcagatcttactactttaatctttatatcatgctgattttcaacttcagctttgaatatcttaaatttatccagtgcttctgatcgctctttaattggataaatataaccatagcgggagtaatcatctgtgaatgttatgaacgagtcatagccatccacacttttcacaggaaatggaccacaaatatctgtatgaatgatctctaaaattcctgcgcttcgttttgcaccctttttgatgctctttacaaattttcctttaatgcattctatgcattccaatggaggaagaatttcattcttaactagtctctcaattctccccctcgaaatatggcccaaacgacagtgccataatttcgatgagacatcgggagttcgctttcttttcttgttttcttttgtcaacgaggacacaacattcacattctcagaaagagataacaaataaagctcgtctcgcaacacagcaagaccaatacatgcattattatgccatagttcacatttgccacttccaaagcggcaatcatatccatcaaaatccaactttgatacacttattaagttcctttgcaaagaaggaacataaaagacatctcgaagtaaaagtatgaagccattcgcgagctctagaggaagatctccaacagcttcaactttttcttcaactccattggcaactctaatggtgctttctcttctttgcgtagtcctcgtcgaacggaatgcctttaaacaattacaagcatgaatagttgctccagaatcaatccaccatgtggatctagagtaaccaacataatgagattcatttacaaatgtaataatgttctcacctttctttgccatgatcattttcaaaaagtcaggacaatctttcttgtagtgtcctgtcttcttgcagtggagacattgatctttctcaacagcgaactgttgttgctgaggcagatgctgagactgtttaccttttgaggtgggagacttgtggttctttttcttatctttaacatagtttattgaaccaccatttgattctttgattctctcctcctcttgcacacaattagcaatgagcttctcaaagttccatttctctggacttatgttgtagttgacaataaaattgtcaaactgctttggcaatgaggccataaccagatggaccagaaagtcatctgttatgcccaaatccattggcttcaacttggaagccatgttgctcattctaagtatgtggtctctaacaccacctccattgtacctttctgtcacaagctgcttgatcagctgtgtagcataagtctttgaagagccagtaaactgactctttattctttcaaggtactctgagacagcgtcacactctgggatcgagcccaatatggtaggctcaatcgtattctttaccacagccaaacatttcttgttggctaaggaccatttcttttgttcaatgtcatacgacatgacgagaggagcattgtccctctgtctcttttgccagtcagcatctgactcattttcacctctgacaaggtcagcaggttctataggacatggggtagtcaatacccagtccacctctcccaagataaaagcaaggtcgagttttcttttccattctgcgtagttatctccttttagggtcggaatatctttaatgcaacccatcaaggagtagccacctgaaataatcatgtgcggtgagaacaaaattaacattaaaatattatgcattaagcctacatcaccgttgggcagaattagacataacacatataaccataactataatattgcaattaacaacgttggtcagaaaattacaacatcatagcacataattaatgttcctaaaattaaattctcccgttggttcgaaatttaattttagaaacactaattttcatcaatttcatctatttgcagcggaagactatataaaatcatatgaacagtagcaaaatctctgtaattctctctctgtgaaaattctcccgttggttcaaatttaaacagaggtaaaacatgcaaaaatctattcaaaattctattgaaatttgcatgaaaaatcgacaaaataaaatggaaaaattgctactgttctcttttattcattttcggccccgagggacctaaattgaacttttccggcctttgccggtcggcctatggccactttgcgcgcgggcgagcgccccctcccctcccccaggccgcaacctgggcctgggccgggaaagccgccgccgcgcgctccccacttgggccgatttcggtccggccgccgccggccgtccgatcagctagggtttcgatcggacggccgggcgccgagatcggaggatcaaaaacccccctctcccggccggccgccgaaaaccctagcttctcttctcttctctctctcacgcgaccgcgtggacggcgtcgccatcgccggcgaccttcgcgccgccgcgccatggccggcgctcctttcttttctcttctccgctccccccaccgtctctaacccccaccgtgtgagagagagatggcgacgacggagatggcggcgccgccgcgggccccctcgccggcacgcgcgtgcaggtgcgcgcgcggccgtcgagtggctcctaggcggcgcctctttgcccctccccccctccgttgccggcgtcaacgacggccggcgacgaggtaagaattagggttagggtttttggttcttttgatccgtgcggatcttgtgcttttctttctttggatttctttccccgaaacgatctaaacactagggttgctctgataccattgttaaactttgcactaggatcacctaggttagatctagtcgggtggttctatttgggtttgatgaacgacattgtagatgaaagggagagggtttagataccgaccggttgaggagatcgtggaggaagaggcgccggacatcgtcgttgtcgtcgcggcttgacgtggatgcggcggtggcgtttcccgtcactggctgcgccccctctcgatcggattagggttttgtggggtggagttggcggcggcggtgaatctcgtaccatgtgccgtgccggcctccacccctcttttatatggcgcagtgtgacgggggcccaccagccattgggctgggcgcccccgatcagggcgcggtcaaggcccccttgagccgttgggctcaaggggagagagatctatctaacaataagtgcaggtatattaaaacctgacacttttgttattattgccgaatttttaataaatcagcacatataaagtgttataggtgccctttttaatttcaatcccgcttaaggtgtcagtaggatgtaaaaagcctcacatatatatgtgtgtgtgtgtgtgtggattttaaattaacttggcacgtataaggggcatgcctgattcagctatcgattggatgcatgcatcactagaacacctggcatattcatttatttcgtcaccgccgcttgcattcttctatttctgcagcttaattaattatgcattacggcacacaacaatcacacacacacagaggttagctacatatggattctatagatcgattattgcccttttcttgcgctgatgctggaaaattaagagacaaataattctactagctacgtacgtagaaatctgcggcgacgagtgaccacctaattatcgagccatcaccctggcggcggcgacaccagcaaagtaaacggagcaacctctccaaaaggaagcctcgtagagtagccaacgaagcctcctcgccgcgtcctcctgcgacgtcgacgatggccgcggccctgcacctgctgcttcctctatcgtcactaccacgtccggatgtcgccgcgccgccgccgccgccggcgtcacgttcttaccaccagctgcagcgacgccggcgtggtggtaaccgcgagccgtagccgccgtctgattcctggcacgctgggtgaccgcgtgtgccgcttgacgcgccaaccgctgcatcatcatcacggatccactcatctctcgaccgatcaatctctctcgctcgctgtattgtagtgccgatcgatcaatcgattctatgtgtacgggataaactaacccaaaatatatatacaggcgatcgatcgattaaactactggttgtccaatccgaatcagattctgagaccgtctcgatgatctcggttgcttagctgctgcccagcagcccagcttgtcgcagcgaatcagacggcggcgccggcggttagttgcacggttgcagtcggcattggatctcgccactcgccatcgatcaaccctgccgtccgctacctttgcttcctctcttggaactaaagatcatcgagttccagacacgagattccacgtgcaacaacgaactacaataccttaattatatacttcctttgttttatattatacaatgtttgaattttttttcaatcaaattgttttaaattcaaacaaatttataaaaataaaggcatgtagtaacatttctatagatgtcggatttagtaaaattaatttggcgttatattagatgttgctacgctttcctataaaatcaattaaattttaaaagtttaaaaaaatcaaaacatcttataatataaaatgcaagaaaaccatcattaccatgaaatatacaaatatatataactatgaacatacattaattagtattggtttaatttgttttgtttacaaatttgaacatggaggctgtgaagtgatatattttgtattaattatattatcattttttctatatatatataggtggtataaaaaaacgagggaatgcatgtcctctccaattatgaaaatccatctccctatatttatatactagaactatttgtaaaatagcactccactgtgaataaataaggaaaaccttcttcctaatcatctctttaatttccccgcaaaaaaaatcatctctttaattaaactgatgacatatgggtcccacttatagtgactggatgatgttacttccatcacaaaacgtactttcgacgacatataattgtcactctaatcaaacgcgatctgcttgcactatatatattaattatagtagtagcactaacgctagccaacgccaagccactccattctaattagtattgcagctgcaccagctgcgccctcaggcgacacgccgccgtcatcggtgccaacgccgccggcgaaccggcggcggcattgtcatcgtcatccacggcggcggacgcctcgaggaagcggccgaccatctcctcgcacggcttccacaccaccgcctcccacgtctccctgtgcggcgccccctccgccatgcgcgccaccaccaccgtcgcgtccacgcgccgcacgtcccacccgtccagcgcgctcagccgccggatcttcgccacctgcgtcgcggcgaggcggtaggtgttggccttgatctcgcgcacggcgccgtcgagcatggcggcgagctcgccgtcgtcggccgcctcgccgcccgagcgctcggccaggaggtacccgtgcatctccgggatcccgatggcgcggcgcacgccgcgggtgtagtagtccgcggcgccggcgccgtcgacgaacccggcgcgcgcctcgcccaccagcccgcgccgcaccatgtggtccacgcgcgccgcggtgtaccaccgcagcaggcccggcgcgacgtcggtccacaggaagaggcagtcgtgcgccgcgcggaacgcgccgccgccgccctccaccagcgcctcgacgtaggtgttcgacccgccggccacgacggggaggcggcccgccgcgaggacgcgggcgacggcggcggccgcctcgcgccggaagtcctcggcggtgaagtcggcgtccgggtggaggacgccgaggaggtggtgggggacgccggcgcgctcctcctcggtgaccttgttcgtgatgatggggaacccgtcgtgcacctggatcttgtcggagttgatcacctcgccgccgaaccgctcggcgatggagatggcgagcttggacttgccggtggcggtggcgccgagcacgaagacgaccttgggcttgggtgactgtccgatgacaccgccgacgtggtactccattgatgaaggtgagctgctcaccggagaagaggtatataagccatcgttaattactttttgcaaagatagtaaatttacgacctaaaatgtacgtgcactcgatcattcttactcccccgtcccaaaatataatatacgagattttagatggatgtgatataagtttgttcagattaataatattaggatagctaagagcttgtgctttgtaacggacaacaaattgagtttctaatttattaaatcaattaacaaacacttatttagtccaagtactgagagccaacggtgaaacgggggaggactcgttaaaagataatgtaatggtatagattgtggggctcacacggtagtagtagagatggtgtgggaatggacaccaccagaactactaacattttaaggactatagattacatctacccaaaatcatttacattttgagatggaaggggaacatatactatatttaaatggttataatacattttctaaataaggattaccagaagacactataccattccagaatggaatactttatttctggcatcaccataacgccagcatggcacaaatttggtacttatatgatactagcattagacatgataaacataggaaccatatctaatatcggggtatcatacatgatactcataggtaacagtatttggtacctagatcccatgctgatgtcatgatgatgttagtaaaataaaccaccgttgtaacgatatagcatttttttttattttttttgttttcaaaaacagtaatgctgattgtaaatgatcagtttgatgctaaattacctatatatcatgataattaattgtctctagttaatttgttgtgaacgagaatttaacataaaactagcaatgcaagttcatggaacaatgtgggtgcacttccaaattatcatgcatgaaaaatacatctctgcacaatttgttaatcttacagtcgaaaacattaaatatcatgaaaagcattgacaagtaattaatcccccatatagattattcgcattgaacttccttattttactttttttaagagaagttcacggttcatgaatgaataataaactcatctgtggtcaattttccatcaacttcataaaaccaatctataccaaaggagaaaaggatgacagtacgtataaataaaaaggatgataacatctgctgttgtatgcatattctagctagcaaaattaacaaaatcaatcattaatattactacttcttgagggtaaacttcaataatttctttatgttcatcgtcgctagttattattcagtgaaactttaactttgttttatgttcaccaccttctaactttgacatatagcgcaaaacattatctcatatgtatccgcaaactattcattcctattgaacctatgtctggtgttcacatcatacaaggggtaaagacaaagcctagggcaattaggactccctaatcccttttaggtcctattgaaaagtaatgaaaagtcaaaggtaaaaacaagatgcattagttcggtcttaagtttatatatgacatggaaaaattataataacattgagatctatgtgaatgaaaaatattagcccttaaaaaaagcctcaacttagatatctaatatatcttacataaaaataaaatatctatcgctcaacataaggattacaaagaaaaaaaaatctttttagatcaaacaaaaaccacccatatatatggatctatcacggagacggggtttgagcgcccgctactaatatatggattattagagacccttgagcctccaaaattttccgacatagatacagaaaggccaaaaataagttggagctttgtctagttttttttagcccctgcttttttcccccctagatccacccctacacccacatattttttttgataaaagaaaaagaaaaatggatattaacaagaaaaaagaaaaagaaactagcattgcgacacaaaaccttgcaagcaaaaagcatctatactcatcttatcagttcaagctggattacgaaaaatggacggtgattaaccaagagggtaacacctaccgcgaggagatcgaccacagagctagctgctagccggccgccggaacggaatcgatagctgccggagtttatcaagtaccaacttggtcgccggaatcggtggccggagttgtacaggggtgaggtttattccgacgaggtaactgtatatagcctctcttgtgtatttatacagtccctgcaggacctatctggctgatgcagatatgcacagtagtataccgtgtcttaatgccttccataatcagataatcagaagaaaacatgtatctgcatatgtcgacctgtatgacagaattaattggtatcgaattttgagccagccaagaaaagcatggataacaatgcaataaatagaatcttggtcgaacagtcacacgaaaatagtacgggcattgtacagtgctatctcttggctgcagtgtatatccgtcagtaagagtgttgtaattatgtactgtattaattagtactagctatttgtgagaatatgtgagattatggtaaccgacgattgactttcctgttattcttgtatatatccagatatacacatccaccaattttctagccgttaatgttattcctatcctagctatcacccgtttcgagaaatctgaaatggtatttttctttaataaccttaattatcactccccggttgcatatatacacactttgaagtttttctctcccttttttttttagttttggaaacaattgataaatcgagaaggggttaaaaaagtactacattcatccatatatctttttagttatgaacttgaataggtcggctgagagaactcatatctagtttcatatctaaatatatatatatatatatatatatatatatatatatatatatatataaggatggatagtgaagtttattgctctcaccttagaatctagtagcaaacattgcaaatagttactagataaatacaacgaaaacatgcacaacacgttcatacatcatactcattcacacaccacttgacctccacagcacattttttagttttggaaacaattgacaaatcaagaaagggttaaaaaggtactacattcatccatatatctttttagttatgaacttggataggttggctgggagaattcatgtctagattcatatctaaaaatatactttttttaaggatagatgtagtaaacaattttacagtgaagtttattgctctcacattagaagctagtatcaaacattgcaaatagttgctagctagataaatacaacgaaaacatgcacaacatgttcacacatcacactcactcacacaccgcttgacctccgcagcacgggaaatgtgctaccctgtgtaccctagctagccatctgtcctatttaccaatttcatcccacaaaatctagattgtttgagctacggttaataagaaataaaacaaataaataaaataatcaaaatagattgaatatacttttatacttctatttatattactagcacgtagtccaaaaaacaaggttgaaaaatagagaacaatttaaagccctaaaatcaactctaaaattaaattgtaaaaattcaaattttgattgtggcttgtaaaccagcgagaaaatttatcatgaggcggtagtaagtccaatggtaatatgttactagcctagttgttagcacaatccaataatcgtgcactatgaattgatatatgctcaactggttagattttttatgatgaaacctatctactcaggtttaaatctctgatgtagtatatgtgcccacattttacgatatttttgttgtttctaggtaactgatttacaaatcaacagcgaggcatctacggtaatttcgtcaatgtcacaatgtggtatctttcgagtatgtgatgtttatagggccaggtaggagtgtgtttgggtgttcatatcgatgagtataataatatcaatgtaggtaacgtgttttgaaaagaaattcaatcgtacaactctggatatctttttaagatacttagtactccacttaattgaataccaagtagaagtgaaagctcaattagttatgcaggctcccttatcctaaaacttgcatacttagatggaactcgtttacttgacatgcatggatatggatacttgtattttcgtagagtacttgggtgtaaagacgttgacggccaatctcttcatagacgtacgtatgctggtgccaggacgcatctgcatggatgtatatacgcgtgaatacggtgtgcgcatcagtggcggatccagggccccgacacgatttttttattttttatttttaattttaaaaataaacccatccaaattttattttcaagatatgaatcttttgtccacgcgagaacaatactgttacgccgctccgctggcgtgacagcgttatttggccacatcaacgttgcccgcgtgacagcattatttggccacggcgctctcgctggcgtggcaagataaaactgtcacgcccgctgcaagtgacatgctattattgttttgtcacgtcagacgggctggcgaggctaagaggttcagattttataaataaattttgaaatgatttagttttaaaattaaaaattaaaaagttcaaaaaaattaaaaaaaaaatcccccgacaccagcattggattagatgcttaaataacagtgcttagtcattagcccggctacacatgtactattagattagcactaattgtcatgtttagtcattagccagcagcttaactttgcttccgtatatgataaaatgctctatgtagttttaagaatttgtgtctacttgttaatttgttattatcgtcgttcggtttgtccagttcaagaaaacgtctaattaatccggtcaactgctgtgcatgggttgtgtccgacttagtaaaagaagactatatttatagtatcatattattttataaaaaatagtctatttttttactctacaattacaacaaattttaaaaattacaccgtaatcacagctgtactgtaatttttttctggtacagataacactatatataagaaattaggataaaaacaattgattgttttacttcaaagtttggaagggacagataggagacatataagcattagaaaaggtgactgcaatcaagtaaaatatatatacatcaacaacagtaaaactgtaaaataaaaaataagaaaaccacgatactccctccgtctcgaaatataagggattttggatagatacgacacattctatgtccagatttatggtattaggatgcatcacatccattcaaaatccataatattttgagatggatggagtagatttcaatacatcaactaacaaacatcggccagcctgacacattattcgtaccagaaattaagcctctagctagacctgatcttggtacaccacgggaagcccacagatgcagcgcttgcttgctttcaaccgatgcgcttagccggcgtagccgtagaccacgcaaggccggccggctggcctatcgatccattccagttgcagagacgttaattgcaatgcaatctctgccgtttttagtactgccgcctttcccccctatccactatccattatccaatccatctgatgaacttccttggtgaggtgaggcgcccaatcttcttcctcaatctgtaattttttaatcttcttcctcaatctgtaattttttttttgaaagattaacggcaggagctctggcggatatattagggtaaaaagagtcagacaaaacgaaaaacattaaggttcaaagaaaagaggggacatccagaaaggaaaataaactcataaagcctattacagaggagaagagaaacgactcagctgagacctagcctttaggcttatctcgaaagctcaattaaatcaatattttctttgatcgtgcaagctacttgtgattcgctttagcatttatgatggaagattcgacgattgcgctcgagccagacctgccaccatgttgtgagtagagcgccaatcttcttctttgctgaatctccttttgcaagaaaaatctaggaatcccaccaattcgaaatgggtgtgtcttgccaagattgtgggggagagattgtaaccaagccagctgcatactaaattccacacatttcttatgaagctgcattctttggccaagtgatttgcatcttcgaaagtgtttgtacacagacttcatatccagttacattgccagtgacgtctcagcaaattttccgccgttagggttctctaatgcaaaatgagccagccgaaaaaacgatgttttggttccgcctgggccttccataggggagagaagtttatgttagtgatcatacattagaattgtgcttcataagcgctctttgctgagtattctccattgggagtcgatttccaacgaatgtcatcgggggtgtttttaaggagcatgacttcttacaatcggctacccagccggaccagttcatcaatttcacttatcgtggtaatggggtttaggatcgccagccagtggttgttttgaaggctgaggtgcacattgtttcattttctcctggacaggttgaagatccctagagctaaatctttaggtaagcaaccctgaagccagttatcagaacaaaaggagcatttctttccatttcccagggtaatgactgttccagctcaaaaaagcactctgtccaattcatcacatggcacttcaatgttatgccaaggtctattatcttccttccagccaaaccagagccagtgcagccttaaagctcgcgagaatttttccaaattgagaataccgaggccccccaaattcctaggtttgcaaatgttctgccaattaatgagactactacccaaactgacattatctggatcatctcccttccatagaaaagcacgccgaaatcaatcaatccttttatatagccacttattcttattcctcaatctgtaatctttccactcttttgttctttctttcttcctgtttcgtgttgttcatggatcatctctacgactctacactcatagtattacgtttggggatgatggctctggttgattggtagtaattggtagtattctctagtttcaagctgtagaatttccgtgtgagattattggtcggtgaacattttgcacaaccctgcagtttccactttctagttacagatctgtgtgggggttgatatgtaattggagtgttatgggcgcttcatgggtatggattgttttagttcattttgggcactcctctgtacgtagagagaaggggtcgatcaaaaacggaagttaattgagaaatgaagcgactctagcctctaggactgtttttccgttcagtcgatattgtggtttcgattgatcattgcgcaacaacacaggttatagctaggagcaatgccaccaggaagcttctatatattctacctagtctgaaatataaatttcagttttgaagtttgaaaagttaaatcttttgtcataatatttaatatttatagccatcaccagccactattatatttccttttgagataatagtgtggaactaagagaaatgtaccatatgttataaacttacaatttctatactctctgtgtgcatttttttccttcaaagctactcaatacatcaaagaagtgaattgggtatctgcattgacacgggaaggaggaaactacggcgaaggccttagccctcggaccaacaacggcgacgcctacgggcgccgcattcttgttggggtgttgttgcgtttctcctatccaatggtttctttaggtgaaaaccacgtcctggttctctaggacggatgacggcagcgctcttagcgtcattcagaagaaccattcctctggggtgttgtgtgcttggtttatttttagtagcaagatcagacgtaaatgcgtgttgtgactatctttttcttttttttcctgactatagtcttccaggactatagacttgtatttttcctactatatcaatagaaatatcatactatcttgtgcgggttgtttaaataaaatgggtatctgcatttgtacaattgatataaaatatgaaattacaagatctatcaatacatatcacttgccatgctaagcttacaaactaattatcatcccttttttctcttctgctccaggtgtctaccaatacatatcacttgcctatccattccacttctatgactcggctacttgcttttctacgacacgtcaagccgagtcatgacgtgaaaatccgtggattaccctttatttaacatataagtaagttcgcgggtctgtccgtttgcatccataagcggtgaacctggcgagctggcaccctctgggagggcagcgacactggccgacgaacgccagcttcgttgtccggttcggctccgtcctcccggccaaggaggcggccttgctggctgctaccgtgccaggtcgctgagtatgtcctgctcataaagttccatgttgtgacggctatggcgggggagacgccgccattggcgctcactctgaccgagctgagcatgcggatcgaggagatgggcggtggtcggttcgacgggcggcgcagcctggtggtgctgaaggaggcactgggatgctgtcatcggagcggaaacctggaggaggtgatggagtcgtgtcatgccactcatacctgagggcgcaaagcaagctgagggaggagaagatctgcagcgagtgccggttcgacgctctgtacgtcgtcggtggcattgcagtgtttgttgccctgtgtaccatgtggtacagaaaaaacgctcgagagcttgtgaagctggagcagatgtatgatgaattgatgtattggccatattcttttctccaataaaaactggataaacttttgaataaaagtggcacgcttttcaaactgctaaacggtgtgtttcgtgcgaaaagtttttatatgaaagttgttttaaaatatgagattaatctatttttcaagtttgtaataattaaaactcaattaatcacacgttattaccacctcattttacataaaacacttaaactttatcttcatcttcaggagattcaaacaccaccattaaggcgtaatggatgatagggatttcagaaatgtttgttaaggaccacaggagtaactgtggactgggtagtttaaaatctagacggtaggtagcttctgagagcggtttcccaacttgtagcttttagttcattttctgaattatacaagttatcaaaataattctcaaaatctaaaaaagctatactattaggaaaagtttctatttggatagaaactttcagccccatgtttggttgtttggtagaataagccaaacggtatatttataaataaaaaataatttttgaataaaaatgttatatacatgatctaaacgatttaaaagcaaaggctgaaaaataaactacgatgaaaaagctctacaatcaactctaaatttaaggttgaaattcaaattttatcaataagcataagcgaaaagaagagaccgtttccaaacaaaccatatgtttaatcccaggcgatgtttgtgacatcgtaaccctgcatgttctgttattttggtaatgtggttagaataatacgaggtataatgaaactagaataatcagatttatccatgcaaaaaaagggaaaaagaaaagagggacaatcagaattgcaataagaatagaaccatgcataatcaccactcaacaataagaagatttatacagtatgacagtaccaggaatctcaatacaagagaaacaaaaaagtggaagtctgaacatcaatgtgcataatacattccaaaacctcgctagaaataaccgcttgtgccaaattgagggtaaaaataatatacacatggatggacaagaaccagaacaaagctcggaacaatgtagtgacgcccttggtgctgcatagagcagaccatgtacaaataaagaataccctgtaaaacttgggataacggcagagtaagccaccggccaatcgtcttcgaaacatgaccaagattgctggcaaacatggcctctcacgtaccatgtcaccaatcaagcaaaactagtaaacatgcagcctttgtagtgggaaagagattcatgcttcagaaaagatcatgcttccttttctgtagttcttgtttccaccctggctgctggtagaactcttccttcgttataccaaatacagtctggaattcgctgtccgacaaatatgtctgcagaagccgcacaaaagttagccattgaaactcatgcaggccaccattcacattatcaaggtgttcatatgaagcattagcagacagtaaaggctgtgattacagatggttgctagtaatggaccaattgtgagtttgccactgttttgttttaaactaagaatatctgttgcaattcctttttgaaggactagagcaaaaccacaaaaacaatactatcgatgtatcaatccttccgttgaagtttgaaaaaacaggaaaaaattgaagggtctggcagatagatgattggcaataatcccaaaaagggtctggctgaagccaaacatgtacatgcaaacagcaacaatgggggataccaaagaagaacatggtatcatttaattgaggggaaaaaaaggcaaccaaacctcccaccaattgagctaggctcaattcctataatctaaatttctttgagggcactatctagttggcttgctctacctttgagtggcttgcttgcatgttgcaagtcatgcacgaaataacaccaggttatatccacttggaatactgaaaccttgttgaactcactgcaacttctgttatgtactcgagttactaaacaacatatgcattgttactgtggttttactattacaaagttcctccaaagttttattactaaaagtcatttctcctgctattttatatggctgtgctcatatcattttttatgttgcacaggtaattaactcacatatttatgggtaaggtaagtgcttatccatttcacaaggtagcagaaacaacacataacacctactttgcttccaaggttgcaaggaaaataacaaacctctctgcgtttgtaatctatcccacgaacagggttggtagattttgatatcagccgatcatagctgaaggttgtttcacctccattttcattagcagtctgttccactgatacgtcaggctcagttcgccctccctcagataatgccccatctcctggggcatctttatcagcggaaaattctgatgctccttcagacagaggggatgcagcagacggagttagttcagctgtatctgcatcacctgaaattggcaagatccaacatcaacaaaaagaaatatttgttaactctaaattttgcaagcatcgtcttcatctactgttcttgcagttagtcaatgagtacagtatcgcccatccaaaatttacaaaacaatcaatgcacaacaatgcatcaaaagtctcacattataagcttacagaggacaataagcagagacctagggtagtgtttgcatctcctgaagataaagattaagtgtttcacgcaaaacgcgccatttagcagttcgaaaagcgtgccacgaatatccaaaactttatccactctttgtagtggaaacgaacaggactattcatgaaatatgtctagcaaaaagaaacgatgcagtgcctagaatatctattattggttagtagcaccacatgaaggaaattgatattgttacccttaaaatatatgcaggggaaggaaatagtaggccacaagtcatacctgccattggggaagacctacctatgcgtgggctttgagatgaaccctcagcagtcaaaacattagacagcgcagcaacagcagctgctcgctgagaaccttgacctgcacgttgtggtgggcttttgggttttgctgatggattgaacgctgatgttaaggcagccattgctgaagcgcgctgagtgggtccaccatcagagcttttaggcctatcattaccctaaaaagaacacaacattgcttatagtttgtaagatcaacaaattttatattttttctgctgtgcattgggagtgttaacaataccttattcttttgggaagatgggttgaatgcagatgaaagagcagccaatgctgatgccctctgagttggtccaccatcacctgaactcttagatccactctgcaaacagttaatgagatgggttactaacaagtgaatccatacacattacgtctccaaatatctgcttttcacattaagtgaggataattcatagaatttcaaactttaagagcaaaaaaaaattaacgtacctctgagcgcattccgaaaagaagtgaaagcttcttctgaaatgaatttccatgaatctgtttcaagggtgaaaagtattatatcctgtgctaaaacaagtgtgagcaaagaaatggtacgaccaaataccacagtataggcaagtacaaccaaactgaaaaataagcttgcagaattgatgaataaataattgaagaaagcatgatagcttccatgtgccagcctcatagcaactgtgcacattcattcattcatatgggcaaggatgtccttgttctccagtcctttagattaatttaaattattttaaaatcaactggatcctttcttgcctccccaggtcccttttacttctattgaggactaccaacctaaattagcataacgaaaagaaattttccttgtttcttatgacacccttaagtcggattcgacaccatatgtttaacatggcaacaatctaagcatacacaccacaaaactaccccaaacataatagctgatctaatgagacatatatgtggtaggcatttattagtttagctaagaaacagggaatgaaacatatagcaaaacactgaaggagctccgtgtagctacatgcatatgtactgaagtactgatggacatttagagctgctcagaaggaaatatgaactacgaacataggatagatctcttatacgaaaaattgcttccaaggtgaaatctcttaaatacaaagttccaattgatagaactgagaaaaaaagatatagtggtaaatatccaatagcataccacagatcttgtgttatcccaggagaagtaagttctgaagaagcatggttcattcccttcaacgactttgtacagaggcacatcaggagaaagagattcgaaggccgccgcatgttctgcatatttctgagaataaagcagttattgctgagttgagcaaagatgatgatatttaagtcagcaagagtaaatcttcatatcatacctggccaatttcaaatgccttctgcttctctttagcatccacacactgacccatccaaacaaagacttccccatgtgtatcaagaaccatcatgtcttcagtcagcaaatcatcttgtgaaaagttgaaaatttcagtgacctgcaaataaaaaggtttttgagaaactaataatcccaaattgttgaagcatgacaataagagtaagacaacatacctccagtttccctggtaaatggtgatcatgtcagtgcaaacgaaaccaaaaaaaaaaaagagagagagaaacattagggctctgatagaatataagaaacacattgaaacaacaacaggacaaattcagaatcaagttttggctggaactaaccattcctcaatgagaatgtatacaagtgaggctctctaacaacatcatgtgtggcatttctgcttgtgtaattctgctttccaccaagagcaaaccaaaaggcagagctctcagttccctccttgcaatgtttgacagcaacaccaggctgcaagtttggaaacatcagataatcgtattgagtgagaaatagctaggaattcaagaaaatatcaaatgctttcggtttattcagaacaaaacattctggagcaacaaccaagttagttctatcacagcggaaacagatttccagtagttagtaacctcacagggatggtatatttgtgctagtccctttcattcatattggtcaatcacataaaatgataactgtactttagaatccaatcaacaaatgtgtgcccctctgaaaaaggtatgccttacatatatagtttcaaaaacacatttggataatatagtcagaatgttgtaacattgctaatctggactaacagtagatcaactggttgtgacaataggactggtacttattgcctacatgatcaacttcagtcttaataaccatgctgttggaagctttcttccaaatcaagacacaaccaccatattttccttcctaaaggttcattttgaatttctataaaagttcccaagaacagaagacattgttgttttcaagcccttaaactttctactttctagtggacattttggaatttggatatgatcataattagcaaaataaaaaaaagaagaagaagaaaagaaaaataacaggaacaaaatttgaaaatatatttttgacctgcaatataatattcaagtgcccgcataaagaaattctttccaataatgtccacagcatttttttcccgacaataaccacatgaagtggaatattaaatggggtttcctcatttcataccttcaagaattcagcaacttttgcagcccattgttgctgttcatacgaactggcattgccaatccatgtaaacattgaatttccagattgcaggacaaaacaatccgtgggactcaagtttgatgacacctatagaaaaatgttacttataagcagatgggcgcagtaaattaaaatttacagataatggatgcctgtgaatttcaaatgagtctagtaagaagaaaaaggtcattgcaaaggacaagaacaatgtggctaaaatgaaatttctgcatcagcagcacactcagaagaaaatcaatcgatgtatttatgccacactcttctgtgtttccataaaaagaaaaatacagacaaaaataatgcaaggtagattctctagctgcaccctaaggaaatcactaatcaacattatttgagccctcattgtttatctgtttgcagttgttatactctacaatctcactaaggccatcaattatcaattatgctattaaatggtctacttaggcctgccactaggaagggtatgggtgacccatatccatacccaattttacccatatcaatttcataattagctgggcctcacatatacaaatggctcaaaacttgcacaaagttgcttctctgcaataaatcatttctacaaaattcaaccgaatttgacaagtttttatagtgcggatgcaagttttaaaattttgggtccaagctttacacacataaaatgggtatgggtggtaatgatgggtattaccctcccctaatcaaaattgaaatgggtaattcctccctacccatacccttcccaaatagtgtgggtaagggtatgggtgtgggcattggatacccagtggcagccctaggtctactctgtcatgtctctatatatgagcacatagaattttagaatagtttgctattataaagtaccattttgaaaacatacaaaaccaccaacaatattatcatgttgaatcttcataggcacagccattgcaggagaggtaaatattaccgcatcaacttgaagcactttattgttgtgaattgatgttccagaaattcgaaaaagagcaatgccatcgccagaatatgtttcatccttcaagcccttttcttctacaaatttctggtatccagagctgattccaccctgcacaatatgccaaatacacttaactgatattgtttgaattgagattggacattacagttcagctatatagacagtgcgcacctagttccttagagaacacccactattaccaactgcttctatttaacatgaatatggtaaggatcaagtaccatacctttagaatgaccatgggctggaaaagggcaataaattgtggtggttctttcccttgataaatacgaccctacaacaccagatataatgtatcaaactcctttccagaaaatctgtccacattgtcatagtaggaatacagtaccagaataggccttcctttcagtgaattccaaattgaattagctgtttggaaagccatctcttgatcttcctgtatgaaatcaaccaaagagtaagttcacagatcacacaacagtggtatgaggcgacaaaaatgttgagtatatggtacttagagtcataataggataggattgatttgtatggactccttccttatctctaaatccttccttatctcctctacatgtagtcctatatataccgccccccaaggctcaatacaatctgtccaatatttgcagtatttctctccctatactattcaacatggtataagagataattttgtcacccataagatgatactccctccgttttataatagatgacgttgtcaacttttggacatacatttgactattcatctttttcaaaaaaaaaaggtgcaaatatgcaaaaatataagtcatgcttaaagtacttttaatgataaacaagttacaacaaaataaatgataattatgtaattttttaataagacaatggtcaaattaatgtccaaaagtcaacggcgtcttctgtaaataaataaacagagggaatatttattttcacctgagatgactagtaatatttaattgcacatgagaactggtgattatttgacataaaagtcaagctcttgatgagaacacacataacatggcattgacaggactttgtgttgatcacagacaaagtaagaagaaagcactatagtatagaagttcaagaataagattgccaactactccctccgtttcacaatgtaagtcattctagcatttcccacattcatattaatgttaatgaatctagacatatatatctatattcattaacatcaatacgaatgtgggaaatgctagaatgacttatattgtgaaacggaggatgtacattctaaagcttgggagcactggaaggtacattaccggtatgctgtccttgccaatccaataagtcaaataaaattcttctctcttgtcaccagaatgatatgtatagagaacaatatagcaatctccgctgtaaaactttccaagctcctcctttggaagagcagtcttagcactgccattgacacaataaacctgaaatatccacatgtttcttatggttacattcctattattgcattttcccagtcttcctttatagttgctgaaagcttataaaatatacctcaagttttccatcgccttctagcaaaggaggaacttcctcgtctactggagcgctgctttttgaggctcccttgatatcaactccttgttgcttcaacagagctataggaaaagcaaatattatcaagaatgatctaagggtcaattattttatctcagagaacatgaacaatatacacaacctgcaactttccctcggccttcctccgcgccagcacttcctgcactatttactggccatgattcaaacttagacttgaatgtatgattctcgtacccttgaatcactcgggttactcttgttgtctttggcctattttgagtagcaatgaattcctacaaaggcaaatttagatcctaacaaatttgaataggcaagaaaaaaaaaagaagaaaacaatggcttgagacttacctcaactgctgcacttgcagcttttctctcctccacttgtgttagtcgaccaacccatataaataaatcagacccacagtcgaccaaaaagcacttattgttctcaagaattgattttgtcagaactgtgtcttctaactttaattgaccattattgatgctgcaagcagttgatggcatggaaaaaaatcaggatacaaaaataaagttaagccactgggaaaaaaagtaagataaacatagcgatatatatatatatagtctcagacctaaggatatagtaagcgtagcaaaccaactaaaactgtgatacccatttagtctatgctacaatacaacactaccaaaaacctgagaaaacctatataaaacatgggaaaactattaaacttatgagaagcctttgaaaaggtatgaaacccttcatcaaccagaaaaggacaaatcaatttattggtaaaaatgtatctacctaaacaggaagctatttacagtaacattaagctgcaaatacatacagctaaaatggttgtatctgcatactgaacattcgttgaaattatgtcagaagttgcttaatgtactgtcagaaatccaaaagtaataaagttgaagtaagaagtcctaaaaatggatgtatgtaattagcatcgatacttttcaaatagcatcatcttaatacataaatatacacatgccttgcacacaactgatggataaatttttggagttttatatgaagtttagcagcctgtgtatgatcagggaggaagttagtccatgccatatcatgtgttagaacaatgcttttcggcacagaaattcttcaatgagcgcaccctaaaataacttcactgtgaagtgcgtaccatacatagggaaggcaagaatatgaagttgtttggagcatctgattactaaaagacaagggtcctatctggattcacaattctgtaagcgcaatttaaaaaaaaaatcatacctgtaaagcttgggggctgtggtttcaagaacaacatcatcgtcacatatagctttcttccctattggtgcaaaacctccaaaaagaacccagaattcaccagaatctgattctgcttgcaattttccatcatctatcacaaaaattttgtatgaaaatgtgtagatttgtgccagaaagttacatgaattgagatttggttgtcgagcataccaacaatcgcaacatcacacactccattgtggtatgtctcctttaaatgttgaatcgcttccaaagctttcgctctctcttgaatattggagtttgcaccattgaattgatatattttcttttccgtatccaagataaatacatcatcatgattcaatgacgagcgagcaaatggaacctgaatataggacatttagtgtatataacatgaggagataaagtagtctaagaaacagggaggtgaaatagtagtcacctctttaactctgatagctctcttccctttgcaaatatatagccttgtttcaaacttatcctcttcaggtgttttaaacccagaggcgaaacctccctccaagggtataatgcatggtttaaagtacgataggaacttatcagattcatagccttgaagttctctgtgctgcactgcacgacctccgagcatggtgtcaagttcaactgtcttaattgctgcagtcccagcttcatcctgaatgagaacacatcaaatcaagaagtgggctggaaatgccatttatcagtacatgaaacttgagatgttagagaaaatgtacttgactagaatctttcccaatccaaaagtggatgtcaaaaagataggcgccaccacctttgctgcaagtcgtctacaaaacaaaatgaacagatcattgaaactttccatagtggagataacagaaagattcttctaaaatgtaaatataaaaaaaatcacctggagaactatatatgaatctccattgtaaaatttaccgtaatctgcttttggcaaaggaactggcttaaaatcttgaatcctccatatttctgtgccactatattttaattaaggggctaacagcataaaaggatagaaactcttgtacgtagatttctaaaagaagacaactaaaacaaaccataaaggcatttaaagaaggatacggtttttggccaactccttgaaatgcaggatcaagcactggttttgcacttgacattgagcagcaactttacaaaggtttaattgaaaacagggtagtggaagatggctccaccacagaataataggaacttgcacactgaaaaggggaagaaaaaattatatgtcaacaagattagaaagaaaaaatagccaagctaatttggacttctatacatggatcgaaagaccagatgttaaaagagcaatgatattcaaacaaacaatcaactcgaatcaagacaacaaatagagtagttagctgttgggaaatatgaatgaatggaacacacaagtgaatgatcaaaacgaacatatcctgaatgaaaccatcgtaaaaggggtatatcatgaaggaaagcatcatcaattgcatgcagcccagtaatgactcaccagaatcgcacaatttcactcttataaacgaatcagtaagtcagatcaaaacaggtaaaccggaataaaccatacacgacgtgctgattacatctacctgagcccccatctacatttgaaagacactgtaacgtagagtacccattatatttgctaatggagatgtacccatcagaggactgagacccaaatgcgcccatctattctgattgatctcatcacgaagccagtggctgcacagcgccaccggactcatgcccacaaagcaatcgcccccgtattctcgtcaaccacatgggctgcattacgagatcaatcaaaccaaacacatcatatgcagatctcatcacccagctccctcacaccaatttggaagatgtgtgctcgtgttaatcatcttctatccatcagattggctgcacgagcacgtgccgacggcagccaccaaccagagattgggaaagctgattcggcgccacccaaccccactggggtcactgatcagctgccagtcaccaccgcccccaaagcggaagggagcggattgagagctaatccacggatcaacccccgcacatttcgcctccgatctcaccgatcggttaggcaacccacccacctagacaccccccggatcgccggagacgaacaccattcctgacccaccccgcgcccctctctcccccacacaatggccggcaccaccaaccggaacaaacaacgccgcgcaagagcggatcgtcgagcgagaaaccaaacccaatccgcttcattcccgaagaaccaacgagcaattgcgcgcgcggggagacgcacgacggcgagtcttcgatcgaggagtcgagagggggtacgtacctggagaaggggaggaggacgacgacgacgggatccgatcggaggctgacgggaggggaaggggaagagggggcggcgatcgaggtggccggcggaaaagcggagagaggggtgacgcggcctaataaaggaagcggggcgctatgattgctcccttccgctctgcctctctgtctctctctctctctctggcctgtccgtgcccttgggctgggatgggaggggggaggagatgcgaatgaatggaacggggtagatctggcaaagcgcgctccctgtttttagagcgagcgtggcgagagcggcgtcgagcctgggccggtggccgccctggggtccctggacggtgggggaaagaagtggcactaggctgtagcggagaaaatggggaggcgttttcctcgatggaaatttgaacggctctccctcttggctaacaaatgatgtcatacgtcggtgtcaaagtaagcgtattattaatacggtcaatttgatcctttcattttatatactacctccgtttcttttttttttcattttatatactacctctgtttctcaatatatgcgtattattaatacggccaatttgatcctttcattttatatactacctctgtttcttttttttttcattttatatactacctctgtttctcaatatatgatttttttttatcgacatctgatcattcgtcttattaaaaacttttgtgcagatataaaaaagtttaagtcatatttaaagaatatttgataataaattaagtcacaataaaaataaatggtaattacatgtttttttgaacaaaacaaatagttaaaacatatttttaaaaaatcaacgtcgtcatatattaaaaaaaacagagtgagcattttattttcggttaacctaagttttatttggagggagagacgttttactcctagtttgttgttcgatagtagagatgataatcatgagtcaagtgagaattgaattgtacgcaatgatatacggctttagatttatctagtcgtacctagaagagaattatgtcccaattatatacccctgctcaggcattaaaaaggtgggagttcgctcttaaacttttaacgcccaccaaccgtcctcatttttaaactcatattctctactaacaatttccccccaacttaataagccattagtctctagcgtttcattttgttcgaatcggtccttgagcttttgagctttgctcttttgttccatacgatccataacgcccacctaatgaatcgggtgatcaaggcaactcaatgaagatcaatcttgttgatgaatgtgacgccctgcacttttaacattgaagataaaagtgccagactatagattattatttaacaaactattattcccgcacttttaacattgaagataaaagtaccaggctgtagattattatttaacaaactattattcccgcacttttaacattgaagataaaagtgccaaacggtagattattgccaaataataatatagcacttttatcttcaatgttagaagtgcgaactgccaaataataatctacaatctggcacttttatcttcaatgttagaagtgcagggcgtcacaatgaaccatatagctaaaagactaattcaccattatattttaaattccaacataaaataacaatgataaaataagctatagaatccttcttaagtagtcatgggaccaaccgatgtttattcttagacttgtttcattgttcggactataggatagatataggatagtgaagcaatggaaataggaaaggaatcccaacgtaaactagggggttaaaaaagagtttgagatatgtcatcagtatctcaatgacatgtaggacccacatgagtcaatgacatataggatccacatgggtcaggatggcatatctcaaattttataaaattataatggcatggttacaattttcccttaaaaatatatgtcagttctatcttcctccatccttctttttctttcttgcccatgtgcagttgaggctaacggagatttttatgtgcagttgaggctaacggagattcttatggaaaacgcgacggagtggcaggttccaattccctaaattcccatgacacatatacaatctaaaataacatatttgtattggcatggatcgaattaacccatcgtttttaatgtgttttttcccgtggaatcgatggtgtaggaaaatttcttgtgatttttttgtgtttggcttttgcgatccgaatggtatgaaaaggaataaaaacctatgaatagtattcctccaaaaatcccatggctatcctgtaatccgaacgaggcctcaaatatatacacaaggatgtaacaatcatttcgctgttgatatcaacacaatagatacacaaggctaaacttttcttgagttatgttcgtattgtagcatattaggttcatccaattaccacgttgacccaaaatgcaagctttaagcactgaactgtacaaaataaagcgttacttactccatttcatattataagactttctatcattgtccatattcatataaatgttaatgaatctagatatatatgtgcctagattcattaacatttatataaatatggataatgctagaaagtcttataaccaactgtcaaaatagcccttaagtgaaacttagagggacaaaattgactattctctcttgtcactaccacaactcattctgttcaaagtgaattctcgttagtttgccaatcatcgatcataccatggatcaggctacaatgcccagaggtgttacacagtagtatgttggtgacgacaaaagctgacaatacctactaagacaatgcataaatgtcaaggatgagcaccgaagcaaggacaactaagaaaatgtcgcaacagaaattgtactattggggtgtttagattcaggggtataaagttttctcgtgtcacatcggatattatatagggtgccgtatggggtgttcggacacaaataaaaaaactaattacataatccattagtaaacagcgagacgaatttattaagcctaattaatccatcattagcaaatgtttactgtagcatcacattgtcaaatgatggaccaattaggcttaaaagattcgtcttacaaattagtcgcaatatgtgcaattaattattttttagcctatatttaatacttcatgcaggtgttcaaacattcgatatgatagggtaaaaaattttgggtgtgatctaaacagggcctgtcatgtgacatattttttcatagacatatttttttagtattttctcttttccaatgtacaataactacatagtatatgcatgagagtttttcaccgattcctttttttccggtgcaacttaggccttatttagttggggaaaatttttgggtttggttgtcacatcagatatacggacacacatctgaagtattaaatgtaagtattaaacgtagtttaataataaaacaaattacatattccgtcaggaaactgcgtgacgaatttattaagcctaattaatctgtcattagcaaatgtttactgtagcaccacattgtcaagtcatgacataattaggcttaaaagattcgtctcgcaatttacacacaatatgtgtaatttttttacctacatttaatactccatacatgtgtccaaacattaaatgtgacaacatggaaataattggaaataatgtgccagatctaagatggtctacccaacgtcattcgccacaaaattccaatttccaaacctgttgtagtataaaggtggtactgtcctaagcaccgagagggttagtacgaacaaagctactctcgttagcgtcgttgccagatgtatagataaggtgtcacatcttgggtggaagaggtggatgccaaatagctggtttatggagaaaatttgtctgatgaatgtgggggtgcaagctaggttccgtcgctaacatcacgatcaaaaggatacagtgtagaagcggcagcgacttgagatggcaatggcgccgtttcctgtttcccgtttcctacagggaattctcttattagggagcagtgatggttagaattggttcttcgtggggatcaaatgggaggattgatattcccgccgggtttcacgggagcggggatggtcctccattccatgttcccgaccgccacggagagcggcatagggatacaagtttaatgctttttttaagttatcttatgtgactaaattacttgtaatctttaataaacgttaatcttattttttttatcatgtgacttagtagatatatgttaatatattaatataaaatatgaatatatgtgttacattgcatatataatttgatatgtatatattgttttaagcggggacatagaccccgcgagggttaattccccatgccaggtggggaaaattttgttattaggagggggatggggatgcattaccccgtggggaattcccaatttccatttctagcggtgatcggccagcaagtggaagagctcaacatctcgcaacacggttagcggaggatggtagctaggcataggcattcgatagttcacaggtggaggagacccggggcagaacttgacaatgaccagagaacgggctacggatgggcaagcggaggatttgggcggtgaacgataggtaagcggacgagtaacgctatccgattggaagtgaacaggtggatgaaaggtgaccggcagacatgcgaacaagcggcgataccgggaagtagataactcagggggtaactcgacgacgaccggtggacaggcggacgagtggtgacgattggcgagcgggcaagcgaagtaacagcacggctcacactgtgcgcccgtctaagtgggtcaagatggtccgctcatttttaccgaacggtttggacccggaactaaggagaatattcctctaaggtgataacccatcccacccatctccaaaccaaacacaatagtaaaaaatagagtcaacccatcccatccttccaaccaaatagtacaaccttaggttcttcatcttcttggatccagcgctagcaggaggtggccgtagtagccatagacgctagcaacaacaaaatgtgggtcgaggtgcttaactatggcgctttgggcagcacatgaccatgacaccgggatatgtgtgacacgtatgggctcctcgcgccaaaccgttgtcgatttacctcgtccaagctatacctttttctcaagctcacccaacgtcgatctctaccttccatatgagctcgcccaccgaagcttcaagccctctcggttacctcctcctcatcatctctttctctccttccaaactagtacgggaagacatgttgatgactagctagctaggtcaggtgatgatagagcttctggagaaggtgttaaagggtgtagtggcccgccatgccttgtcaaattccgtgccatgatgttgcctgcaccgtcgcttgccgtagtttctcgctgccactccttccttgcgccctcgtctacatcacggcaagctgccgcttctcccttctattgctgtcaccgctcgctgcaactcctccgtggctttgctaccttgcaatatactccatccgcctcattttaagtgcagccataagttttcgcacccaacttcgatcgtccgttttatttaaaattttttgagtaaatttcactttggaccatatttgttgaccaaaatttcacattgggctagggctaggcttatgttttcacttaacaccatgtataattaccattgtttgtactttggacctgattttacagttaccatcacacgagttgttgtctaggtgcttagcattttacaagaaacaatgatatggaaatttttgccatgcaaatatgattagcgcaagaacaatgattgtaacatgttataggatatcctatcagattaatgggacttcattactactacatatgaacattcacaacccttatactagagacaaaattggagaaatattgagtttaagaactatttttctagaaaagtacacgttttacaatacccaactgtagtgttagttcaaattattgaattctaagttttctaaaaaaaaaagaaataagatcagatctacaatcattatactatgtgtaatttgtgaaacccggtccaaagtataaattatgataactatatatggtgttaagtgaaaatataagtctaactctagtccaatgtgaaaatttggtaaataaaggttgaccaaagtgaaatttacttaaatttttttataactagtatttttattattatgagatgataaaacatgaatagtactttatgtttttaaattttttcaaaaaaattctaaataagatggacagtcaaagttttgcacagaaaatcatggttgcacttaaaatgagacgatgggagtatgttggaaacaactagtctgtcagaaatacaatatctatcaggagaacaacaaaattatcggtacccatatactggtaaataagaaatatgtcagtgcatacttttctcgactgcttgacccctgacagaccctagtggcaatctaagtgacagcaaaagtctttaccacattgtgccatcaatagctgtttttttttcccgaccgatcgagcgtttgagaaacaacacgctgaacagctcaagaaatcgagcttatctctgtatatatatatcggtgattcagtgtacacgagcgcgggcaagcttaatcatctctgtttctttagaagacaaacgcagctgcttttttagaaacatctcaggcaaggcaggcagagagacgatcgatcagacttgtgatcgcaggtgggccgggcccacgcccagccttaaccacgccagcgcgtgtggcccctccggcccggcacggcagaccacagcagcttcaatttcttagaggcacacgtgggccccacatgccagccagcgtgccaagacaatgcatttggcatcctcctcccgaagatgacgcacacgccccctgtgtgatccgtccctcccctccaactccaccgtctttttcctcctctttttgtagagtggacacgagttaagccacgacatcgatagcaagatggtgccgatacgtacgtactgtactagtgtgctgtagttgactcgatcagagtaatggtcaggctttcgtgatcggaaagtggtttgggctgagttgtttttttcactttgctaacttatttctcccatttgccatgcacatatttttttaaaattactaaatggtatgtaatttttgcaaaaataaattatacgttaatgggtaacactattttctatacgaggctaccgaacacagtcgttgagtggacacctccgcgcggcgttggatcagagataggtgatctctctctgtagcacaagcgcgcgtcgtgtcgttggattcgtggaggcgaagcatttgtgcaaggcgagtacgacgcgtacttcagttgatcaatggatgaacaaaagaaggaacgcatgaagcaacggcgtgcacttccgttgatcgatcgttggatcggtggaggtgaagcgtctgtgcaaggcgagcacatcgtgtttggaaggccgcctgcggcaatggcaacagcagcaacaaccgcatgttactcttatgcttgtggcactgttgtcgttggctgcaccacaactacaaccacggctgtcgaatagacccttagcagaacagacgaaagcaatagaaaagaataaccaaatggctggacagggattcagattatttcagctccactacagtctccatttctaagttagatttaagagttagagaggtactaaacatgttcttaaatttggaccacatacgcatacgtaatgtacaggtatgtgcatatatatttcggatcaataatggcataataacgtgcagtagcataccatgtgtataaaatctaagttcagttcttgtattttacaggcatctaagaatgattattcggtggaccacggttatccaatattgttacagtaaggcacttaccacaataacatatgttaactgctaaaaaccacgtgaatttcatctcaaaatgttgaattcaaaatttcaaaaattgtagtaaggtttacgataacaacacaataagatgctataaccgtgttctttgacttgaaagagatcatatggaaaaaggatactacaacatcacatttgactaatgtcgaatatactagatatatattactactaatcatgtattatttgtagggattttttttaaagaaaaactgaattcgaacaaatttaaccaaactctatcatcaataacccttgccatacttttagcatactttcaggataaacacgttacccgcaaaattaccggcaatgtgaaaaacctaggaggaacccatcttagattcttatatctataatcgcatacggatctaaaataagattaaaggggaacccatctctttcttcctcgtcgcaccccctctcttcctcctctcccttccctctttctatcaatagtgatgcagtgagatagggggacttgatcaagtcttcctcctctcccttccctctatcaatagtgatgcagtgagatagggggacttgatcaagtctccctaaccccacgctagatccatcccattcgataatgaattcatctacaaaacacatgtaaacgtgaaccacattactctgcaaaagaacctacgacgtcgatgacccgcaccacggtgagcttccacactgatatgttcatgccaaatactcccttcgtattttaatgtatgacgccgttgactttttaaccaatgtttgaccattcgttttatttaaaattttcgtacaaatataaaagtatttatattatgcttaaagaacatttaatgatgaatcgagtcacaataaaataaatgataattgtataatttttttaaataaggtgaatgatcaaatgtttggataaaaagtcaacggctacgtatgaaatactgtagcagctgagctagctacccacacaaacagtagcactgcacgctggcgagccccctacctagctcccagggggatcgtggcgaagacgatgcgttcgcacatgcttagcttttaacgcgaggatccttttgcggggcgggcacctcccatctccccagctcgcatatattgcacgcaccgctgtcgaggggtgggcccctgccaaggtccatgtgtgctcgggtaagctgcattgattaatcatgcatgtactctcgctagctacacacatgtcgatcgatccgtcagtttacacattgtggctgatcagcgagtgtgtgtgtggctgtgtgctgctgctcgctagtcgctttacagcaaacatgctggcaagctgcgcagtgtattatatgccagatgcataatcatgcatgcatgcaggaagggttgattaattaactaattaatatcactagattggtataaagggaactggccagttgattaaaccatagtcgatcggcgcattcgtactatcatgtggacaaatctatatattcaagcatgctagcgcagtagcgcgtgagtgaagatacataatatactcactcactcagggagcttcagttgtttgatatactcagggagcactaaccttgaatggttaaaaattgaacatcacataagctagcttagcgcaaggctaatagtataactcgctactagctccaattcatttatagtcaatctaatagccaattcatataataattgcttactatactattaatatatggtcccacatgtcatacacacattacatattggagtccgcgctgcagctggctacagatctgtagcccgctgttcttctctctcatagcaagtttaatagtatagcccactactagcttcaatttatctatacccaatctaatagccaattcatacaatagttacttactatagtattaatatatggtcccacctgtcatacacacatcttgtattggagtccgcgctgcagctagctacagatatgtagcccgctgctcttctctctcatcctttatctcattaaaatatgtttacaactagttaatagcttgctattgtacttgctctcatcttttatctcattaaaatatgtttacagctagttaatagtctgctatagtacctgctcttactggcacatcggccttggccttgaaatacgtgtcttacgtacgtgttcttgcagtattgtcctgcaatgcttctagaatggctgcgccaaatctgggtaactacgctagattgcttaagctgatcatatggatgatctgttgatctcttcgatccggcggacggcggtatatgagtgtatctgtcatcaataaaccgagttccattttcatcgcatgcaataatttccaacaaggtagccaacggtcaagcgcatgcagcttcattatggccttgtttggataacatatacaatccgccccagtgaatttagttcaaaatcccggtcaatttcatgggctcacggccttccaaacaaggcctcaagggcatgagcaatatgttggaggaataagttcatctgacatccctcaattgtacgcagagtctgtttaaggtcccctaacctcaataccagaaatgtatacccctaaactatgcaaaactgtctaaaaaaggtcccaaggtagtatagatgcctggtttcgctgacgtgatatcctagtcagcaaaaaataaaaaataaaaatatatggggcccacatgtaagtgaaaggaaaaatatggggtccacgtgtcagcattatcttcttcctttctcttttcttctcttctcttctgacgttgacggtagatggggagagacggccgccgatgaccccgcgccgctcgaccttgtcgatggcggcggcgaccaaccccggctcccctgagcccaatgcactgcttggcctcagtgctccgaaccacccaacccaggcatggatgagagggagatggcggcgaggagagcgccaagcctagctcgttgtgccatgggtggtgtgcggcgttgcgggggatgggatttgaggacgacgacgacgtggatgatgcggtcggcaaagtcgtggacgatggcgatggactcgcaaggccgccgctcggaccccatgttaagcgccatcttcaccctcgagaaccccaaaatggcgtaccagaaccgccccgtggaacacgtcgacaaacctgccgctggcagtggagccaacatcgacctctgcacgagtgccgtcgtcactgccgtccccatgtcctcgggagcagtggaggtggagacgaagaaggcgggcgagagcggagccacctctttttgccctatcccgtcggcctcatctcccccttctttggccgacttcctctctcccctcactgtctggcctcatctcccttctctccggccatcaccagctgctgtcgccgccatcgccgccgcctctcaccctctactaccagcgggtgaagaagagaagaaaagacaaaaaaaaaagaaaagaaaagaaagaggagaaaaaaaaagagatgttgactaggatgtgggccccacataatattttttaaattttttctgactaggatacagcatcagtaaaactgggcaactatactgccttgggaccttttttttttacggttttaaataatttaggggtacacatttctggtattgtggttaggtgaccttaaacaaactcagtgtacaattaagggacgccaggtaaacttattcctatgctggaggagggaaggcctagtttgatttagattactcaacggatttttgccgcggatatactcaactataatgacttaggctgtgttcggcagcccctcttcccaacccatcttcctcattttccgcatgcacgcttttcaaactgctaaacggtgttttttttgttgcaaaaagtttctatacgaaagttgcttaaaaaaatcaaattaatctatttttgaaaaaaaattagcaaatacttaattaatcacctgctaatcgctgctccgttttccgtgcgggcacttagtgttaggaaccggtggttccgaacacacccttaatggatgcagtgacttaataatgaataaaaatttgttttcattccatgccttttttctactcccccgtttcatattataagttgttgattttttcttagtaaaacttttttaaatttgactaagtttacagacaaatataatattattttcaatacaaaacaaacctattataaaaaatatattcaatttaaatttaataaaatagtattatagatgctgctattttttttataaatttgatcatatcttaaaaaaaaaactttgatagaaaaagttaaacaatttataatagtacttgattattgtgttaggtggcggcataccccgtgctctgtgtgcctcgtacgtgtacgtcttttgtgatttttttcttgggttactgacagtggaaaaatagtccaacggcattcggcaaacagtccaaatcgtccaactcgaccgcattatccaaaatctccacacaatcgtccaccatctgaagcaatcatcgttgcctatcatctcatcatttggagaattcgagggagagagagagatagaatagtagactagagagccactcgggcagttgcattagacgtgaccacctgcggcggcggaagcggcagtctcgccgccggccggagtcgagccgggtcgcggcgatgaggccgccgacgcctctccccttcctgctgctcctcctcctcctcctggtgctcctcctcccgtcgccgtctgcggcggccgcgggcggcgccgacgggtgggaggcgatcggcgcggcggcggcggggggaggcccccgcagggtcgcgtcgccgggagagcaggaggcggccgccgccgggttgctccgcaggctcctcccctcccacgcccgcagcttccgcttccagatcgtctccaaggtcggtgcgcgcgacgatttctgactcgggggaggcgaaacggtcgcggcgaaaattacggtcgctgctcgattggatcaggatggcgtcgtcgctgacgggtttgactttgattctctcatccagggtggcgtctgcggcgggtcaagctgcttcaggattagtaatgcggatggctcgcgcagaaatggagcagaaattctgtacgcttctaccgctctcctctgtgtgtgtgtgtgtgtgtttacttcccagttttttttatttggaacagaattctatcctgcttccacggtttaaatttagaatagttaaaattatggagttatggtctcaaaattggctttgtttaaataggagtggttttgtaggaccttcaactaagtctgatgctatagcacagtagcacttatctatctgatgctaataaaactgtaaaatatactaatgggttgacataatgaaaaaacgccagtgcgaagtatctattttggcaactgttccttctcatgccggctgtctcttttagtaacttttgcattttgtttttcaaaactcaaaacattgccttcagctgagcatagataggggaatgaatggagaacaatttgttgatatacggctaccaaaactgaaaatttgctatggttacattgcaaaagtgaatgcaattacttatcattgtgttcaggatccagggtaccacagcggtcgagctcgcctctggtctccactggtatctcaagtactggtgtggtgcacacatttcttgggacaagactggtggcgcacagctggcctcggttcctttgcccgggtctctaccgcaagtaaaagggacaggagtgaagattgagcgacctgttccgtggaattactatcagaatgttgtcacctctagctgtgagtttcacaattttccttttttcataatgtttgttctgctccatagaccatatctgctcagtcttcaacctccagctccaaatcctttattatacccaaaccacttttgtcaaattggtgataatattatattgcactctgaaaaaatgatctcttttcctttttatcgagttatggaattggtcatctaggtctgttgcaaaacaaatgcttgttggatttctaaaacgccatcatgattatatgtttgtactgatgcaatataaatctattattgccactgtgcgtgtcaaattgaagttcttttatttggtctaagcatttcagtcctgcaattctgccaaaagttttttttttaatttctgtattctacctgtttcaaagatctaccttttgttcttttcaagatcaaaccacacatttttagtttgtaagaaatatctcccaatctggctacttttactcttctttacttggtttccaactgtttatctctgacaaagttcatgtagcatctctatagactcatttgtctggtgggattggaaaagatgggagaaagaaattgactggatggcacttcaaggaattaatttgcctttagcatttaccgggcaggaagctatctggcaaaaggtttttaaggtagtatgacagacacaatttaaactctgaagcacattttcaaattctttttggagtctaaattgttaacatacagcaaccagtgatgttgcttatgatgggccatgcatataaattagcagaagctgcgtctgtttccttacccaataggttacttgggctggctcagtccaataggatgcgtgatcttctctctctctctctctcgcttatctaagggaactttacattctagaaagctcgaatcaaatactctaatttatctccgtgtctgtcactatttggaatattatctttgctgagtgccagtcttttgtgctgccttctataattttatcgaccattttcccaaacgatagtcgataaaaaatttgcattaactgcatactaatctgtaccattgctgttttgtgatcaatctggcatctttaaacattacagatccagaagttatcttcagtttgacatttatattgccactgtttttgttttccatatatgccactgtggaatcataatgcaatttttgctgtgttcaatcccttgctgatgactgagttctatttcagagttttaatgttacagacagagacctagatgatttttttggtggaccagctttccttgcttgggctagaatgggtaacctgcatgggtaagcttagcataaatttattataaagtatttgatctgaaaataattatgagataaatagtacaataattaaaaaagaaataagggtatgttgtctatgcccttttggttttagttcacagaggatagtggattgctttatgtctaacaaaagtgaaccttaacaaaattatcacccttctaaaatacatatcctgttgaggtgttcgcagtttgaaattttttgcctgaggaaaatctttactgaagctaaattaggttagacatactacagaggttttcctctcagctcaaatcatttctttcagatgacagacaatactttgtacttcttaaaaggttaaccatggcttgcattatcagggacccacatagccagtacatagcactgcccaaaacattgaattgatatttttgtagttacacatagtatgctaattatgactatttggtcataggatccttcagttagcagcatatatttgttagtatgatgtgaaaaaaacagtgcagtttgatatatatgtttattttaaaacaaatcttagatggggtggaccactatcacaaaattggctggatcaacaattgacactgcagaagaaaatattgtcccgtatgattgagcttggaatggtcccaggtaataatttgttttacattgtagaatttcagctctttacttctttagcaattgtttgtctatttatgtgagacaaactttggacatatgctattgtctattgtttgtctattgcatctttcctcgtttcatgctatgtttaaagctttgtcacatttgctcttatcctatctttggagtcaggaaatatggagagtcagttaacatatcaatgttaccttcgatgtactattagtatagtgcactaaatatttgattctggttatatacttcactgacattaattgcaatttttcagttctaccatcgttctcaggaaatgtaccgtctgtgtttaaaaaattatttccatctgccaacataaccaaacttggtgactggtaatgcactcttctgtgtcatttccattagttggctgacatttcatgctagttcaggtgtgaccaaaatttcaaaatcttgtctgtgttttatagtcgcagttcacatcaagatacctattttataactactgttagtttgggggctggacctcaaatttggtgttgatgtattcatgctttctctttgctaaataatttccagagtttataagtaaccgtggaataaacagataaataagtttcaggctatcagtcttctgttcttccttggcattatgtgggttgtaggtacagggtaaccatgcacacaggatagtttgaagtcattgtttatatgatcgaacatactttgaaggtctagtattctgtttcagcccatgaatactgtatttacagattcctttgcttcaggaacactgttgatggtgatcctaggtggtgctgtacttatcttcttgatccttctgatgcattgtttattgatgtggggcaggcgtttatcaggcaacaaatgaaaggtcagagtctttccatgaaaagataccagatttcatttattccaaacttccaataccttttgactgttctttcgccaatagcttcacgaaattgctgcatggattactaacagtgcaattttaatgtatgtttttataacctgcatagggcgtgtttaccattctaattgtttttgtattttgcagaatatggcgatatcaccaacatctataattggtaagctctgactgatctgcttctctgttttttttttcagtagaatttgcatgaataatttgtttcttgcaaagtacctggactgtacaatacactatagtttagcatttttagcgcaaatgattggctctccttgtaattcatggagatgaaccactgattgttaattttttttttaaaaaaaactataatgaaccttgatgcaagaaatgttgagtgcaaaaatatttgaacatataaggtacttaataccaaaacagttttgtggcaaggtttaaaaaaaaatctggtttttgaaaatgacaagagtcctttcctttctcctcacttgattcttgctatcaggttagaagattttgttcctgataccattcagaattctacatgatatccagataattccattgatatactggttgttgataaaaaaatgtaatattattggtgtattggtttgctttgttcattgatttagtacttatttatgttccttgtccacaatgtctttcatacattatgatcaatatttattgtttgttttcagtgacaccttcaacgagaatacaccacccacaaatgaaccggcatatatttcatcacttggttctgctatttatgaagcaatgtcaagaggtaacaaggatgctgtgtggctgatgcaggtgtgcttgctctcctttttgacctttgaagtgtaaaatattatgtattcaatagcatcgccacattttccaatggaaaaaaaaacatatggagtacccattcatacttgctttgtcccagtttgtagagaaaaaaaatgatgtcttaccatgctgtagttttgccagtaaaaaatcatttgccctaagccacagtggcatatagtgtttaattagcatagttttcatgagcacatgttacactcatggcaatttttgaacattagtataatcttggaaccttcttttcttgattcagggttggctgttctactcagatgcagctttctggaaggagcctcaaatgaaagtaagtttcttcgttttattctgatttctgaacactcatagaaactatagttgagcctggactgatggatatctgtttcatcattctgaaattcgataatagcgaaagaatgtgatgatccaatgttcccttgtatcttgtttcttgcactcaacttgaatagagaaaatagcatctagagctatagatctttaagtgtgctcaatctaagttgccatctatttagaacctatgtagtgtagtggaaataactttagtacttatgcactcaacagtctaagagaaaccttgaatcattactggtgagatttatggaaaaaattaatgtagtgcttctcagtgtttatgctactgtgtttgtgggtccatctggatagggacaatgggacatggacttaattgagattgctaaagaaagctcaactgagaaatggctctggacaatctatttctttccaaatccaatcattccctcctttgtgcctttgtatttctagcttctcaaaccatgcctgttgagaactgtcttaccttttctatattctagcactactggtttgtcctagtcttctagaagcatgtaaggaaaaggctggctcatgggatgcagggcaagagagggccttctgcactaatgtcttttagtttatgcatacaataagccgtaactattatgaatgccgattcatggatatggtaaagatccaaagactggggaatacgacactcgcactaaattaacgccagtaaggctactccctgtcaaaaccaagggagtctgaggcttattggactaactttagagattcaattgtcgattgatagcggggtacacatggtgttcttttttagggagggatccctgctacatttccatgggtagaatctctacttttctaaaaaaaacatatctctaatttcctagtagtaattaactaacaactttcattaactgacagacaggataccaattgactaacccctatcctactaggaaactagttcattattaaggaaatagaattctaatcctgatgccacagtattatggtactgttcacacatggccacacagtggtgctaccatagcagtaacagaagcaaaatattatgtgtattcatatgaacgcatattactatattagcaaataggtagcaaaagcatctacctgtcttttccccatatgtaagtttctgctcattcttatagatggagataaccattgcctgttttgtctttcaggcattacttcattctgttccaactggtaagatgatagtccttgatttatttgctgatgtgaagcccatatggcaaatgtcctctcaattttatggtgtgccatatatatggtatgttttgactccaccctaaagcttcaaatcttcttatttcttaaatatcacttttatactctattagttgtaaaagtatgcatggtggttctcattgaaactaggtgcatgttacacaactttggtggcaatattgaaatgtatggcatacttgactcaattgcatctggccccattgatgcacgtacaagccacaactcaacaatggtacattttactctcttctattaatatagtgtagagcttatatgagctgagattgtccatcatttgttgcaccaaacttgaggtgaatctatcaatgagttccttaccactcctctaaaaaaaaagagttctttaccactgatctggcactgcagattatatatcatggcatgattcctattaatatgatacttacatttgtgccttacctcctttaggttggcgttggcatgtgcatggagggaatagagcataatccagttgtttatgagcttatgtctgaaatggcattccgtagtcaaaaagttgaagttgaggtatgtacaacaaacatgcatatgcctcgcttgttatgaaccactgtgactgtctcatctccttttcttttgtgaccagctcacctgtcttttctccataatactgcctgacatttttcatttgctgaagttgttgcatgtttccaatttgtcaattgccatctaatctgtattatctcccaggattggttaaaaatatactcctacaggcgatatggtcaatcaaatgttgaggtggagaaagcttgggggattttgtatcatacaatatacaattgcacagatggaattgcggtttgacatcatacatatgctcctctacaaattatgctcctgcattacaactgtgctatgattattgacaaatccactgatcatatcttctttcatatgtatattgcaggatcataataacgattacatagttgaatttccagacatcagtccaaattcatttagctctgatgtttcgaaacgaaaggctatttcagaggtgaagaaacataggaggtttgtcttaagcgaggtgtctgcaagcctaccacatccacatctatggtattccacaaaggaggctatcaaagcccttgaattatttcttaatgctggaaacgatctttcaaaaagtttgacatataggtatgttttataatcgccattggtccttcaaacatcctgatgccatgcattcttctttaactaggtatcagttaatgctgaactgtttgtttctagaggacttgtttcgaaaaatgaaatgctgtggcagtttcaacatctttatgctgatacatgaaattcatttctccaattcccagaaaaagaaaacaaaattatctgctttatctcatgcctgtttgatctgctatgcctttctagagcatagatgcatctacttagtttgtttaccaatcatgtcagaataatggcattcacagaatcaacccacattttccaggcttggagtagggaaaagtctgaaatgtggggacactaatggtgaaatgctcatgtgcgattgtaattatgtatgtgagagtactcacaattattaaaatagtccaaaaatgtacagcagagccaattgaagctttgacaagaatacaacaaaaatgaaacaaagccatgagcccatgaatatactcttgaacacaaatcttagccatatgttagaactttcactgccagctgctaattaatcaaacaagctgttctgcatacatgatatttttttttaaaaaagaaaactgtgaattaacgataattgttgtcacaggtatgaccttgttgacctgacaaggcaatcactgtcgaaattagcaaatgaagtgtaccttgatgccatgaatgcttaccgaaagaaagattcaaatggtctaaacttttacacgaagaaattccttgagctcattgtggatattgatacactactagcttctgatgataattttctgctggggccttggcttgaagatgcaaaaagccttgctaggactgaaaatgaacgaaagcaggtaaatttctcacccttcatccagtattagtcacagatattattttttttcttattattgactgactcaatttcttttttttttcttattgttgactggctcaatttcttttctatcagtatgagtggaatgctagaacacaggtaacaatgtggtatgacaatacaaagaccgagcagagtaaactacacgactatggtaatatatatagttgtttcctccataattttgaagtacatgccagatatatgtatgctagttatacttctaggttattaaccttcctgcctttcttgacaccatattaccagccaataaattttggagtggactgctgaagagctactatctaccaagggcatcgaaatacttcagtcgattaacaaaaggcctacaagagaaccagagttttcagctggaggaatggacgaaagattggattgcctactcgaatgaatggcagtccgggaaggagctctatgctgtgaaggctacgggtgatgctttggcaatttccagctcactattcaaaaagtacttcagttagctgcaattgtccacttcgaattattagatgattgaaaatatcacatttccagcccctgcactaggtgcacacgccctaactgttggaataaagccaactgtctactttgttgatgtggtaaataattcatacatcagaaacacactgtttagaagcttgagaatcgtgcaaatgaaggtcgaaaatataaaatgagaaaaagagcaggacctcagctctctaaagtcagtaaaatcacttagcttgaaaaacaactctaaaattctggatccaaataaaaccacaacaaggtaatacccatgctaaaataagttcattttgcacacataccgatacaaagttaaaaggactagggtgtctttactttagcaaatctcaatacaaccatttctcaattcatttacttctaatacattattctctatttctacaaactcagatataatgattactctaaaaataaatttattttgagacaaatgaaagaagctgaaagtaaacttattacgggacaatggaagtattttggtttgatgctttgatcctctttcagacttcgagcatgagtattgtacgtgtcttctctgtattctctccaccataaaaaaaattaatttagtattgaatttaacacatgctatacatatttatagtactagcatgttttaatccgatactaggttaagcttttatgaaacggagcgaggacatgtcttttggacacgcatacttcctccgtctcaaaaaaaaatcaacctatgagggatgtgatctgtgctaggacaatgtgtttgaacgtagggatgtctctatgtctagatacattgttcatatcctctcctcctagttgtttttttttttggatggggggagtaccagctagtcgtaggctgcgacagtgcgaggcgtagaggagacaaccaagtggatcccacatggccacttcacagcatcgatgatcggtcgcttgtgtgttacgagtagttctagatagggctgtcaacgagccgagctcgagcgagtttggctatataggcttgagtttgacatgaactcgagctgagcctgcataccgatcgagcttgggactaagctcgagttcgagctcgagcgagcttcgagcctactcgagcttgacagcttgacttggtgaaactccaaagaacttactcttgtataagagatattaatacaaattatcggtagtcaaaattaatgggtgctacttgtcttgaatgaagcctctgcagcttttctcatgaattcatggctttgaaacattacaattaacaaaagctagctactacatctaataggaatagtagtactaattctaaaaaagaaaaggaatagtagtactattactagcagccagttaattactttattgagaagcattgatgagatcttgagacttgagcaggtcaagcacgatgataagtatacattgacccatcaagaatatcttcctacgtgcaatgcatcttatgctaattaagccctaccgagctattcgagctcgaacttgctaggattgcgagcctcagcctaggcttaagcttggcttgtctagtatttgagccgagctcaaatcaagcctgtaacgaatcaagctcgagcagcttgcaagctccgagcttttttgacagtcatagttctagatcagctgcaatagtaagatagactgcaacttaagttattgtagctgctaagttggatctaactctaacggcaaggattagtttggtcactgtagtaaaatatattgtatcataaaacagtgctcagggtactgtagggtgaacactgttgcaattaatttggaccattatcatataaatgaaatgactaaaaaatatatgcagtcctatggtgcggccgcagttaagactacacccaatttcaatccttaattagtggctagacggtcctatcttttcgcttatgtatataattttccaagctactcattactaacttaaaaaaaattataagtaatttttttgcatacgtgtttttaattatttaaaagcaaaaagtatgataagaaataaaattaatttaaaaattatctcgtaagcataagaaaaagaaggtgttgtcaatctcttcagtattgaccaccaccaacgcacgcacagtcgcacagtcccccatcggcccatcccatgcgtacgtggtttgcctgccttgctctggttggagagccggaggcactttggtgtaccacgcggctctctctctctctctctcacagagaaattcagatcccagtttaacctgtttcaaaaaaaaaaaaacctagtgtatgtaagacagtaagagcaaggtcaatagtatagccagctgatggctccactcgtatccatgtcattctatagttgattttaaagctaacttgtacaacagagtggctattgtgttggctgtatctcatccatcaaaaaatgtattttacacgcatatattgatatacatgatcgaaagtgaactcaatccctgtggtcgttgttgtgcaatactcaggagtgctctatacataaaagaaaaataaaagtcacagacagcaaatagatgagaagaacaaaagaattaggaagagattagatgacaataactcaaattagaaagctattttctgctccatcaacgatgagatccgtttgttctgtttgtagatgcatcggccccttcttgacgcgatggccagcagcagcgccagcccgcggttgtcgtcggcgcccgttgctgccaccacgttcgcgatctgctgcgccgcgagcgctgcgttcgtcgatgccagcggccgagtcgccgagaggaacgcccttgtcatcgccgccaccacgggcgccgacgacatcaacagacccttcttggtcaggcttttgagcgagattgggctaggcgtcggggtggaagacaattgcaaacggcggtcggcgaagacacgccaggaagactgggcggggaatcgacgcggaagacaactgcgaggcggtggccggcagagatcgatctgcgacactcccgtgaggagagaaacaagatgggctgcggagggggagggaatacgctgcatgtcacacgggatcggatggctcgtcgtgagacccacaaagcacacacgaacccgtgctattgcccggctatagattagtcgctcgctttcttctctctcctgttcctctctcttccacataggaatttaatgagctggatatttttagagcctgctcagtcaacttattgtacctgcttacgtacaatcacagcgtggtccagactccagacgtaatcacataccctgtacacctagcacacattagtgatcagtcaatggaaatggttaagtggattttagtttgacgagacgcagtccctcacgaacgagctagagacaatttttgaaaagaaacggtgcgtgcagcgctgcttacgtacgtgctccgatccacccggcccctgatccggccggctaacttttgcttttacttttgtggcgctgatggggatgcacagtctccggaatgcaagaacacgggtgcgccagctgctgcgtgcgttgcatgcaaatgcgtccaagcaaagcggtcgtcccagcagcttgactgaaacttgaagacttgaggtgctgatttgaaattttcattaggctcaattggccagaaaaagaaacctaaaacgattgatcaaaacaaaaagaaaggtggtttagccttgatctaatcagctaaggtcgatgaattaatccctagttagctgctcatctcttcagttcaaactagtagtatagctatagcccagcttgtgttgatattcagatactgtgtgcaaatgcgtgcaacgcgggcaggcgaccagatgatcctgaagctgggctgtacagtgcctggtgcagaggagatgatagccaagtggacccggccctctacatggcgcagggcaggggtacgtggagtgcccagatttgttgtcactcgatcgatcgtgtgatctgcgacgccatcacgtgagacagacatgcatatgcactcgccgtgttcctgtgtgttggccctggactagtactacagtaaatgtaccgcaggaagtggattttatgggtacatccccttgttttatgtatggtgtttaaaaaattataaaaaaatttgaaaaaaattatcaagatagattcatacatgatatatcttttcgcaaacatgtaagttaaaattcgatttatacaattcgaaacaaaaataacaacattaaccgtgaattacgcgttctattcatagtcaaatttgttatttttggttctacatgtataagttgaatttgaatatgcatgtttatgaagtgacatatcacatattgatctatcgtactaaattttttaaaattttttgatgattttttaagtgacataaaaaatgagagaatatccccttaagggatgaatacagttttccatataccgcgttgcatgttttatttaccacacacggacatacacctggtactccagttcaaacctgagttagttttgcaaactacggttaataatactcgtacttaccacgcatgcacggttaataataagctcttgcaaaccctgtgctagctagctagctaggagtaacatacatcaaccttttttttcaaaaaaagaaaaaaaaaagctttcttgatactttctctcgcggagggcaagctgggccaggcggaaacggccgccacggctacgcgaccgagcagcgtcgttgcggtagagtcgtagagaccgagccattgaagagctcttcccccccttgaccaccaccaccaacgcacccatgcgtacacgtggtttgtcaccgatcgagcgctcacagagagagagagggggagatactccctccgtccaaaaaaaaaaaaaaagacaaaccctaggttttcgtgtccaattttaactgtcagtcttatatgaaatttgtttataattcgtattttcattgttgttagatgataaaacatgactaatattttatgcgtgacttatctttttaatttttttaataattttttcaaataagacgaacggttaaatattggacacggaaaccagagtttgtttttttttggacggagggagtatgtgtgtgtgtgtgaggtgggcgcgccatgtcccgatgcgcgggcgtgtcgggggttgggcccgatggggatttctgttgttggttggaggcagaggcacgcagatcgcgcgtgggtgggttggggacgtactggggtaaccggtggtaacctgaccaacccacgcagctcaattcccgtgctggcggaagacaagggcatgcatgtaaggcggctgtgttgggatggaggagatgggaatcaatctcctgtgcacggaaaacggagtgatctattagtatgtgaataattaagtattagctaattttttttataaatggataaatatgatttttttaaacaactttcgtatagaaactttttacaaaacacacaccatttagtagtttgaaaaacgtgcgcgcggaacacaggggagaggagttgggaacctcttatgccgaacacaccaagcctgtaaaaggtgttgatcactttatcagaaattcagatcccatgttaaccaaactcaagagagcctactccttccgttatataatgatcattatatatatttatacacaaagaaaaagaataatttaaactgtattaatcaagacacactatacacatacttctacaatacatgtatcgattaaaacaccatatcatttatactatagcatgcacatattctcccatcttgcattaattgtatttcgatagaatccgtatccatgtgattatatgatgatcaatttgagaaatatttgatttcattatatgatgattagtttctgaaggagaaagtaataacataatacccacacctaccacatactatgtcatttatcactcaaaagaaaattaccttttgcttttactttcgggggcgctgatcgatcggatgcatgcgtgatcaagctggccgccggacactccctgtacgtttcacctcgcgatctgcagagttcaaacttcaaagtgcaagaataagtcctacgttacccggtcgagcggggacgcataccatggccaacgctaagatgtgacacgtacctctagcctctcccacgcggacgcgatgccaaaaagcagcaaaaagcacgtgcctgcgaggaggcgcgaacctcatgcacccctgcgcgaggcgtcgggtctaaggccagggttcgagccgtggctcgcgctgagcagcttgaggcctcttgggcgtgtagctttacgcaactttacgataaataaggtctcacttgtgggtattacctctattaattggagaaataagctctcctgtgtagccttgcccacctaacaaacggggctacggtttgcgtcggtcatggcctaagcaggcagtgtagtgtatagtagtagcctcgattgttggtgcatacgtacccaggcagcaccgtgcatattcttatcggattaggatcctctgcagtcgactgcaccgcgtcttttatcattgacatgtgagtctgaagatcatcagacccatatgtaataaatgcatctggcagtgaccgcagaggatctcaatccattctcgtcgggttctctttccctcctgcaaagcccggccggccgctgccattcaccgagcggcagctagccagcagcctacagcctgcctctcgctggctctgagtagccaagagtccaagacgtaccatctcttttctgaggccagagaacgtaggtactagtgcaaaccaagataaaaagttaccggagataccaccaaatatctaattattgaataatctgtattccctggcgtttttacattataagatgtttcagtatttttcaatttaaacttctttaattttaactaaattaatataaaaacaaagttaacaaatatattcaacgttaaattttataaaataactttatcctagatggccttttgccgattgccattgaactttgaacaatactacagtgctacgcctgaatatgagtccacgttcacagctcggctctacaagatcttaaacgaaaattaaattgacaaaacaacctcagattaattatccccaatttgaacctaatcacagcaattacttgcattctccaaaaccagactaaatattgattcttgagtagcaagtttgattagcctaaccacaccccccgtacacacgcgcgcatacagtcaccgcgaggtaaggtcacctcccccccttttcccttgcagtgggtctctcgccggtcgatctcccccacgcctccgaagaatataaaagcccccttcaccctctgttgccttgtagcctcaacacctcaccagtgcaccaccccaccaaccacctctcgttttgcatttctctgcgctcgctgtcgctgccatggattacggaggcggaggcggaggagatggtggtgtgcgcggcggccccggccgcggggaggcggcggtgggggagcacagccgtaccggcccaccggcgtcgtgtggccgccgccgccgccgggtagcacccctgtcaccgtccggaggcctccaccgtcgacctcgccggctccgcaggcggcggcttcgtcgtcgtcgacgtcgacaccggacaagctggtgaggcagaaggcgatggagatcgcgctggcgccacccgccgcggcctctccagatggtgaggcgctggcctcggacaatctcgcgcaggtatggaagaaggaactcgtccactcttctcgaggctatggtgtattggtgtacgtcactcgcaaccacgttcccatcaacaaactgagctcatcttaccctctccccttcccacccctctagatctctgcacaaccgtttactactcttctgctgttgtttctatatcgatatagtagcggtagcggcctagatccggttctaggcatgggtttcgagtgctaattctgaatgttttgattctaggcatgggtttcgagtgctaattctgaatgtttttgttgctgatcacgatgaacgttttcgtgtgtgcactgtgttcgtttacgaatctcatgctgcctaatctgttttgagacggcgagattgttgatatatgattccaagtatcgaggcttccgatctcatcctttgttcgtttacgaattttagtgctgcttaatttgttcttgagacggcgagatgttatgtgatatgatccaaagtatcgaggcttccgatctcatccttgtgatgtttggcagaaaacgaaaaccaaagcatatttgaacgtttcttagatgtctttttatttcttattttgtattacatctttattgcatccctgtagagtacattacagtttaatgtatcctcctgacatcttttctgggtgagaaaagatgtattgcattttgaatgcataagtgtcaatactgtacaatttgaatgtattttgagatagcatcttcttgtgttacatttttattgtatctcgctaaagtactgtgctgttgaaatttattccgagagcaattttggtgacaccatgtattacattttacaagaatacatttaagaacacatcttgtaaaatgtgtggtaagatttaagagcacactttgattgcatctgtagataatgccgtgcagctaaatttattccgcgagcatttttctcttgtcaacaaatgagtactgattctaaactctaatgtttcaaaatcttcagataaaaacagcattaggtggggtttgcattgaaacaaatcatcaggatgataaaatcagaaggtacaaggggattacccctattcctttgagccagctgttgtacttatctttcatctgctgtttctgtaactttaactccctttctgtttatgttctctaagttaagggaaatcaatgtagattgttgaccttctgaaatacttgttgaggtgttcacagtttgaatttttagtccgaggaaattcacttcattattctacattagactagacatactacagaggttttcctttcagctaaaatcttctcttttcagaataagtattcccaaatgacagagatactttgtcctccttacaaggttaatcatggtttgcattgtcagcccaaaacattgaattactgtttttctagtaacacattgtatgttaaattttattatttggatcctaggatcctttgttagcatgctgttaaaaacaacaggtctattaacacattatatgttaagatcatgtattgattgctgtaatgataaattgtttggcttcaacccgtgaatgccgttagttacatagtcccctgcttgaggaatgttaaggaatatagagtcctttacattgtggaaagcttttaaatctgatttttaaaaatgtcaaatagtcctttattttcaatgtagattgttgatggaatatttgaatggtctttgttaaggattttgggcatattagcatatcaattatatctggatgtgggatgaaatattttttccctttaaaatggttatgacttagatatctttcaatcttataaacgatccgtgaatattcaactgaaatgatgtgtaaatgaagtattacacgatttccctgacctgggggagtatagcatgtgctatcatctttttgttagacctgcatttttatttatgtacattggtgtttttttttccaaactgatgcccagtatttaatgttatcagattttctgttgacaagaatgggacaagatgctgcctagactctagcagtgagtctggaccatggtactccaagaagcttaataacaagaagggagtgactggaatccttagtcaatggcacaagcagacggaacagaaagctcatgaggtataatgcgacttatatgcagatccaaaccttttatgccttttgaattttagctccattttgaatatgaccttttatagattttcttagaatgatttgtgtgtagaacatgagactttttgaatatgaccttttgtagattttcttatgatgatttgtctgtagaacataagattgtatttctcttgacgatgtaatttagtcatgaatcatgtatttgtcttgatttccatctcattttttgtcaggttgttatctacaaacgttgtactgcttctggatctgcagttactctttttcttattatgatgagcttggtttgtacggtgagaggaagcaaccatggaactgattgcgacatcggcgagtactcaacgagcattgctcaagtttgtcagtatggtgctcctcccgcagtgtgttgcgaccttttacaatccgctgtccacacttgtggcaatgctagtgttttgtgtgaaattggcagatctgtgccaattacttctagaggtttcaatgttcatgatgttatggattggcaccgagagtgcacgggtcaaccagaatcatccagtgtagatgcatcgtccatttgttatgtatcaggtatatttccctttgcttgtgtgatctgttagcctgctttatctgtttactgaacaacattgtcttatctgatctgttagcctagctagtttaactgtttactgaacacattctctatattaggtgaaaggcacaaagagggcacaaaagaagagggccatcaagtaaatattttgattgagaccggtaacaaggagtgcaacgcaaggaagtcaacttctactaatccgatgtttatcggtttaggaattgggtttggatcggccatgctctttgctttcgcgctggtggtgatttggctgttcgtgagaaggcgatcacaaggtatgagtttttctttaaactagtataattctgtttgcttgtaaatacggccaattgaactcattttcattttgcatatggtcaattgaactaaataagaattcttattcctgcaggaggtcctctggtgccgcagattagcttgctcgcaatcgcgcctcacttctcccaagggcttcctgcgctgcccttccaagagcatcctgcgctgacgcttccctgcgggcctgtccctgtcccgacacctcaagaagttacaacagtgcagccagccaccagtgcatatggtcagccagcgccagtgcagccagccaccactgcatatggtcagccagtgcaaccagccaccaatccaatggcgtacttggcatcagtcgtttcctatgcgattgtagacagacttactagccgccgtcgtcgctagtacttgtgtttgtctctcctcatacttttttacaactttcttctcatacttgagacaactattgagtttgatgatttagaatacttgagatgaccactgaacaattccggttactgtaaaatttgagacagctagtgagtgctgatgatttctgttaatttggttctttaaaatacctggacgactattgattgagggctgatgtttttttcttttgttaatttggttgtttggggtatccagaattcataatttcagtggactccggacttcggaacggttcgaaaacacaaaccacttgtttttaagtttttttaaaaaaataccaagtatatcttaagacaaaaggcacgagggcatagcttttaatagaaagcagataaaattcaaattgaacttaaagtttttggaccaaatttattcggactttattgattttagtcggtttatcaacggattacatgaagagatgtgcttccaatgatatcattcagtagattttgatctaatattaggattgtgagatcctgtttagatgggactaaaacttttaagtccctatcacatcggatgtttgtatattaattataaatattaaacgtagactattaataaaacccattcataatcttggactaattcgcgagacgaatctattgagcctaactaatccatgattagtctatgtgatgttacagtaaacattctctaattatggattaattaggcttaaaaaatttgtctcgtgaattagctttcatttatgtaattagttttgtaagtagtctatatttaatactctaaattagtgtctaaagacagggactaaagttaagtccctggatctaaacaccacctgaatctgctggtgtgtttgattagagataagaaaatatctgtttatttacgttttaagggcctggtgtagataagggcctgaatgaggaacttctcctccatatatttatgatgtttccctagggtccaaatgaaatacgttttctacggctccatatattgtgcggcaatggcggaagctaagtcgaggtttttttttaatggtggaatcaaatgtactacacctatactaatataaaaaggatcaattcaaactttttgctatggccacccaactgaaatgtacaccgaaaggtctcatccattccgtagccgtttgatcgtctcatccaacgcctcaaaacgcatctaccacatgatgtgtgtgtcaatttcagggagtaggaaattggggataaacttgttgcattgacttagctctatgggcaatatattgtgtacaagagggatgggaaataaccaaaatatccaatacacactattacacttaacacccccactcaaatgcaatgtgtatgcaataacgttgcatttgaaaactacaactaaacactaaactaaatcaaaagtccatgcttgatgatgacgtcgaagtgtgcagttcttgaaatgatgaagaagaaatgattcatctcatcttcaatgaagcggaccttggagccttcacggatcgttcttcagcctttaataccttaagccttcacaaattgtttttcagctcttcattgattcagagatggtgacaatgatattgaaggaccttcacaaactgttcttcggtccttcatgattgatgatgatgtcagctccaacggggagcatgatggaccaactccggcagggagttggtgatgatgacaggacaataatgaagaccaactccgatggagagttggggaagttggagatgacctgctccgatgtggagctggtgatgaactgatgatgacggctagctccgatgtggaactagtgatgatggagatagattggcaagacttcgacaaattgaagaataggcaatgacttcaatggactcaatgggaactagtaaatgacatgacgatgctagtatatactccctccgtattttaatgtatgatgccgttgactttttaaccaacgtttgaccactcgtcttattcaaaaattttatgcaaatataaaaatacttatgtcatgcttgaagaacatttgatgataaatcaagtcacaataaaataaattataattacataaattttttgaataagacgaaaggacaaacgtctgttaaaaaagtaagcggttcatacattaaaatacggagggagtatgcagcaggacttgaatagatagactagataggaaacaaagaaaatttgatttgtagaggacaataattgatggatataacaaaagtcaatattgatagatgtgcagcaagcagtaatgtacatctatctattatctattatatactaaaagtccattaaatttcctacaaacgctctcaagccgccacgtggcgctcctacaagcgctcctagatcgccatgtggcattctacaatcccaccatcgattttcatttaaattggtggacctgttattttacaccgttttaggtacgttactttggatggaaaaaaaaccaaaaatataaagccaaaaaaaaaacctgttcaccagggaaaaaaggaaggatgcgtaccatataagcacgattaaagcctaaaggaaaatacatgtacaatgttataaccatcaaaggccttttgaaaatatgatcttctatactataaaaataaagtttattactctacaaatatgattttttgtgcttctacaagcgctcttagaccagtacgtgacactacataatttcaccatcgattttcatttaaattaatggacccgttattttatatcattacattagcccgctttctcttaatctcctatgtatacgagataaactatttaccggatattcgattaaaaaaacccaaagaaacatacatacataccattaaaaaaagctataaagcccaaaaaataaatatgtatgttggtacaacatcgaaaaaatatagacaatccttaaaataggattttctatactatgaaacaaaatttattactccagaaatatgcaagttaaactagatcattataagtatcaaatcaaaggtatttaaacacccacttttaaattataatccgttgtattcaaatgctgatgacttatcatagttatattatgatataaatacattacaacacatggatctgacatataataattaatattataataattttcaaatgatttaggcgacatataataattaatttcatcataatctttgaaataacttcacatcatattttgtggtgtcaaatataacttgacaaatatataacactaactgaaatcgacatgcttgaaaacgaaacaacattatgctttgtcagttatatatgatttaattttaatttatggagactaagattctcaaatgttttttttcatatttttcaaaactatttcattggtattcctaggcaataatcttgctataatacggccccttaatccatacgtttttcccgccagattagtttgttaacaaatgtgcattaaattactcatgatatattttgtttatagtcgaggaattctaatttgtcgggtataaatgatagttgatagttgatgaatgtatgctataagtgcactccaataaattagttatttttaataatttttgaaagtaaataaaatttaaaattagtaaatgtgtctcatgcaattatgaaccaattatgaacaacaggtgacgaaaacaaaccatacgctaaaatattgatctttgtcaaaatataaacaatgatataatggtatgatactctgaagatggttatggtcatatatctgtttagcgatacatttcttaatgatcaacctcactcatttcaaagcagaatattgtatttatacataaaaaattaggtagtactgctcaatactagaaaaaattatgtctacacaaaacgtaaaaacaattattttttatgggaagaattattttcattacatcaatcttttcttgctttctctaaaggctattgaacatcttttacaagtatagttgaggtggccccagtggaaaccaccgttgacaatagtgctcaactttttacttactcatgcaatcatctttaagaatgctgatagtgaattaggacttaaaattgtactgcacactgtccttgagaggcatgagtatgtcgatatggaacccatgtttaaaggcaaccgagaaataaagacttggtatctccacctgttagaggggatattcatgtctaattttcaacactaatatcacatttaccaatagatgcagtattttaagtatatttatttatagatttagaactatgtgttgacataaacacttaggtatatagtggagataaatgttttatgtatttatgatgtattaggcttattttggtgctacagatgcagttccgtttattaaaaaggcatctagcgacaatggtaagaagtaatggtgacaataggcaagtttacataatcaggacaaaagtgatttttttaatataagaaacattcctatcgtttatattaaaacctacaatatatttcacgacatagatttttgttattatgaggtaaaatatataatttcttatacgcatatgatgtgatatgacttaattctcataacgttatttttataatcataatgaataagttccccgcgtatctgcgcgggctttctttctagttactagcaaaagacccaaagaatgctagtgaacgtgttgacagtagcaagcaatgagctaatgatctaactaccactccaagccatcatgataatttggagatgtaaaatgggattatgataagcagctaacaataataaaatacggtgataattgatgagtgattatcggatggcagcgaccagcaagcacaaaaattaactgcatatgtgtgatggagtacaagctcaaagacatgaaaaacaaatcgacgattttgacagattttgcaactgaaattaggagcaaccaacaattttgacagatgatgatgaacaatgaagcattgatgcatatcctttgttctccccaaaataaaactgaagcagcacaagctacatcagtacatgcaaagtaatggagagagaatgtgcagaggagagctggagcttgcgttgacttagccataggcgtcttagcagtgacggctaaagatgaaattgtggaagaggaagagaagatgtggaatatttgcttgctggttggagatgaaatagactacgacggggctcgctgctgctgcatcaggcaggacccctgctgctgctgcttgactccgcgagaccgttcagtctcgctctcccattccgcggtaccacgcggtctcgcactttcgccgcgcgataccatccacgacgtcattcccacgtcgttctcgtgcaacatttgtgcgagaccgacgatatatttacgcaaaaaaatttacatcccgaatatttataagaaaaaattgaattaacagtatattttcaaatttaatttctaccttagctgccaggaactagagaaagctccaggcatcagtcgtttagtaattttgatgttcatattctcgtgagttgccttgccgcattatcatgtacagttttgtgaatcaaaatgaaaaccgaaggattataggttctggaagttccatgctcaaaacaaacaattgttgccatgttagaatctgaagcatgatcaatttagcagtttcttttcgtagctgtgtcttactactttcagttatatgcattagctgcttcaactatgacctgaaacccaaattctactcaattttaagttggaacgaaactagataaaacatgctgggtaggcccacatggtgcttgtgtctatcgagcaatagctagacttatacttggtgggtacaagtccaaatttcccaacaacatcacaattgtttatatgatctgccatatccctgtttttcgtttggatatgttgctaagccgagtaaatattcttaaaaaaagcagagttagaactcaagctgtggcagagttgctctgaaatctgaaaataccaagttcagaacaagcagcacatggtacaatttagctgtattcaaacacatctagtattactgtttttaggatgtacgattttatctatttttagtccaaaagaaaggaaagcaccatatacttcatcctagcaacaataggtgcaagttatataccgtacccttcatttgatttccttgtctttgattcaccaagaactagttctacctgaataccaacattggtactgtatgatagatatgtatgttttatggttctagattttttgagaacccatgttcaagtcttttgtgccaatgataaatttggccgcaactcatggccaatatgaacataactgaaattcccggtttgaacttcattggaaactatttcagttttaattgggactagcacatataggccttgtacttcagaaatatttcaattttactgatgtaaatcggttgtactgcactggtttgcaacctgaaactccatttaaaaatttaaacctagatcataagatattcagagataatggcaagaagtagccgggccactgaagctcatggtggcattagtgctatattataatttctcttgcacttgagtgggtccttaaacaagtattataccatttcagttctgcttcagcactagtgttcatctttttcctggagttgcacatctggcgtttgcagcatttctgtaaattggcatagtataatagtgttgtcactatctcttttaaggacattctgtaaagcacgcatggatggctttctggtctggacatgcaggagaggagcacttatgttatttttttagcacttctattcagggtgaagacatcctttggagcaagcattagtgtcggatcttatgtgattgaatatttgcctgatacttttacctttcgactgagacattttactgcttatgtgattgaataagtagatgtgtagggacagttcttatcagatctgtcaaaccttgtgaattgtgatgatgctattgatgttcagatgggcaagcgattaattctgtgtatatgtgtgctagtgagtatgattaattatgcgtatgggtgctaatgtctatgattaactagatgggtaccccgcgcgttgctgtggaagaattatgtaataatatagacttaatatcggttgagcagtaagaaggagaatcggttatggaatatattcagagatttcgtaatgtccgcagccgatgttatagtttgagtctaagtgatgagcaactagcatatcttgcattccaagggctatcaacacctatcaaggataaattattttgccacgagttcgacagcttagctcatctaatgcagacagtaagtaagatcaattttggagttattaagactagactgaagataatattgaagcatgagctctcgtactccaattttttttttttggagggggggcctgtgttaacaatgaaatttggtaagccttgaagacgtcatcagcctaaaatcaatatcggcttcagagttttggaatcggccgatgagaattatcaagtcgccaatagtcggattcttgctatattcggttaagaaaactaatctattaaagg

SEQ ID NO: 7083 - DNA, 8600 bp, Oryza sativa
caacggcaaaggaaactcgcggcttgaaggaaagaggtcgatccgaatcgaactcgattccacgaacttccaaaccgatttagccgaagattccaaaggagaaaaaggtagaggagatcccggagattgtttcccctcttttgattcgaccagagaaggaaaggaacggccggatttggaaggaaacggcggcggcgcgaaactagggtttcggcggcggcggccgaaggaggacgaaggtcctgacaggcgggaccctcctgtcagcgacagcgagagggcgcgcgcgcggcggactgggccgaactgggccgaggagagagagaggggttttgggccgactttcggcccaaagccaaaagagactttttaaaacctttttcaatttaaattatttcttaaatgcaattccatttattaaaaatacttccttagctcaaataaatcccagaaaaatctaggaattatagaattaagcaaagtatttaatgaaattttatctgggcccattttatattggaatttattaattaaaactagatcttctcttcaagacttttaaaattatttctaaaaattccatttaaacaacaatttataaattttaaattttcagggtgtgacaatggataagtatgaagcaattgaagaaaagtctgacagaccaaattgagttcggaggatgtgtttacctgtgattatttccggtcggggacgagcaggcccttgtactttagcaggagagctagaccctagatcgacattggcatcttttttaggaggattgtcaacttgagcttctacttcgaggatgtccttgtttcgctctgtacccgactggtttccagtcgggggctcctgattagcgtcgaccctagcttcggccgactggtttccagtcgggggctcattgctgggacctacattgtcggttgccggctgttcgtcactcaggcgatcccctgcagtcggctcggtctcttttgaaaaacctgtctccatgccagtcggttcggagtcttttctagaaggatctatgtcagatggcttcctacaagtttgagttatgctatcagtataattttaatgaatgagcgtcaatccaaggaagaccgccaaataatttgtacctagaagacttcctgatttttggcatgggacgactggatgttttcttctttgggttagcctgccttggatgttttccagtcacccctttgctgccagccttttcagcatcatcgtcgtcactcaggaccaatttcctcttacggaaatctgattggttggccgactgagtggtggtgggatgagagtcagaacggatttttggccctccactagtttggctagtcttcccacaaggagtgcggtgttgggtaatcggaggatcagacttcatcaaggtaaactcctgtatattacaagtttttagtcaacctcgcggaagataaaagcatgctttttagaaaggctgagatattaaatacataccggtggaggggggttgaaagcattgtatggtacaactggcagcagatgtgaatagctgacaacgatagcatttgagaagatcttgtacattctttccttcatgaccttaaagtcaagagagtctggatcttcacgatttggatcatgtttgccatcaaattcaaaagccgtgcgggatctctctttgattggagctagccgacttttgatgaagtgccgagtgatctgctttccctgcaaaccttgttccttcagttttagcatgcgctccatcagttccactgcctgagcagcttcatctcccataggcaatgaattccatgtgtcctggcagaccggagggagacaggagtactcggggagtgctggttcaggattctgaacgtaaaaccagtttgcgtgccagcctttgtttgaggtcttgaagggcatggagaaatacttttggcttagtgttcctctgagttggaaaccagcgcccccaacaacgcatggtttgctcttgttcggctggggcttgaggaagaagatgcggcggaacaaagcaaaatgaggtctaatgcccagaaaagcttcgcaggcatgaataaaattggcgatatgcactatggagtttggattcagatgatgcaggctaattccatagaagttcagagttcctcggaaaaatcctgaagttggaagagaaaacccgccataaaagaagtgagaaaataccacgacttcgtgtgtatagggggtcgggaacgcctcgctgaacgctggtcaccacccgatgatctccttcactggaagaacgccgtgtgctaccatttctttcagattctcctccatcacatcggagggcgcccactgactctcaaaactttctctctcttccgccatggatgcgtgtggaatggtttgatttggtccaagatatagctggaggggaatgaggaatcggagcggaggacgcgcggagaagtttcgtgggatttttgagaatggattggggcggattgatgaaccctagcttcgtcggtgcggtttttaactgtagcaaggagtggggaaatggcgagagtctcggcggggaagacgaagcgtcgcttggacttcggtgttttgttagggtatcgggagtactaatgggcctgggcctgtacagtacttcagcccaatattattatcagcgtggcccgttgtgatccctagggacttaggcgctttttgctttggcaatttgtgctcataatgatgtgactcgatgctgctaaaatcctttttgatgcagttagataattctttggaattactacgatgcaaataaaaaggtgcccaacagaaaagtgttatactaattttgtaggccttttaggctacaaatgctgttcgggttttcttgagatgattggttttaatgcagtcatccattcggcatgttatatgcttattttgattatggcatgagtcatagcctaggctatttaaactcatcttttatcaaattttatgccacgtttgataggtcttttgagagtttttactcggccttttatcatctatgttgatttataaacctttagagtgcttctcgctcgggtttttctttatgtttctttggcgcattaaaagcagtcggcaggaggttttatcagatgctgcacatgcttagccttagaccgtttggtttaaaaccactcggatggatgtcttgatgcactctgactatatgtttagttttatttaactaaccacatagtcgggggctacacctaattaggtgcatctagtcgatgcacctgattttttctattcttcagcccttcacagtctttgattttattactcgggagaccaaaacagaggaagttaaagcactcggattgtctttttggattatgagagaagactatttcgtcgactgtaaaggtctcaggggctactgtggagattatggataccccatacctacacggcatgtataaccgactgggtatggggtgccatgtatagatagaatatctttaaagggactcgggttaaatattaaacttgtatgtcaaggaaatatccaaggttctagtcggttacgattgtattttatctgtaactacctattccgttagggatatggtctgtactttgtaatacggactcctcccctatataaggaggggtccgggtgcctctaggggcacgattttttctcccagatcatacaatcaataatatactcggcggatcaatccccggacaggagtagggtattacttcttgaataagaaggcctgaacctatataaaattccttgtctctgaacccatctactttttcagcttgatagccacccccttttagtattgccgaaatcttgtttcgacactgcgtggtcagagaggagaagggtgtaggagaacaacaggaggaagaagggaaggtaaaggccaagcaattttggggtttatggtgacttcgcaactagtgggtttgttcttaaattctagtatcctcgctgcaacggtacttttgtttactttctggaagcataatattcaaatagaaattgattcgatagccgcttacgcaattttttttaggtcgttgggtacgggctgggaaacgtattttcaaatctggtagtaaacaatcaggtttcgggttatgcatcctaaataaagtttgtagtaatcgtcgatatatttctaacaccactggtttcgctcgattccaataaacggtttaggagaaacaacagaaacagtattattgaccgggtctgttttaacatggacaataattagttttacttcatctgagaccaatagaggcttaatctgattttgtgcccaacatgaaaaatttagacaattttatctagatgtccgaagttgtattatttgctagattatattccgttagatggcataaaacagtaatagaactgctgagtattctttactcactcttgtgcataatttggtttttaggtaccaaatgatatcgatcagcatgggacgagagtaggacaaggactacacattttattacactattgaaatttggttttagatcatgattttgcttagcataagttttgcgtagaacttgtaatggtcaattaaagttttggttcacatttccttgtggaatttatggagttaggatggttagcaatgtgctgattaattcgttattgatttatcttatgacttcctgtcgtggatgtccctatttttaggtgaggctctgccgaaatttctaataattttagaagttagtggttttgagtgtattttggtgtggcactttaggtacgtggttacctgggatgttacagttgagaccaacatcgattcggagtcggcaccggcatcgctcgggccgccccacgccgtcaccgctcgggccgcccggcactgtcgtcggatggaccgccccgccagccgccgctgctcacccccagccttcggcctcatattgttctgccggttgggaaaaaaaagaaaggagagagatagagcggaggggaagatgaaagtgaaagaagaaagagagaaagaggggtagatgaaaagtaaaagaaatggtattggtgggacccactataatcaacttgcactgtagagcatttagcttacaatgttcttagtctacgtggcatgtgaaaaacagcaaaaatggaggacaccctgctaatacccgaatgctagagctgctggagcagtgtggactggtttggatcgctgcttcactagggagttgggttggagtggtttggatcgctgcttcactagggagttgggttggagggggaccgctagttggcgcgtatgcgccaccggcgcgcattttttctggggataaggtggttagactaatcttttagttttagataacgatagtttgagataataatggtagtagataagattttctttttcccgcgagatttttttaacgaacaaattgaaaaagaaaatctatatctgaagtcaaattttcaaaattttaaacctatatttgaaaactttcaactcgaaatttgaattttaaattcaaatttcaaaaactttcaacttttcatcccaaatttgaaaactttcaacttgagatttgaaaattttcaactcagatttaaaaattttcaactcgagatttgaaaattttctactcagatttaaaaactttttaactcaagatttaaaacttttaactcgagatttgaaaattttcaagtccagatttaaaaattttcaagtaatgatttaaaaagttttaacacaaaatatttgaaaacacgcgtactgaaaatttaaaaaaataatcagaaaaaagagaaaaagaaaagaaaaaatcgtgaaaaaaaacaaaaaaacgcagcgccggggagggaccgccaccagctggcgcgcgccaattagctttcgcggggtttggagcagttttggactggatgtcaacccactagctgactagaaggacccagctgttcgccacgtgtgcgtgttgacttccacgtcagccttgcccttcatcaggctcaggagctctagcatcgtcaaaagtcctagcggcgggaaaagcgcggcagtttcccgccaaacgccaccaaaatccccaatctcgcgctatcccgcgtcccacaaacgcgccgacggagagacgggagggcaacgggagggcttagcgcgtcgctcccaacggtgattcgagccaagacctagccgccgccatggagatcgtgagatcccaccggcagatcgcggcggaggcggcggccggcgtaggatgtggcggcggggcgggaggcctgccaacctaccgggtggcgccgcagctggaggtgcggttggaagagtttgagctcttcgccatcgaccgcctccgaggtgcgggcgcctcctctcccctccccactgtggcggcgtttgtagagtccttttttcctttccttcctcgcattctgtgaacgatttgacatctagactgctgctgtgttggtcagtattgaaggggatcgccgacgggctctcgcgagggaagagaccggaggaaatggagaaattggtgagccgtcctctctctatatatctcgttgcaattctaccacggagatgcgaattccttcatgtatttggggcaaattaaattccatttcttgctggacttttcgatttcaatcttgaacataatttcgcggttagagtttcaagctctagttaccaagtttaccatattttctttaacagtaatcctatctgttttccctccttgtgcttaggtcaaggaattgtggaaagcccatatgaggcaccaggatcctacagagactttgaacaaggacataatatctcactttgttctccgtcttgtctactgcagaacgtaagcttaacattcgttacacttgagtacttgacattccatagacagtaagccggtggtttgcttctggtgctttcaagtttgaacctttgactaacttctcaaaggctttgtgctatacccgcattctagggaggagctgcggaagtggtttctctccatggagactacgctttttcgctatcgctttcggctcgagagtcctgaatcacaggtgactttctgtccttttcttgcatacaaggaaagctatcatgctttaaccgttccttgccacactgtatttttcagaggatgcttatgagtgagtttcgacttccatacaaagcattgccacactcggaatttgaggtatgtgttatggtcactctgttgacttggaccttgatgatttcagtaatatttacagtagtgagatgttcttgttttcacgtttttaggctgtcaaagacaagttgagccaagttgcacgcaccattggtcaatctgcagctggtatggaacatcttactatgtgatacctgttctttatgttgtttcagcacaatggtgcttcgctgcttgcaggtgtgatctttcacttgctaagtttgttctatgttttcgttttgcagttgaatctgtgttcttcaaggtatttgcatcagtttattttacctcttcaattccatatccagtagaaaaaaattgttcgtgtgattacccagtctaaataaaccttgttcgtatccatgtaaggtgccttttgaagaagttccagatcttgttgccagccgccgagtatttctttcaaaaggatatgcttatgttgcgatgagtcaggtttgctgcgaaaacgagactggaaacttctatgtactttttggatgttgtttcctgcccattctaaacatacttgtataatttaataggttgtttcgcttgtggttacccaattccgctgcaatatctcgaaggcacttgttttaacaaataggtacatggtacaaatgttctactttactctgcctagctacatatcatgtccgggaagtgtgctttcttagttctttgctggaaaaattgttgcactcttaggtgatataattaggaacattaacagcattgtctactatttgccaataatttacatagaacaaaagccccttgacagttggatttatttctcaacttagaacactctttagtacaggctgtactaagctataatataaataattcgatgtacagaaaatggacggccaccattaaggaacaagaaaaggataggttgactcctgtgagtatcaattaaccacttcccgtattcctccagacaatcttttcataacttttataatccacactttttatcttaacagattgtcgaagcattgagtaatgcatattttggacctgattactctcaggtatgttgctttatctataggtgtttttccagatattgttaatgggattttcttcaatgctaatgtttactatatttgttattaattgtctggcttatcaaatatccaatattctatacagccaaaggatgctgttgagatttctctgaaggatattgaccaactggctaaaacttctttccctctttgtatgcgccacatgctagagaaggcaaggcaccttaaaagttcacatactttgcttaccttatgatcaggttatttagtgattgcttttatttttcagttgagagaaaaccatcatctgaagcatgggggcagaatgca

SEQ ID NO: 7084 - DNA, 5155 bp, Oryza sativa
atggaaatgggaagaaatatgtatggattttattactggtttacccagaacgtcatcaggccatgactctatttgggtgatagtcgacagacttaccaaagtggctcattttattccggtaaagacaacctattccggaagtcgcttggcggaattgtatatggcaaggattgtgtgtttgcatggcgtccctaagaagatagtgtctgatcgaggcagtcagtttacttcaaatttttggaagaaacttcaggaagagatgggttctaagctgaactttagtactgcttatcatccacagacagacggacaaaccgaaagggtgaatcagattttggaagacatgttgagagcttgtgctttagatttcggtggaagttgggataagaatctaccttatgcagaattttcatacaacaccagttatcaagctagtttacagatggctccttacgaagcactgtatggtcggaagtgccgcactccgcttttgtgggatcaaacgggagaacgtcaggttttcgggacggatatcctaaggaaagcagaagaaaaggtaaaggtcattcaagaaagattgcgagtggctcagtctcgacataagagttatgccgacaatcgccgtagagatttgagttttgaagaaggagactatgtgtatcttcgtgtcacgcctcttcgaggagttcatcgttttcacaccaaaggaaaattggcaccgcgttttgtgggaccttataagattgtcagtagaagaggagaggttgcttatcagttagaattacctcaatctttggcaggagtccataatgtgttccatgtgtcacaattgaaaaaatgtttaagggtacctaccgaagaagctaatattgagaagatagaagtccaagaggatttgacttatgttgagaaaccaatccgtatcctggaaacaaatgagagaagaaccaggaatcgagttatccgtttctgcaaagttcaatggagtaatcactcggaagaagaatcaacttgggaacgagaagatgaattgaagtcagctcattcgcacctgttcgccagttcttccgaatctcaaggacgagattctgtttaaggggggtaggtttgtcacaccctgaaaatttaaaatttataaattgttgtttaaatggaatttttagaaataattttaaaagtcttgaagagaagatctagttttaattaataaattccaatataaaatgggcccagataaaatttcattaaatactttgcttaattctataattcctagatttttctgggatttatttgagctaaggaagtatttttaataaatggaattgcatttaagaaataatttaaattgaaaaaggttttaaaaagtctcttttggctttgggccgaaagtcggcccaaaacccctctctctctcctcggcccagttcggcccagtccgccgcgcgcgcgccctctcgctgtcgctgacaggagggtcccgcctgtcaggaccttcgtcctccttcggccgccgccgccgaaaccctagtttcgcgccgccgccgtttccttccaaatccggccattcctttccttctctggtcgaatcaaaagaggggaaacaatctccgggatctcctctacctttttctcctttggaatcttcggctaaatcggtttggaagttcgtggaatcgagttcgattcggatcgacctctttccttcaagccgcgagtttccttcgccgttgccgccgtcgtgggcctttgccgccgcctccgagcccctttaaaaggaccctcggtgtctcctctacccgccgccaccctcgccttcgcctctcgtcgccggaagagctctagcgccgtgtgccctagctttgccgtcgccgccgccgctccagccgtgcgccgccgtcgcttcagccgtcaccgtcgctcgggaagaccgtcgtcgtggtcgccgtcgcgtcgccgttctcgtccgccccttcgccgttgccggagatcaccggagcttcgtcgccgtcgacaacccgaaggtttccgccgtttcctcctcgtcgtcgtcgtcgtccgttgttcttccgccgccgttttggtcaccggtgtgttcgccgcgtcgtcctctacgtgctggtgccctccgtttgcgtcctggtgccgccgttcgccggcaagcgtgcgccgcccgagccgtccgttccgccgagccgccgccgctgtcggtgacgtcaccgctgacgtcatcggggtcgtccgccgtgagccggtcgtggaccattcgatctcggccgtccgttttggattggttcgatctcggccgtccgttcgtgtgaaccgccgcccgtgcgcccggtccaccaaaccctagcccgctgacgcaataatccttcttttccttttcaaaaataattcattattgcgtcataattcaattttaaccgatataagtgttttaatccgatttaatctttaaaaattcataactaattcatcttagctccgatttagttggttcaagtctctaaatttttctaaaattgagatttacactttaaaaatatccacatgtactgttcatgcttgtttatgtgctgttttggtgattttgctcttttctgcttagattccgtcgtttccggagagtccgttttcgcagaagaagagtttgaagagttccaaggccagcaaggcaagtcacacagatcccaaccaaccctttgagcatgttgatcctatttaaagctattgtttctattcaactattgcatctattttcgaatgtcattgggtggaattgacctattctttgttatggcccttttgtacttgattaccttattccttgataccttgggttattacaatttgactagttgagctttatttatattggttcaactagatattagatataattgcttagccctgcttagaaacattagcacacattcgggataactaatgactcactaatatttcatgatggtttcatgatagttcacgatggtcaatcgtgattagttaattaattaatgtgccaactaaaacctggtaatggtgggttgtgagcacatggttttgttggtcgtgctcatgacaattaaggaccggttcacgagtttcggttgtgaaacattaaccgtgccaaccacaagccagcatgggcaacggctttatcttttgtatagcatggttcattgcggggcaccagactgagaagtggcggagataagcccacgggggtcgctggggagtccatgccttgtttataagggggtgattatgatccaggaaggtgcgctgcagtggattgtgttatgcgaggggtattgtcacaactcctttccgagataccgtggtggtattgaggcacatggtgacatgatgtggggttgtgtcttgtgggtacagtggtacacctctgatcagagtaaaactattcgaatagccgtgcccgcggttatgggcgggtctaacaatgtctttcgtgattagtctcacacctctcatcattgtaaaagatgcttaaactggtaataatttgattagctcctggtttggaatggtatattcctggtttggagatagaactgtgcagccggggtggttgttcagaatggttgggcctatacaacagggtatgttgtatagcgttggattaatattgtttaattacttaactgttttatcaaattctcaaatgtttgctaaatgctgcttttgcaaatgcaaccctactatgccatcctttgttatcctgtgcacttgcatatttgctgcgtggcttgctgagtatgtcatatactcaccttgcaatcattcatcagaggaagagttctacaatgaggctgatggtgtggaggattaggtgtagccttggtcaagctgcctgtggagtggagccgtctgcgccgtttatttattttccgctgcttagatctttattgattgagaggaactatctacctctgtaatgacattttattcgcttattaattagagtaatatttgtactctattatcaatttgttattgtgtgcctcggctgattcctggacgagggttcacacacatgtaagcgtttagaattttggatagaaattccgactggttctaataactccgatgatgaaaaaactgacaccgattgatgttatattgtagcagtgattctgatgatgatggaggcacaatttgtataatactgatgaatttatgctgtgcttgatattccaaacttagctcctgatttcttaaaagtttttatcaaaccttgttgagcctaaaacccgcaaaagttattaaaaaactttcagtcctcattgactaagccaaaaaaatcaaacaaggcaatgataaatcgagtaagcaaattgaattgataaaaatcacactccgttattattatagtagcccccaactgataactcaaggaaaggcttgatgttagaagtcaaagaggaaaatacaaaagtaatgcctaagcataaaaacgacgaagatgttcaatattccaagagttgtcgatatgagtactgtcctcacgtttgagtcgataagaacctggccgagtgacttcagatataactaacggtccttcccacaagggagataatttgtgccgatcccgtgtagtttgaatttttctcagaaccaggtcgccgactaaaaaagctcgtgagcgaacattgcgattgtgataacgacgcaacccttgcaagtaccgagccgattgaattaaggctgcttcgcgggcttcttccagtcggttgatatcatcaactcggtcttctccatagcgctcctcgctgaagttgcgaaatcgtagagattcaaattccacctcactcggcaacattgcttccgctccataaactaggaaaaaaggcgactagccggtagctcgactgcgagtggtgcgtagggaccaaagtacagatggcagctgttctacccacttgccggcataaggacacaatcggtcgaaaactcgcgcttttattccttgaagtaccatgccattggcacgttcaacctgtccattgctcatggggtgcgctacagaggcataacaaattttgatgccgaagtcctcgcaaaaatctttgaatactccgcctgtgaattgggtgccgttatcagtgatgatccgattgggtaccctgaa

SEQ ID NO: 7085 - DNA, 85647 bp, Oryza sativa
  unsure (1)..(85647): unsure at all n locations
tttatttcttttaggattgtgcgtggatattctttggttatttatcaacgtatcggatatttatcgatcacgggtattcaggttatctgactgttgcggatatctcgaagacattaggaacctatagcaaggcaagtcactacactctcttccttgaacatattgatcctagatttataaatattttgtttacatataaattgcatgctatttataaagtgcgtacctatacttgattatgcctacccttgatattgattacctttatacatgttgtatgcctttgaatgcctgagtcatttatttatatgcggtcatttattgacattgcttagcactgccattatagacatacgcacactccatatttatgttagataaatatggatgtgggatcactcgatgtgagtgatcgatgatttgcaggtggaggcatgagcgccacctgccacacacagatattttgcgaaaaccaaaacttaatgaaacaaaactatttcgactggggcggcatgagtaaaatatgggtggtttaggaaatggttggtcgccgaccctagttagttaaggaccgagtcaggaagctatgcgggaaacaaaccaagtaagactgcacttcttacgtatgagcggacccgatggattaggaagctcttgcggggcggcacctcagtcatggtaagttctgtatggatacgatgttgaggattgcagtgtcggaaagtgagtaaaagccatggtaaaccttaaaatgcaccctataattatatatatagtaaatatcccccaatccctggagcgccaggactcccctcaccatccgatagtaggtaggttggagtgccggggtgcaatgggggctcatagtccttggagcgggtgccgaaatgcgagagcgactaaaaaggcgggccgtggcaagtctcatgtgttgggcaagccgcggagtgcgggattaaaagcatgcatccactgcagtgtgagtaaaccaatctattcgaatagccgtgctcgcagttaatgagcgctgggacctgtactgtgagatgctggaaaacccggggacttgaatcccggttcctcctcatgcgtgaaccgtgctagttccacgatcaatagctagcacacgccttcacaatcttgtcatcacatccatacaaggaaatacatacatatggatacaaggcttacataacttagcgcaaacggatgacatacatcactttgggccaaatggccaataaaagagagttaaaatgcagcggaaagaatatcaattatatatgttcatcggtatgcccatctaccaaaccacacaggcaaccgactaggaatcaccctaaaaagaaccatccttgaaactccggtacccgtcgcaaacactcacatcctgcaatcaagactaaaaacaacaagaggtgggtcaatacatacgtattggcaaaccctacccaaaaccttgggaaacttaaaagtacttgcaagctgagatcaatgagggctatatttgtagttcattttcagcataaagcaaattttgattcgcaatagtaaatgatagtaggttgctatgaaatttgtaaaacaataagcatgtaagtagagcatcatagtagtaatataatagcatcataatcatcatagtaatatcattcttgtgccctccaaggcagcaagcaacatgtctcattctcagcccacaatgggcaaaatcaccatttcccaccttacccggtttcaccaaacaattgaaagccataaaactatactcatgacacttcaccaagttgctcatgaccgtgagcacggctaatcgattagttttagactctgcagagtttatacaactttacccacatgatatgaacactctagtttgtttcgtgctcgcgaagcactaccacactctacacattgaatgcggtctagaggtcatgacaaagccgttacattgcttaatgcctaaccttgcatgagcacggcaagtgtttatccacactaggagcaacccaagtgccgctaggtcggggggccctcgccatccctagcgccgtggcagctaacacatccgttcccccatgaggcacttaaccgttatattggacacacttagacgcctaggcacagccacactaggtagctcctataaaccatcattccgactagttcatactactacggcctcccaatgcaaggtcagacattaaacaacttaataagctaaggccatcccattcctagcacatgtggttgcacggtatacttagatggtgacacaaagtttggtccttaattgactagggcgagcactccccctatcgatatgcaactaccaccatatgcacatcacttgctgccccagtctaaaatcatcatttttcagttttcctttttcacaaataacagaggcaacccctctgaacaatatttccaaatatcccgagtttgaagagggaataccatgtatttgtaaccatcgtaaattttctaagcatggctaagcaagtagctttagttttagctcgaatatacccacattggtgcttagacaacacaacaacccatcctaggtgtatcaacagcaagggtaatcaataagtcaaggtaggcaatgcaacaagtaggagtcgttctaccataacccaagtttaaaacatcttatgcaatttataaataacaaagcatttgcaacatataggattcaacatgatcgaaggaggaattgaagagggcttgccttgatttgttgtcacataatacttctctggtcctgctcacatcacgaatgaatccacaaatatgccatctattcaattttaaacgtaatccaaatgaacaccaaataaacaccaaaaataaattatgcgcaaacatgcatgatactggtgcagtagatagaacattattttagatgaatttaggtgaaagaattttaaattttcgataaagcatgtgagagatattaacagtcaaagttttatatgcggtcagcgacgtaactaatacttctctatttaaactggcattgcacattctagttttgcaaaatttgaccttacagcattaaggaaaatattattatagacctaacaaaatttggttcagtcgaaaatgatttaagatgaattagttatgcatttttgaagtttgcctatttttcagttttccaaattccccgtttgaactgtgcttttgcaactcgaaccctgagcttttatttttattacaaagaggtcctgtcttcttctccaaacgagcagagacagagcagagccatggctgagctcgatctcgagctcgcctgcgtcaaacggcggaccgaatgaggtcggggttaaaggagaaaatgcagataaggtctttgtgattccgtttctctattcatcccagccggcggtggacggagatggccgggaactcgtcggcagctgggctactcaaggactgcacatgcatgtggcaatgcgtttgcgatccgagcaaagagattaagagagacatgcaatagcaccctgtggctcacaggaagcttaccagggggtcggccaagggttgacgagctccggtgaggtcgggcagcggggtggcggtggagtagaccggcggcgacagtgacacagcgatggcgggatctacatcatgcatgccgaaatcattacatgcaacatgtacaacaccatcccaggttgctactactgcaagcaatcgaccaatggctcaccggttggacgggaatcgacgacggaggcgctaggtcggagtcagacaagacggtggtcgatctctctcctcgatggaccattcttggtgattcttggggcatttcatagaggatgatgagacgaagctagtggcgcagcagctcattcggatttgcctaggggcggcgggaagacggaagacccttctacttgggcatggatcaagctcctaaatgattatagcatgcagaaaaatagagggaggtggcagagctgctcaccgcataagcctgtccatggcggctggcaagaacaggaggtggcgatggcggcaaccatgctccagcgacggaatcctgaactgagcggggagatcgacggcaggcagcggcggctcttcatgccgaggaggaggacgacagccatggtggatggtgcaacttcaactggcttgcatgtcatcacaaacatcgaaaacagagctatttcgatgtggtacacgcgttcccgtgtgtcctgtgagctttggttcgtcggagtggccggggacttcatcgaacagctgagggctcccaccggcggcagggaagacggcggcatttcgggcggatggaggcagtctttgatgggcgaagtgagggtggtgaaggaggagagtggtgaatcttgtgggcaaggtcttgggcgctttggctgggtttacgacataagttggatggggatgtcacgagctcgtattcacgttcacggcctcactgcacagcgccctgtcctggcgacatccagcagaacggatgggacaacacggatgggggagtcttcaaggctcgaatggctgccactctgccagaggtggagtaaaggagaaggatttggtcggggcgtggaggatttggccgggacggcgaggtgacgaggtcgacacggctcagccatacccgcgctggggcgcgtccatgtggcgcgggaggttgggtcggcggacaaggggttgtacagcgtggcttgggtgcagggtttagtcgagaatgaggggtggagccaggtctgggacgaattgaagactggggcgctcgttgtcttcttcggaagacatagcacgccacgtgttcgacggattgcccaagagggcagagtgtggagaagaggaagggaatgggttgggcgtctcctggggctttactatggatgacaagtggggtcagtgcttccagggcccacgaacagaggaagggtgagtagataggccagtaaacacaagatttagtcaaattccaggatttttccctctccctctctttgaaaatcgatttgaccaagatacctaagggtagacattatggttgatttttgtggaggtaggctgtggtgcataggttccatttttcaagatgccactccaaatttcgaagtggattgctcccagaaattcaaataaaagggctcttgctgaaggtttgttgaatttttagaggggataaactgactgaataaattctggaaaatttatattacttcatgataaataaactagtatcttaataaattatataatgtatatgtttctgttcaatttgtttactatcctagggatgtatcggcttagccgatgatgattttgaattaatttaaatttgatgggtttgtttgggctatcaatctaactgagagctatctatgatgcttagtatttatgttgagtttactggaatttttagacacatagattagtcaggatgatttcataattggttgtaaggcatatgagtgcaattatggatgcatataaaatccaaaaacaagccaaaataaacatgcaacacacagggggcacactctattccttagcagtcagcacaagagattacacctcgaaatgcttggacttcgcggtactaagatctaggcaggctatgctagctcgcgcttaattagttcgctcaattcgccttaacacgtggcctatgcttcaacatactcgccttttatgcttgcgcatggcttgctcttcagcttatatggttcaaaaatttgcaagccatttgataggatttatttactgtacccaggttcaatagcttaaattttatttgtcgtcccatatttcttgtgtgtgtaggatttgattagtcacgccaactctttaggttttgttgataatatttaaaagtgtcatggcattctctctagattaaacactccttatatttgaccttaattatcattcagacatttagtaaaaaaaacattttctagtgtcttttattctcaagcatgtgtgctcgaatgctctattgtctttatgtggccgtgtctaatttattacttccccacatcttgattttattttctttgccaaaaatgcacagggaggaacaactccataagtttttatttttaatgatttcagaataactgattttcatatttttatttcttggtatgtcacatgtactacccttgactagactcatagattttaatactgcatagtgtagagatgagagacatgagaaccttgcctaatgagtgggaaggttagtatagagttggtataagatgaatgtgagggtaaaccgaaccaagcgaggcttggagaggtggatgaaccctggataattacaacttcaacattaacgttgtttttagttaaaactgctaagtcataggtttgtgaaatgaattgtgaaaactagctttatgcaaataaaccaagccatccttgaacccctgtgtacattagattcattttgtagtagtggcttgctgagtacgtatgtactcactcttgcttaattaaatcttttagaaaggagttggagtcgattatattcatgccatgctgctatcaagtacgtgtcgaagacgatggattagggatcatagattcaccagtcgttgcctgtggagttggatggaccgcaactgcttcgcttccactattcggtatacttctttggaattttgtaatgtatgtgaccatgcttggtctattcaggacccatttgggatacccttgttttactattgtagaaacatctgtaaatgatgtcagttgtgatattatattgtgctatgtgtgtaccacctattgatccagagagtgatactatatgacacatgggattaccggtgtataaaaccgggggtccccacagacatactttgtaacgtcccgcctcttttgtaatgtccagcctctcccaggtcgagcccgcttacatctggcaactttcataggtcatagactaccctcacaagtcttttctgcacactttgtctactgatccagagtggtactgtatgacacatgagattaccggtgtataaaacggggggggggggggggagggtcccacagacatactttgtaacatcccacctctcccaggcttaccctcatagcctaccctcaattgcttcaggcctcccaggcctatccagagtggtacatctggcagctttcataggtcatagcctaccctcaattgcttcaggccaagcactcttaacctcagagttctttagagatcggcttccggaaaagaagttgcaacatgttgatatgagtattctattaatcctattaagccctggtccggaaaagaagttgcaacatgttgatatgagtattctattaatcctattaagccctgggccgggatgtcacagggttgttacacatcaagtggaccaaatagaactttataatatgtggtaatatgcgcttttaaattcgcatcaccatttatcatctcgtcaccattttgtaattgataaattcttgtttacctatgcttaccatttgctgccaaataaaaatatttagtattggagtctcctttcaaaatatttttagtctttagtcacaatataattctgtaaatacattgtaattacactcgacgactatttgtattgcaatgaaacgaaccagtcatgggcataagtagcttgattgtctcaacgtgagtcaatgcgttaatgataaaactgggtccaatctaacagctcaatcggttaaaaatcaatttgctcattgctcaataattatgttcttgcgggttttggctgattggatagatgtgtatgggaattatatggatttgcttctttcctaatcatttttcaatttgcgagttttgacttttggttgattggattggaattctatggattttaggtcataaaattccatataatttgtgagttttccctgacgtgaatgctgtgcaatgtagattntgtggatttgcttcacttctgtggacatttttatgttgaaccaaactaacaatgatgctaatccaggctacatgcttgttgtatcggtttattggctgcaggtttgttaatggaattttggagaatgagttgtaggatcgaaggttcaggtatttttctacctcagcttgtgctagttattttgcactattatatctttgtgatttccacattaggcaccaattaattcctttttttctatgcaaattgcacttccatttgttgtagttgccatattttagtcatgtactctgcttttgaatttctgcaacttcaattataattttcagcaaataccttttgctttcattatagctggattttctcttgaacatgttgcgcataataaatttttagccaatcatggattggagaaacaatacagttttgtttctgccgatataggatgaatatcgccgtttttgcaaattctattataaacatatgcaactttagttataaattttgagcaacaataacttgccatagttctggctggtctctgcgggcttgtgattgtttttgtgtgtttggctctaaacatctcttgttttaaatttgtttcttttctcccttatttcttgatttgcctataaaatagaaccagtagaaatgaaattttagatatctagcatcttaaaaacacatgctatatcgacatcatatgaaaactatgttgattggtaacgtttttatgattattgtcaacatatgtcgagggctatatttgttttttggcatgcagtagaccatagatccaccctgtggggctcatcaggttgatttgctttttgatggggatgtgatgggcaatttttaaatcaatttcatgtatgttgattcttgatttgattttgtgtgttttgtgttctgataattttctcttacaactagacaaaaaatttgtttttttaatagcatggctttaattaatttttccattctagtaacgtttatgtttagccatctacaacatgcagttcaacagtttttccattggtaaaattagaatacaaaataataaaaaaatgttgttaaatttgttctatgtcatttttacacttccctattgttgaggtcgccattttcaaatctgcaaagttttggttataaatttgtgtaactttagttataaatttgtgcaaccattgatttgtttttctgtaattatttcatgtttgtgtaggattggcaaagggacaattttaaatgttccatcagaagattacgacttgttttggatgtaattgatcctaaatgtaatgtgttcagtgaaacagatctttgtattacgagtatttaccttggaaaactttgttatgtgacatgttcttccacaaattatgtcggttagggggagaccataacagaaggcaaattttcagccatgtgtggtatcaaattttgtataggtcaatgcatttgttgtttctaaaccagaagcatcaactaatttgatttgcacatatactattcttttctatcttaattctgcataggctaactttcgttcttgatgcttcccaattgagtttttttaagagaacacatgataatggacaaaaagccttgaaaattaagttcttttgcccaacaatggtaaggaacaaaagcctgcccaacatgcattggaaaaaaaaaggcccaaacgcgttcaactaaaaaataaaccacaacaaagtctcataaggatttagtgggtacccgttaagaattcatgtgggcccattaaggttcctagttcttgtgtatatatgtacatgtgatggcttcttttattgtttctctgcccacctttagatccgcagcggatggcctaataaatccattgatggggagaggtaaataccatacgactgccaaataggcaatcccaatttaattagtaattgtttgatcgttcgtcaggctccgtcggatgctagctgcctaaccttgcagctcttccacttatgtttttttctttcacgtttcccctaattcccattccgttgtttcacacatatttatattgctaatccaaaaccatctctcgggtggcctctattcatttatacatggccattgaacatatcaagccaacatatcaattatgtagttttacagaagtaatcaattactaatggtctatcatctattatagtgcttcctattactgatctatataacttggagtagttttgaagggacataaatcaattactcagttttattagccatgctaatcgatcaacaacttagtatttttaaactgggatcaacaacttaattccttcaccccttcatcagtttggccgacagcgccgggtgacccacctatttctactataagtgggttcgttgattggcccgcttgcgcccttacagccggccaaataacgagttagcaaaaataacaatattaatcattgatttgttgtgctgtggtattatgatcaaattacttatctatcctttaacttaaattttaagtcaagataccttttgtcataaaccgttaaattagaagcaacgaacatatcttataaattccaagcacaataaaaagatctcatatatgacacctcttcaaggtgatgggaaacaatagcccacattgataagacccgtttagattcatcttcaaagctttgcatatactttctcataacagaaagtatcatagatatggtttgagttgtcagtgcatgattaagtggtttaaaccatattgtctatatacactcacaagcaagcacgcctttagtaagaataaacggaagggactacccattaattttttttcaaaaattggtcaaatgtaaatacagtgtaattacattgtagcttatatgtaactgcagtctaatttgttctaacatcctgaaaattaagtagtattttctaattatgcatcatgccgattcttatgttcttaataacctcctaaacttaggaaattaaaaattagaggtaacctcctaaaattaaccttcatagaatccgtctatattatttaaaatcttttgtggtttttattttaaaattgatcttgttaaaattgaggtattttctttgatttgatttttgaatcttaaaccttcttataacaaaattcctttattcaaattatttgaaatccttttatgaattatggtccaagaaaccctccaatattacccgtaaacctaaaccaaagcaattccaattttattggaattatttcttaaacccaacctttgatctagaccttactctaatacttctccatccaaacattttatgattccttcttctccatccaaacattttatgattccttctatagatattccaattatcaaattcctatctagtctccaatttaatttatatagctcaattccctcctaattctctcactggcacaagaatagtattattaaaaatattgtgagtaattgctcttgtgataggaaaatatatttgatccttccatcccaaatccaaaacctcatttagcccataattaattctctaataaatatcataccacatattttcctccctccgtattcctttcagattctcaaaaatatattcaaattaggaaccctactattcatattcataaatacccctccctcatttgagtgctttgatatttagtccactatattttatctctcaaaatattcaactcaaactggaaaatatctctttttagaaattaccttccaatataatttcctttcaaacattcccattcaaatacaaattctatctaaacaaaactctctcaaaaatttagaaacaactctctgggccggaatccacttccttctcctctcggcccatctcccttcttccgacccatcccttttcctcttctttcccttccctcttccttccggcagcagtggcccaataatttggcacagcccagccgccccaagaggcagccgcctccttcctccttcccgtgggtgctgccaccgtgcgccatgggcgccaccgtgcgccgctctaccattgccacccgccgcttgtatggctttgagtaccgcctccactgacctgctgtcgatgccagggaatcatcgccgaccttattcatgacgtcatcctgctgaggtcagtgtgccgttgtcgcccagacgaaccaacattatcgtccaatcagaagacgagggcggcggttgtgctcttcttcttcacatcaccgtcatcgtggccaagtcgacaatcgcctctcgccgcctataaaaggacgatgccccctcccccctcccccccccgatgaaccctgatctccacttgagaaactcacgtctatgattggcccgatctttcggtgagttgaagataattacgattcgggataaacgttgacctttccctcgggctacagtgtcgccgcccattgtaagttcaagtgccttaatttggttttggtgattaatgacaaatctaattatatgagactaacgtttttacgagcctttctttgactagtcttatttggatatgaaaataaaaatgatgagaggtatgtattaaacttcacatattctaacttggtctctcttgtgaatccaaaatatagtgtgagctccctcattgatcttgattgattatgtgcatatgtgttcctttatatccatatgtatgcacatcttgagggggagcttattctatattttgtttattataagatttctatcttgatttgaaatcatcttccatctcatctctctaattgtttatatcaggttattatccatcaccaaagagagaagattgaaagatcttggattaaacaatttgtgtaattgttactttggtgatagatgataaaccgatgtttatgggattaacctctcttttgcataagttgtctactaggttatttcccgataatgaggtgtggaagacatgcattattttttgatggaccttaatcatgacaaggatgaaatgcatggagataaaacgatatgtaccacttcttatctcctactttttgataggttcatatatatgatttccatgttattgatatataagtgtgaaactaatgtttactcgagtcttatcttatttagtctcatttacattgagaacatggagatcatgaaggtatatgttttatgttggtctacatcattactacatatgccttctctatgtgtataggataaacccccattgatcattctctaattatgcatacacttgcatctcttgtatatttatttgtatgcatatatttagggggagcaaatcctatatatttattgtgcatgttctagatctatgttgttcactgttggcggttgttaaatgccgattctataccgccaacatctgcataaagttcggataataaaacatccaacatagtgataggtgcttaatctcacatattccacaagtgttggaatatatttgtatgcagacgacaaaccccgatgttgggaggaaaatcagactacagtgaggagattcacgtatccatataaggaggggttgtaaacttcatccaaacaccaataattcaacccaaaactccgagaaatggatagaggaggtccaggggagaagatgggccaagagccaggccagatgggcccagcccaggttcggccgaaccagagccatccaggctggggttttgatgaggacataactagctcggatataaccatgactaccttatgtattaatcaaataaaggtgcatatgttctacattagatttacttgttatatatttgaacaaacgttgctacacaataagtttcgtgtgtttttgtttgcaaaggtacttacttgggcgaaagaaaagagaccgagcgtaaggaatgcatggatgaaagaagacgatgagggatgttaggtcctgatcttccgataggtattgataaacagtcaatttgggcggagtcgcgacacaactcgatccggcttctgaatgaatacactactgagccccgcaatcgcagcaccacgtctcctctggttatcaaccgtgccgaaatccggttgacctcgccgagagggctaatccctgcatgcgaatcgaagaacacaagcaagaacaagatagattgcaaccaaattgcatatgaatgattaagcactcgaatttggggtttcacaaaccaatctagcggcaaaacagttcttgatagaataatctaagcaaaacccaactctaaacgatgacggctactgaattaatatgattagggacgtcctagggttgtcctagggcgcacacccccttggcctaagcccacgacataattacaaggcccaaaactcaaatcagattcggactggatgagatacgtggtttgttttgcagtttcccggcagctcggtaggaattttgacgtgggaccaaaaccatctgaaagtagactccataagctttccaacaagtactcatgggccgtgaaattccttctagatcagcggctaggttcatttgaagttgatgctgtcaggaggcccgaatccgaatccaaaacgtgtaaaactttatctcttgttttctatgaaccaaaagtgacgtggtgagataaaagaagacttggacaaggtcttggtttggtccccaatcaacttcttcaatcatccatgcattccttacgctcggtctcttttctttcacccaagcaagtacctctgcaaacaaaaacacacgaaactcattgtgcagcaacgtttgttcaactatataacaagtaaatctaatgtagaacatatgcacctttattttattaatacataaggtactcatggttatatctgagcaagttatgtcctcatcaggtttggcgtggacgctccagatcattccctaatggcggttacggggcatttcggacatttccccttcgccaaccgtcatatctacccctatataaagacatcagtccctcacttcacacacacacttccaagcttgagctgaattataagaggctctattgtactatattgtatactagaataggaagagagtagagtaggagttggaagaattccggagttgtcgctaatcttctcctatttcttttattctgtttattactctgaattcaatataatattcttcttgagtaatttagatttatcttgtgagaattatctcttggttagttcctaaatagcatataggattattgttcactataattaactaaaatatagtgattgctttgatgagttataaacactaaagtagatattaattgcttagacgtggtgtttaggtaattgttatccagtaattgctgcgtatcccacagtacgtttgaggtgggtgtagaggtggtgacagccctcgagatcacttaagtcctccctgttcgagtacgtagtagagcgacatctggaaacagtgggttgccagtgcctgaagtattgcgttggaattgaagttaagctttccctagacactgtttctcactagtgaatcctctctatcctggcctatcctttgcttggtgtccttggatgaaccagaggaagatctgaccacacacgttcccttggattcgatacccttggaatactccgtaggggaagtgctacatcggtatatccgtgcgcttgcggattttatttgtgaccgtattaaataccaacaagcatttctggcgccgttgccggggaacggttgctgatcattttcgaacccagttcatcctttatcctttttcattttttattctaccttcacccctgctatcctagagaagtattcctgtcaaactcttctcgaccttggagcaacctctttttgagctatctgctcctcggggcgaattctacgagccacctccttcatcggagcccatttatacaactggctatgaaattcgtcccgaactaattagtatggttagggaaaatcctttttctggctttgatctagaaaatccctaccatcatctgcgagactttgaacaagtctgctcgtgccttaagattcgtggcatgagacaagaaactgtgcggtggaaattgttctcgttctctcttcaagagagagcaaagcaatggtatacctctaccgttggatgtgtaaacggtagctaggaaaagctgcaagacagattctgtcttgccttcttcccagttacttgtatcactgcccttcgagtagaaattctcagttttaagcaaatcgaaaatgaatcaatcggtgcagcttggtccagattcactaatttagtgcagtccggaccaaccctgtccttacccgagtatgtgcttctccaacatttccatacgggtttggataaggagtctgcattctatctggacataactgctggaggatcattcatgcacaaaacgccgtcagaaggaaaaacgattttggatcgcattctagaaaatacttccttcatgatgcagtccaatgaaccccagctggaggcatccgtgtccaagatagaggaacttctaacaatcgagccacttgctgaaccatccacttctgctagctcgattgatgagaaggttcctgtgtagccgtccgtcgggaatgaagaaattcagactccggattgtaccgtaattatgttcagggacagttttgacgaagactacggcaataccctgaactattttagcaagaggaaaccacccgttcctttgtcacctcccgatcctatggaactcgggttcctgtgagaaactgtccgagttgacatccataatgagcaatgaatggctaagggaggtagagctttcatccgaagtaattcagataaatacggctccccgaatcattccatgccatctagaagggaacgatgtcggtattctctacagtccatctgtcggggccaacctcgtctctgagtcttttgcactcgcttatttaagcgataaggcagtgtccccgacaaacaaattcttcaagcatccgaacggaaatatcatcgaagggtttgggattgtgcaagatgtgcctgtctgctttgaagacatggaggcgatcttggatttccacgtctttgaaattcaagatttcgacattctaatcgggcttcccattgagcaacttcttattaacacaccccgattaggtagcctcaaaataacactgggagagaatgaattttcaattccattctcgcgggcaaggatcaccttgaccgattctctcccagaaattgagtcagcggaagaggttaccgcagtccctcctcatgagtctcctgaagcccttctggaagatgaggtcccagacttcatcaaggaagaagcagatcccggtgagactctcgacctgccaatcatggaaccgccacctcgacctccgcttgagcttaaacctctacctccaagcctatgatatgccttcctacataatgatagagaggccctgtcacaccccgaagttctcctcccaagcctaaatttaatttataaatgaccctaagaaaataccggtgcaaatcaagagaaaaccctaagaaagtaatgcaaataataatcggatttgacatgtggaatttttcttgagttctacatgtcgaaattcattaacaggatttttagtggaattttcagagctctagaaataattttaaccaattaaaattgagcaagcaatattttaattccagggaaaatcctttttcctttttctttttctttttcctctctttttcctttttttttcgaatgggccgccggcccattctttccttcctccccctcctccctgctgggccggccgcaggccgaggcccagctaggccgccccgccgccctcctctcccggggtcgccgacaggtgggacccacctgtcgggtccttcccccacctcccgccgctcccggcgcgccgccgcgcccgcaaccgccgccgcgcccacgtctccgcctccttcgggcctcgtcgaccacgtccgcgcgtgcgcgtctcccgcgcccactcccctctctctcccgctcgcgcccgcgcccgagatggccgggattcgattttcgaatcccgcctctctctcctcccccactcccccacgtcggccggcgattcccgcctctcccggccacgtccggttctctctctccctatttaatcttctccgtcaccccctctcgctttttccccatttcgccgaactctctgtgcctcccatcgctcccgcgccgtgcaacctcttgccgccgccgtttccgctactccggccgccgttagccgccgctagggtcgccgccgcaccacgccgtcttcgccgtcgggttcgcaaggctaagccccaccccgaccgccccttccccgtcgagtttcgtcgccgaaattcgcatcccctcgcgctccggtgagttcaaccgctaccgccgctttcggccgtgaataccggtcgccgtggttcatctccctctctctaatccctctcttctccttccttagggcaccccgaagctcgtccgccggttgccgtcatcctcccgtggctcgccgtcgccgttcgccatcgtcttcctccgcgccggccaccctcggtgaggcatccctcccctcttttccccttcctctcctcctagtgccgcgccgccgcttcaagtcgcgcgccatcgccttcgaccaccgccgccgcctcccgtgccgccggtcgccgccgtcgtcggccgcatgccgtcgccgctagacctggccggccggtcggctttgatgccgagccgagtcggcggccgcctttatcgccgcccattccctccccttcctagccgccgcttagcgcagccgccttcgcgtcgccttttgcgccgtcgctttcgccgccggttgccgtcgccggcaacgcgttcgcgcgcgcgccatcgccgtcgccgcggtcggtcggccggccttgagccaagccgagccgcgtgccgccgccctttctttccccccctgagccgctgaccggtggggcccgcatgtcggcgccgcttcccctgtgctgacgtcagccctggaaaatattgcgcaataaattatttaaggatttctgttatagtaataaacacagtgaatcttctaaaattcataactaattcatccgagctccgtttaagcccattcaagtctcagtaaatcaagaaaaatgtgtagaatccattaaaaatggttttgttccctgtttcagtagtcttatagcctgtttgcaatgtttgctttgtatgtcgctagattccgattcctccgacgctccggtgtacttcgaaatagtcgccgaggttcctccagcagcagagcaaggcaagtcatgcttgtcacttgaacatgttgatcctatattgcaaatgctctattgttttctttcaaatattgcattgttttataatgttactatgggttgtttacctattgtcatagccatgcgattgttgtaccttgtttctttgtcaacttggggttctaacatgattagagttaggactggggattgcttagccatgcttagttcagctagttcacattggggaaaatcctattaatgtttagactgttggttccaatggtgttgttggattagtgacaccgttttggtgttggttaattaaaataaaccacatggtgggctgtgggtgcatggttttgctggtcgcacccatggcagttaaggaccggttcgcgggatgccctggaagaacttatcgtacttaccacaagccagcgtgggcaacggctgggcttgtagtgtagctctcctctagtcgacgcatccaggcaagggtgggcgtgatggagcggggcgggccctgcgacggcctctgtcgcttccggattcacctaggcacgagaggggactgcccgttgcccgctggggacgggggtgaaacctgaggtgtggtgtgcttggctagagggggttatgcgaagggtcctgtcacggcctctttccggtatgtcgtggtggcatgtcggcgcacggaaacgtgtcgtggggctgtgtcttgtgggtacagatgtacacctctgatcagagtaaaactattcgaatagccgtgcccgcggttatgggcggtcaaccagattcaccgtgattagtctcaccctagtgtaatcttttgaatttggatagtttaggtggatggttgggcctgtcgcaacgtgggttagcgttggacagcggatgattaatattaattaattattacaaccgtttaaatctttcaatttctgcttataaatgctcgctttatgcaaatgaaccacttcagctctcctttgatgattccctgcatcatacccctattccggtatgacttgctgagtacagtgggtagtactcagtcttgctctacttttcccaaccccagagttcgagttcgggtcagatgaaggtttctccgaggagtaggctttgtccgtgccgtcgaggatgcctgtggagtggtgttcccgctgcagttcaagtcaaggcttagctcctgttgtctttctttctttccgctgcattttttgtaagacttttatgatgtttgtaagacgtggatctgaatgtcaacattgtcgtttgtgtaccccggccggtcctggacggggaatttaatgcacattctgcttgaaattctattcgggaatttctgggcgtgacaggcccctgtctcataatcagtgacaagctctctgaagacgagactcaacgtcttctcaccgtgttagaaaagcatcgttctgttcttggctactcgcttcaggaccttagggggattaatcccgcgctttgcacccatcgtattcctattgaccccgagagtactccctccagggaacctcaacgatggctcaataatgcaatgcgagaggttgtaaagaaagaggtcttgaaactcctgcatgccgggattatttatcccgtaccatacagtgagtgggttagcccagtccaggttgtgccgaaaaaggagaaatgacggtcgttgcaaatgctcaaaatgaactaattccgcaacgaaccgtaaccggacaacctcaccggagagccaacaccggcgaatcaactcatcccggtggaaaattacacagtggaaggggtgaatgcactgtgggtgcagcccctcgcagcagtgccgggctcccctgaaaatctggagcccgtcgacgagctccctggttcgaccaaaccaggggttcggccaaacccttctcggccccgttcggccccctgttcggcagcgcgatccctctcccctcgccatgtcacaaggacaaaaattcggggggattcgcctgctcaacggctgacgatgggagagctcggtctcttaaaggcatgtcgcctttttcaagatgacgggaaggccgcgccgcctcccaccgagtgttatgtgggcaccctgttcaccaaggcagtggatgaggtgctcacaagtacaccacacccaccgctactccatccactccgaaggaggagcgattccgcattcagggagtgcgaactcccgcggtaggtatggtaagggtttactccggcctttgatggcatcagagaaggagggggcagcggaatcccgtagccatccacctatgaaggtgaagcgtcacttgacgccccctccaattgtgagggctcccggccaattccaagaaaatgaggtgaaatcaccggagccctcgatccataagctcgctgcgcaagtgaagaaactccgcaaggagaacatagagcttagggatcgcaacgcggagctaggggtagagcttgctgaaattaggaataatttcgatacccttagtcatggtttgtgcgctaaaatcaagcgtgcattcatagatatggggaagaaaaatatatattatgctaattagatgtttcctttcccatgaataaaatagtagtaggtgcttggttttatttttccaatcatgtaagcacttgctatgaataatgtggcacaatggtgttaaccccaatgtttgccaaagtttgttttgtttcatgcttaataaagttcagattttgaataagtgtgggggagatatcccagcttctgacgtgcacataatctgaaaattgctgaatatttgaacacctagaaggcaccaaactctgcagcaatttgcagaaggattgggcaccagagtggttcggccgaaccaagtctggccccaaaccctctcaactttcaatggtaaacaggtgagcacgtcttttatctgtatatctccaccatggtatagtactagagctgaaaattcagaaaacaactggttgaagcataagtgaaagataaaatttccaactaatgaaattcttcatatgattgatcgtgtatattcattattctcagctgaacttgtgcttgtgaacaaccatccatgattagggaaccttatacatctaagtgattgctttatgtgagatgattaagatgaaaggaatccttgcaactttgttatgactcttggggatttgttttcaaaaataaaattgtttttaaaggctcaatcctccaattgattttaccttatacataccaaggccatatgcaggtatatcattgataaaccttagtatgcatatgactgcttgacattatattgagctttgtcaaatttgtgtgacttgtgttagatatctttcatactctcatgatcaaggggtcaattccaccttcatgtccacatataaaattaagctaagcttctacactggaagttggctttccacaaaaaaaaatatccattcaaataaactcctacattgaactatgctttcttctcctagaaaagttctcggcaaaaagaaaatgagaaaaggagggaaaggcatggctgtgaaaaaaagagagaaggaaataaagtttgctctcaaaacattgagcaaagaaaatatagccaagccccttccataaccatgccaagagaaccaattggagagaaagtataggaaaaagggagaatcattttctttactccatcattccacaaaaatattttactttttcattttccaccataaataaagacccttgatctaggaatatgattgattatcttcttgagtctatctttttggatttgcaatatatatgatgcaggtacgtcacaatttatccctaccaagctccacatattagccttagaatagggataagttctggcacattttgccttggtgaggatccaaagaaaatatacatctttgagagacaagagagaaagtcataaaaatcccatgagtctggcagagaagcaagaaggactggaatcaagatcattccatttatcaattactcaagatggtaagatagccacttataaagttcacaggtacaggtatggttgtgaatgatttatatgcttgattcatatcttaaagaaattcattctacactaacctttactcagggacgagccaagggctaagtgtggggggttttgttggcggctgttaaatgccgattctataccgccaacatctgcataaagttcggataataaaacatccaacatagtgataggtgcttaatctcacatattccataagtgttggtatatatttgtatgcagacgacaaaccccgatgttgggaggaaaatcagactacagtgaggagattcacgtatccatataaggaagggttgtgaacttcatccaaacaccagtaaatcaacccaaaactccgagaaatggatagaggaggtccaggggagaagatgggccaagagccaggccagatgggcctagcccaggttcggccgaaccacaatctcagccatccaggctggggtttggcgtggacgctccagatcactccctaatggcggttgtggggcatttcggacattttcccttcgccaaccgtcatacctacctctatataaagacatcactccctcacttcacacacacatttccaagcttgagctgaattataagaggctctattgtactatattgtatactagaatagaaagagagtagagtggaagaagtcggaagaattctggagttgtcggtaatcttctcctatttcttttattctgtttattactctgaattcaatataatattcttcttgagtaatttagatttatcttgtgagaattatctcatggttagttcctaaatagcatacgggattattgttcactataattaactaaaacatagtgattgctttggtgagttataaacactaaagtagatattaattgcttagacgtggtgtttaggtaattgttatccaataattgttgcgtatcccacagtacgtttgaggtgggtgtagaggtggtgacagccctcgagatcacttaagtcctccctgtccgggtacatagtagagcgacatctgggaacagcgggttgccagtgcctgaagtattgcgttgggattgaagttaagctttccttagacactgtttctcactagtgaatcctctctatcctgtcctatcctttgcttggtgtccttggatgaaccggagaaagatttgaccacacacgttcccttggattcgatacccttggaatactccgtaggggaagtgccatatcggtatatccgtgcgcttgcggattttctctgtgaccgtattaaataccaacattcacctattatttatatcggatctttgcacttgagcttgcatacgagtatatgacacttgtgatgttaatgaatactcaacaaacatatccatatctttcatatgcaaccagttggtcatcaagtgaaggatgacaaccgatttgttgagactaatgttcaactttgagatgtgaaaaggaataggtcccactacgatgcggctaatgaatgacaccatgggttaatggtcaccaagccaaggacatcgtcatattggcaagaatgaagtcaagcttgtgatgagaataaagtcttgacaaagaatggtaaagacctcggcataaacatggttcaaccggatggtcacaagtgttgatcttggctcaagcattgaccccaagttggatggcgcaaggcaaaggtataatggagctaagaatcttttcttagtcttttcccggtcttggtgtttggtgtagaccggatttgctagatagacgccgtactatcaagaggggtctatgaagcgagcatatggatgatcttgcgccatattagttcatatgcatgtaggtgtatttggtgggcttgtctagccaagtgtggtgagttttctcaagtcctaaacaaagagagaagtgggcaaatcctataggtttgggtagcctcatgtggttatgtcgggtggagtattctttggagtgtgagccctttctccctgataaaagttgtgtttcttggatgaatttttcatgggttggatggctatttgaataagctttacatagagtccaagaacgtcaaattctgagatccgagtcaagagatatcgccgttttactaactgttggttgtgctgaaaagtgacctacggtctgaccgtgggccataggacggtctgaccaaggatgttagccggtctgaccggcgtggtaaggccggtctgaccgtccccactggtctgttgcactggtctggtttttagtggctatacagaaccaccagagccgcaaccggtcagaccgagccgacggcggtctgaccgagccatggacggtctgaccggccactacactacggtcagaccagccaggttgagtgggctcaatgattgccctgtaacggctagttttctagccgttacaaagtagtctggtctgaccggccactctatggcggtctgaccggcagagcacagagttggggatttcgactccaacggctagttttggtggttgggggtatatatatacccattccccagcagcaagggtaggtttttggcactccattgcattatcttgaacccaagagctctcacacccttgtgcacttagtttatctagtgaggtgttggagagtgagttaagccaatccaagtgcattgcttcattgttagagctactgtggcacttgatcatcctcggcaagcatcctagacttgttactcttggaggttgccacctcctagacggcttgcggaggtgttgcccggtgacctctccgaggagattgtggaggaggcccggcgccggttgtaagtggtttggagttcaccaccttcggagtgaaggaagaactaccctagtaatcgaggcttgagtagtcctctccgtgggccggcgtgcccaccccttgacgaagggggcgtgcggtggcttcgtggttgagcagtggagttgggctcgcgtcaacggggattaggaaaccggcgagtttccgaacctcggtgaaaaatcccttgtctcttgtctcatttatttgttgcatttacatttgagcaagtttacatactagagcttatttgtgctattatcaccctaggcttgcaaaccttaacatatgctagtttctttgtgcacttacttgagactagttgatttaggttttgaattgtgcaaaaccgttctgatttacgcttccgcatacaaaactcggttttagcaaaaagttttaaaaccgcctattcacccccctctagtcggcctccttgatcctacacccgtggtccacctccactggttgttggaacgctgagagacgccttcctcagcgcggcctcaccgctggtggagtttacaccgctgcattgacatgaagctcatctgtgtcgtcccttcggaccacagccttgctgctttcgtcgtcttcctcaccgcccgtgtatcgacaccctcatcgtccgcactggtcatcttcagccatcgggatcttcttcgactgcttcgagcatcatcgctgcatttttaagttgccaccgtcaccgctctaggccagtggtctagctacgtcttcatggctaccgacatcaccgtttcaagtcgttggtcccactacttcgcctttgtctttgtccaacttgcctcattgccaatgtcaccgtatctttctcgactacacttcgctcttctctggcaatcgtgtgttgctctgacaatccccccctccacgtcgttctcgcgccgcaaccgtcatggaggtcttctctactagtctcctccgacattggtgtatgattcatggtagtctcctatctcgcccgcgtggtattggcaacatcgtagcgtgcattcgtcccgagttgtccccgggtctagcaaacccggcatgacgtctcgtcctatacggttcgacaacatcaactcttcggcgtcatcttcctcaatgacttccacgaacgcatcaccgtcatcatcttcagtactgcgttctaggcttctcgcccatgaccacatactctacggcgccccatgcgcgccctgcggctaggcaacctcgacatcattggctccccgactttggctacattgaccatgactactctatgcatggcttcattgaccatggatccctcgcacccttcgcttcatctacatcgactatggcacaacgagctatcatccgtattaagcactcttgtcggtttcttctccagtcaaagtgtttgcattgctcacgcttggacggcgagggtatgttagagtatatggcagttagagtcatattaggatagaatttatttgtatggactccttccatttctgtaatcctttcttatctcctcgccatgtactccaatatataccgcccccctgaagctcaacgtgtccaataaaaacaatatcctttctccctatactattcaatacataggagttatatactggagacggggagactcccgagtgtcaaaaacacttgccaatgcatgaaaaacactccgtaacagagttacctagtcccacactcagtaatcttcgcccaggagtgatttctccttcccgtgcatagttggcgtgtgtcctaggtacatacactccgtaacagagtgagaatttccgggtgctctaggcactcggtaacattttcactccactgtccaacagaattccataggcaacggtgacggcacagttgcgtagtgcagagaaagttacagtgtgtttttcaatcggacacacacggtaaaccttctcttgttcccgggtgtcgacatagcatgacacacgttaactttccaagaaacacacagcaacagtgccgttgttaacgtgtgttcagtttaggacactgtaagttgacacacaggaactctacttgagggcaaaactaaaatgggtttgctgatacatttatattatttgcttacaccagaatagtaggagcttaataacacatcataggcgatcacacatacaatggaagaatggattccaatgcattgacatccacgttcaattaatcgatttgacaacaatctaatgtgaattacaatagcaatgccaatctcatagacatctacaactgagatgaaatttgaatattacttcttaaggttagataaccaaggaggtagggaaacgagaaaagagttgacgaatggcattgcaggcagtccgacaacacctcaaataatatgaagatgagccagttgacttgcaaatcctgagattgcacaaaagaggtaagattaattacgtaggcgagctttatttcaaaacaacattttatgtacatgtatctaaaacagtgatagcacatttatatgaaatagcattagcaacaagtttatttaaatgatctatgccaataagaaaaaaaaactacctgaacttattcatgctttcttcaagaattgtctaggtttgttacaaaattcaggtataacaacagtaattaatattggaaacatttattgatggcacatgccaagaagcgctatgcacccaagtaggggtggacgaaaattcgtagctcgttagctcgctcgacttgcgacaagctcggctcgactcgtttcattttcctaacgagccgagctagccttttagctcgttagagataacgagccagctcgagctggctcgcgagccgtaacgagatttgacaacccagcaggcaacagcaatcccagtccacaagcccacaaggccacgaggccacaaagcccacacaagaccacgaggcccatcagagcatgtaaagtactaatactataccacaaaccctacctgcctctcgagagtctcgatctctccttttcactctgcctatccgccgccagtctgccgctcatcgcccagcatgcacctcgcagccacgccgcgctgccccttccttcccggtctctagtgcttgcgccatcgccacctccctgtcgcgaccatctgccaatctgcgctgagggctgcagcaccgtcggtcgtcgcggcgttgccccagcttggccgtcgcgtgcgctgtcaccttggcaccgcagatttttgtgtcgtcggtcatcgcactcgaactcgccgctgcggtctgcctgtctgccttgccgtcgaccgtcgtgctcgtcctcgccgctgcaggccgctcgtcggctcacgttccgttgtcctagctcttctaatcttgatgtctgatatcttgccctctccagctcgcgagccgaaacgagctagctcgagctactgaccgagccgagccgagctgcgttttctgctcgtttagataatgagccgagccgagccagctcgttatctaaacgagctagagcaagtcgagccgagccgagccgagctggctcggcatccatccctacacccaagtgactggtcaagtgctcatttaagttctttttttatactagccaagtgctcatgtattgcactgaaatccaaataaatgattgcacatgttcaaaataggggaaaatgtaaaattgaaatcaaacttctcttatagaacttcatgattcctggtatataatgtaatttaggataaaaatgattatgatcctaactcaaacaattcttgctcatctatcaaaattttatcttactatcaacattttaatgggatttgtataaacatactcatcaatttgctagcaccaaaattgtaaatcatgtaatcagaaatccaatggtatgagaagaatcaattgagagaatatacaatagtaaattcaatattcagacatcatagtagacaagggaactttgcttgtagtacctgcttcggtgtcactcttcacctactagacagcaccaattgattgagaatctactgccttgtctatcccaatgcttgtcattgtcctgaaatgaatgcacagagtgaccttaggtgggtaaaattgctgtggcttattccatgataattaagttgggcctgttaatttatgatttaactaagaaaaaggaacgcatgccaacttgagagaaagaaatggctccctggctttgcagtgagtagaatgtctttgaggtgatgcctatgatggcttgaaatggagccgagctggattggttcagtactggaacagacattgcaattttggaatgacttcttggaacatggctccaatcttctgaaaaaaaaaagaataataaattcacacaagaaaattttaggcatctctaaatcaaactacagatatatgcacagttggttcatactccatatgattttagttgtgttgtactgggtggctcatggaagcaatcctcaaggaaaggaattgcatcatatagataaaacaagaattttatctccacttggttctgcaaggatagtacataagtgacaatctcatccaaaattgtttcttctcactaacaggggctctaataaagtggagaattcgataatctgattcctcttgtaaatagctacaatttatcattatgaaggatgaaaaaaatagtttcattgtcagagatcggtttaaaccctgaaaacaaatgaacactgaagaaaggtgctatcaaaaagtacatgacaagttgaatataagtacttcctccgtttcacaatgtaagtcattctagcatttcctacattcatattgatactacattcatattgatattaatgaatctaaatagatatatatatatctatattcattaacatcaatatgtatgtggaaaatgctagaatgacttacatcgtgaaacggatggagtatgtcttagtcactagctacactagaaatcaaatccgagctaccagttagaagctccaagttctccgcctgaaaccaaaaaagctccgtagttctatatttagagggaaaaaaatcatattccagcaaaaagccctttgcggctgtccaggtgaaaagtaaaatgcttctcttcacaaatcaaatccacaaggacccttctccatgcgtgcaggagggaagaaagagacagagaggtggggaagagagagatcataccatggagaggcagctagcatgtaagtcttgcccgggtccttcttcacccaacttcttcactaacctaaaaaaaaaatccccaattagaaaagtcttgaatgaaccacataacttggggaataatccagatattatagatctgggacaaaggagcttgtgggaaggaattgaccagtggagggatgaggagggcagcgcggcccctggccatcgtcgcaccggagcagctgccatgggtgaggtggcgctggatctggatgcccccggactcatcgctggcagtctggtggccccattgctccggcgagccaaaggtagaggatccatgtccaggatgttgtggagggagggctagagctggagcagcgggaggagggggcacgccgccatgccgccacggagagggaagagaaggggcgcgtgcgtcggtgctttgcctggctgtggagtgtagtgttgactgtggactgtgaacctggcctggctgggtggaagagataaggaggggaaattgtattcccgcacgcgccacagcaaattagaaatttggggcgggggattttcgttttacaagcacatcaagcaatttatcattattttgctctacatggttttttacataattgaagcaatggaatgtaagccaaagatagataaccacgcaacaaaatatacctgtggagtaagatatttatacttttctcgagtaaagaaaatttttattctaaaaataatttcactctaaagttaatgttagaatatactttccatacttttagaaagtaagtttagactgcatccttgttggaacatgctgcaaatgacatcaagtacagtcaagcaaagcgagaaagcatgattaattaagtattaattattttaaacttaaaaagtagatttatctgatattctaaagaaagatttttagagaatttttttcataaaatacatcgtttagcagtttgaaacatatgctaatagaaactgaggtaaaatctatatcttacttagaaaaaaaatcagaaaagactcgggtataagacttctctaattttagagccaaataaattgttaatggttgaaaagccagggttgaatgaccaagcaaacaagaaaaacataagtttatttaaattatgagtgaattacactttacatcgggtaaaatgcatatgtttcattttgcatcaggtttagcatagtgttgtgttttgaaataattaagattcactttacagtacgatacatcatcgaacctacaaaattttcatgattatgaaagaaatattgtaaaacatggtataaggcaacaagtttcgtttttattcaaattataagaaacgcaggatcgcgtatatggtgtggtgcaaaaaaacatgggaccgacgggcgacgcaaccccagcgtgggcgcgcggcaccgcgtcagtccctttagccagccaagctcatcgtgcggacccgcttgctggtcatgcaagaccggcgtgcttgcgtcgctacaactgttggtcggtcgcgcgtggctggctcacgccaccgcttggccggttcgcgatgttgcgcgtctggggcgtgggaccgacgtggtgccgcgtttcccagctacgggacaaacgcggtgccgcgtttccaagctgtgggaccgtatcggtctcacgcgttctagttggccactgcattgacatgctttcgaggcgcgggaccgtcgtggtgctgcacttccgacctatgggaacgtggcggttccgctcacccgtgctgcaagaatgatccggctggtggcgtacccacatcctcgttgcaggacgaatatatgtgtgctaatccttcccctacatatatataaacgtaaattattaaaacaaatgtatattcacaaactttttcggttgccattatcgtcacctagcaatacgttctagggaaaaccttgtttgccagtactatgcttttttcttatttatcactcaactatggctataactttcttttcttgtttctatttttttaatgtgtgcttttgttatttatatcttcatgttataagatatgattttatataggtactccctccgtctcagaatatagaaaactaagatcggatgtgacgtatcctaggactacgaatctggacataccccctgtctagattcgtagtactatggtacatcacatctggtcttaggttgctatattctgcgacggagggagtaggtagctacgaaaatatttgtttttatttaagcttggcgattattttgttcaaccgtgaataatttgatttttttatgaacgtggggaactttggattaaactagctcttggtgtgaacggtaataagactatattggttgttttttctttctttttttatgtaacattctgccccaggaacggtgggcttaatggagaattttctgctatttgattgacatgtggccccaaccattgactgctccgttagtttagttagaattaccgagttcctatcccacatagcactgtagcccaccgtgatttccgttcccgttcgcgccacgttgctgctaacgaaataccgttcgcgccaacgaaaagttctgggaagattggtgcgggccccacattgcctagtttaacctcaaaacacaccgtactctttacgataatgctattcgtcggtcgaccgacgggggagaaaaaaaaatcgggtgctccccccgtggccccgttcccgcgcacagtgatattgttggccccaccataatatctgtccctacctgcaacaaatcaactatatattttgaaaaccctatattaaaagaatttggtttatttttttgttccacaaaaaatattgcatatagtatactcacaatgtttcattatgtataaatctaatgttgcagtgagctaaaatattccattgcaaacaaaaaaaacccacatattttagaaacccctattaagggaaatcgttttattttttgttccaccgaaaaatgtttcacctagaatttgttccagagtagattttcgtgatgtgatttctaactatagaaagaacttatatacaatatacaaaaaaatttcctaatcccttttttcttccttgaatcttttagttttagtcagttcatgaaaaaatttatactattaatttcttcttatccataatggatttacctgggccaatacatgaaattcttgtgctatttgggggatttgttcttctactagggggtctaggggtggtattacttaccaacccaactttttctgctttttcgctaggattagttcttgtttgtatatccttattcaattcctactttgtagctgtggcacaacttcttatttatgtgggagctataaatgtcttgatcatatttgccgtaatgttcgtaaatggctcagaatggtctaaagataagaatttttggactattggagatgggttcacttcactcgtttgtataactattcctttttcactaatgactactatcccagatacgtcatggtatggaattctttggactacaagatcaaaccaaatagtagaacagggtctcataaataacgttcaacaaattgggattcatttagcaaccgatttttatcttccatttgaactcatttccataattcttctagtttctttaataggtgcaattactatggctcggcaataagaaatacttagaatgagtcaaaattataagaatttcaaatctaaaataaatcactaaagaaccacaattttgatttagtaaaacccatctactgccaacaaataccttcttttctcttttgttgtgtaattgttctattctaattaattcaatcggttcaattcttgtccccatattgaaatgaatcgagattgataaggagttagttaatgatgtttgagcatgtactttttttgagtgtctatttattttcgattggtatctatggattgatcacaagccgaaacatggttagagctctaatatgccttgaacttatactgaattcaattaatctaaatctcgtaacattttctgatctatttgatagccgccaattaaaaggagacattttcgcaatttttgttatagcccttgcggctgctgaagcagctattggattatccattctttcttccatccatcgtaataggaaatcaactcgtatcaatcaatctaattttttgaataattagacatagaatcttctaaacaaagggacacatataataataatatgaaatattaacatgaatactatttattatttgagaatatctattttttgagtaggttattccatagtattcttttttacttagttgaatttttgcaattcattgatattgcaatttgaatattgcaataatttatattgaaaagacgatagccaatttattggctaattcgaattcgtatatacaattcgtataattatgattgttgaagcccaaaattaaagtctcttggctcttttcatgctttctcacaaacggattaagaaatatattgcattatttgttgaagtttggataaaccattgcttcgtctggtgtctacaatacatttgattgatatagtactaatttcattttgaccagatcgaaaatttttatgttgaaaaggaaaatttatagatccaatgtcacattccgtaaaaatttatgatacatgtataggatgcactcaatgtgtacgagcttgtccaacagatgtattagaaatgataccttgggatggatgtaaagccaagcaaattgcttccgcgccaagaaccgaagattgtgtgggttgtaagagatgcgaatccgcctgcccaacagattttttaagtgtccgcgtttatttaggacctgagacaacccgcagcatggctctatcttattgatacgttacaaaaaattccacttgaatcgtctgattcctctttaccgaagaagcctgtgctcaaaataatcgagcacgggcttttctggtcaaaacgtatcttgtctttatcactttatcatgagttcttttccttggttaacaatacttgttgttttgccgatatttgcgagttcattaattttctttttacctcataggggaaacaaaatcgttaggtggtatactatgtctatttgtttattagaattccttctaatgacttatgcattctgttatcatttccaattggaggatcccttaatccaattaaaagaggattctaaatggatagatgtcttcaatttccactggagattgggaatcgatggactttcattaggatctattttattgacaggatttatgactactttagctactttagcagcttggccagttacccggaattcccgattattctatttcctgatgctagcaatgtatagcggtcaaataggattattttcttcgcgagaccttttacttttttttatcatgtgggagttagaattaattcctgtttacttacttttatccatgtgggggggggggaagaggcgtctctattcagctacaaagtttattttgtatactgcaggtggttccatttttttcttaatcggagttctaggtatgggcttatacggttccaacgaaccaagattagatttggaaagattaattaatcaatcataccctgcaacattggaaatactcttttattttggcttctttattgcttatgctgtcaaattgccgattatacccctacatacgtggttaccagatacccatggggaagcgcattacagtacatgtatgcttttagcgggaatcctattaaagatgggagcatacggattgattcggatcaatatggaattgttacctcatgctcattatctattttccccttggttagtaataataggagcgatgcaaataatctatgcagcttcaacttctcttggccaacgcaatttcaaaaaaagaatagcctactcctccgtctctcacatgggtttcattattataggaattggttccataaccaacattggactcaatggagctattttacaaatattatcccatggatttattggggctacactttttttcttagcgggaacggcttgtgatagaatgcgccttgtttatctcgaagaactgggaggggtaactatcccaatgccaaaaatttttaccatgtttagtagcttttcaatggcttctcttgccttaccaggaatgagtggttttgttgcggaattagtagtattttttggactaattactagtccaaaatttctgttaatgccaaaaatgctaattacttttgtaatggcaattggaatgatattaactcctatttatttattatctatgttacgacagatgttctatggatacaagctatttcatgttccaaacgaaaattttgaggattccggcccgcgagaactctttcttttaatctgtatctttttaccagtaataggaatcggtatttatccagattttgttctctcgctatccgttgacagggtagaggctctgttatccaattattatcctaaataggatttttttttcttctactagtccgctctatattccatagtggaaatactaaaaaattcagaaaaaagtaaaagagtctaattagatctatctcgaatttttgagaaccctttgagaaggcgttcaaggggttctcaaatcaaacacaaaaatggaagttttttccatttcattaaggttttatgttatgtaatcatttagatgggtaatgtaaatgaaccataactatgtaaacctattcctaatagattgataccaaaataacagatccaaattataagaaatcctatggaagctacaaatgctgacttcgtacccttccaatttggatttgttctactatgtaaataaattgcaaatatggtccaagtaataaatgcccaagtttctataggatcccaattccagtaggatccccacgcctcattagcccatactgctccacaaagaatacctatggttaaaagggtaaaccctagactaatgacacgataactccaagaatccaaacactcaattaattgatatttgtaataatttggaaataaaggaaaaaaggtgctttttaaagcacttctttcactatgtttcattatgtatggatcaaatgttgcagtgaactgaaacaatctttcactatttgctaaaacattgtttttatataaggtgaaagaacactcgatttaaacgagtgaaacattttcaatctacttagtgaaacaattccgatatacctggtggaacatcgtgcaacatttaaaaataattcaataataagctaaaaataatttcgtcggaatatatccatgtgtggtcttgctttaaagatttaattgcaacgatttaatggtgcaatcggatcaagctttggataagtaatttaagagaaaaatcagtttaaaatagtttttacacgtaaatcgggcgctgacatcagggcccgattttaatcggctcccatcaggcgcccgacggggagtcacgtcctaatctttagttgttcccgggtgttcaataggtacgctccgtaacaacattagttacgtagtgttccacctaaacaccccgcaagttacctggtgctagataaacaccccgtaatttttcagctcacactcggtatagtctccaatcttggtagtcctacgttgctatattgctatattgtgggaatgatagagtaatttgtgctcagaattcaatcaattcatggccggctattaattggtcaacgtcctctattctttcttaggctgtgtttagtttcacaccgaaattgaaagtttaactgaaattgaaagtttaaagaaaaaagttgaaagttggtgtgagtaagaaagtttttgatgtgatgaaaaagttgaaggtttgaaggaaaagttggaaactaaggccttaattaactcttgtcgtgtcccctctgcaggcgctgttcatcgtcgtcatagcacgtcgctctccgaacgctgactatagcaggccaaacgggcggcccggcccagcacggcacggcatgccgacggcacggcccactagggcacagcccgttaggcacggctcctgtagcgggccgtgccgtgccggcccacgtgccaaggccacggcccaagcacggcccaagaaggtgctgggccgtgccgggccggcacggctactgtagtggcacgtgggctggtagccggcccactagtacatgtggcccataaaaattgaaatttgaggggaaaaaaagaaaaaaggcagaaaaaacataatataaaggaaaaaatgataaatataggataaatgtgaggaaaatttaggaaatatatcataaaatatatggtacaaataggataaaatgtggaaaaaaaataaaaaatatgagaaatatatgggaaaaattagaaaatcgtaggaaaaataaatgggccggtgggccgtgccatgcctgggccgtgccgtgccggcatgctacagtaaacgtgccgtgccgtgccagcccacgggctgaggcatcggcccaaacacggcacgggataacgggccgtgccggcacggcccacaggctggcgtgccgtgccgggcatgggccggctacagtactgccgtgctcgggccggcccggcttggcacggcccatttggccaggtctaacgctgacgtataacgaattgatcgatctcctagaaaaattgatcaatcaaagaagtgtacaggacatcaacgcaaattaattgacttttttttaaaaaaaacgaaggaatgcggtgtgtgttatactctagttagtcatatgatccagattacggcataaacgttttcttggaagcaagctaatcctgccattgcattaaaaaaaatcctgagaatacaaatcaaagaaactcggggttgaccaaaagaaagaaggaacaacagtgaggagaaatggtatatgctcaatttattctatatactcagaatatataactttgacaattactattatatacatgctccttacaatcataaataaatatctggtgcttaggataggaaatttggtcaaacttgggaagttccaaccatcaataatcacaaatatttagttcttctgaaaaaaatagttatatgatttatctcgaaagtattatcataatatgtcataaagttgttgcaaataaaattgattgtcgaaattttttaattttgacttaatcttttcataagcgtcaaatatttataactagaaagtattacgctgttttttttctgaagtaaagcatcattattagtagtagtacggtagtactagtgtttatccttagctcgcaaataaactcacgtacaaccgcaacgatggccacggcagctacgacgacgacgggcggcgatgtccagataccgattggacagcaggccaccgtcgccgccaccgccactgccacgagcgatgggatccgggatagccccggcacgtcgagccccttccgtggcggcggcggcagcaccacccccaccccgcagcggccggtgaaggccgggtcctcctcctctccaccaccgccgccgacgacggccatggacaagacgctgtccagtgtagcgaacctcgcgaagctcctgccgacgggcacggtgctggcgttccagtcgctgtcaccgtcgttcaccaaccgcggcgcgtgcctcacgtccaaccggtacctcaccgcggcgctcctctacctgtgcgtcctctcctgcatcttcttctccttcaccgacagcttcgtcggtggagacgggaagctctactacggcgtggcgacggccaagggtttcctcgtgttcaactacgacgctggcagcagcagcgacggcgacgacgacgaccagcggcggcggagggaggtgttcaaggacctccgcaggctgaggatacggtgggtggactacgtgcacgcggtgttcacggcgttggtcttcatgaccgtggcgttcagcagcaccgccgtgcagagctgctacttccccgaggccggcgacaacgtgaagcagctgctcaccaaccttcccctcggcgccggcttcctgtccaccaccgtcttcctcgtcttcccgaccacgcgcaaagggatcggatatggcggccagtccaccaattaacgtacgtgcaatcgcctagctagctacaaggcttgctttacttgtgcagtgatgctaattaattatatattgttgttggccaagcctttcatttggtgtagcgtgcacgtgtgcaacttttccatgtgcactagtcatgtaaagcagtttagtttgtcacgatttgtgttatgcgcatatgattctttgcaattgcaccgaagatgcacgcacgattaattcggtttacggttttgctataaatgatagattgttaattttcgcttcaaatttgtcaatttttcagccgttagattaacctcatgattcgtgcatgctttcgtttctttgacgttcgcgggcgaagagcagcgggctcagcgcgcgcgatggcacggcagacacaggggtagacacggtctttaatttgcatgcacatctttttccttttcattgatgaaccctgtacggctgtaccctcgttaatgctaagagtgtgttaccgctgatgtaagacggttttctctaaaagttacatcttagttatatacaaatgtcgggtcccaaaattagctttcggtaactaacttgtctgcatgtctgtatcaagccctagatgaatagattaatacatgttcaataatatctggatcaccattccatacatttaaacaagggctccaaaagagattttattgcataaaatacaagagcatttacataattgtggctaactattgcagcagaagctatacaatgaaccgactctactattttgctataggctcaaaccttctaattagtctagacttgagggcttatatgattgaactcctggttttggcgagaacttcgaatcaactctggaagggttaaagcaagcactactggagaaccaatctttgctgggtcgaccgaaaaccacattaccctggttccaataagaactgggactaaaaaactccaatgggactatgtgaagatcatctttattcctggtccatcccctgacaaggcctgtcagggggcaggggatctttagtcccagtttgtaataccaactagaactaaagatacctattatttaggttggtaataccaaccaggactaaagattatttagatctttagggactaaagattgtcgcctttttatattccttcttgctccttgtcacatcccgaattcaccgtaaaaagcatcatttaaattattcctagaaaaagtaaaaatgggtgtcaaccctccaaccttaaaaatatacaacctaaaaatcaaaggaggcttggagaattttttatatatattttttctcgaggcctaaaatgtgtaatcaagttttagtggaattctcagagcacaaataataattgccgataggaacaagggataataatttcaacaaatggtcacctaattgggaaggtccttttcgtatccatcgatatgtgcctaagaatgcctatctgcttgaaggttttgatgcagagttttatggaaaagcacttaatggaaaatatctgaagaaatattatccaagtgtttggattaattaataatcggttgtttagctgatgtatgatgtggccgatgtttgatacatcgtctattgatggccgatatgaattatcgtccttagagcaattttgtaacataactcctcatattacaaaattgggggcatatatccagatatcagacagaaaatatgtgggtttaaaaaactttttcaatattgagaagcaaaaggatttttttggttagatggccgatacacagatatattacaaactgcaagtaaatattcagagtttaatggactttttcaagccagttacattcccaggaagttgtggatagcttcaatagcacgaagacgaaggttgttgatttattcaatagttctgcggtcttcggcatcggtccctgggatcggcttcattgctcttgtcaggcctgcaagatatttgatcgatgcctttatttttatctttgctcttcgatagcttttaaattcaatgatatttgattgttgctccgatgccatctcttgccgaatctgctccagttgtgctaggagttcggattccttttgtttgagcttgtcaagctttttttgagaagattctggaccaacgattaatttgtccagcttgcttttgtaatccaaaatctgctgtcggctggaggtgacggtcgcttccaaggattgcctttcctgcagatctatcaacctttgttgtgcccgttggagttttaagttatattgatcaagatgtgctgctggagagataacatcagctaggtctttagaaataagagcttggatagcattgaatttagaccaaactggctcacaatctacaactaatgcatcaagagatacattgagccgattgaccaaatctagcaaatttgcttttaaatcatctgaaatgagtaatttggctcggattgaagattttgtcccatcgtcttcatcctagacattggtaaaaggaaaaatgaggaatcggagatatttaaaggaggaataaggtaccatgacttttcaagctacccgccgatgacggggtgctacgtcaaccgatcaaggcaaaactgtaggattaacatcggttgtctcttcctcatccgatggcttgtcatcagctctggttttccttttctttgaaggggatacttaggtcactttctttgtgatttgtttagattttggaacaaccggcatagtttctatcactgcctggtatggaagtaaagaatcagccaatggagaatttaaaccaatagtttatggagccagaatcaactcattatccagaagggttttgacagctgcatatacaatcagctgaccgcttttgctgacatttggtggaggctgatcgatatcctggaaggtaaagataggttgaaattatataaccaatcatcagattcaatacttgagtagaagaagaggaagatgggtttcaggcttacctgaggaccgatggaagtattgatgattgtgagataaaaagcagttggctgatagaagatatgttttttccattctgcccacaagtattcataaatcaggctatattattgaagttgggacaattgaatcgattgggcctaaaggtggaccttcaatactcaagaccttgtccataagttccgccgatgatattgtgtctctagccggattttggttgagaaataaaggttcaaagggagttggcctagtcagaactgtcttgctgctaccattgggtggtaaaactcatatgagttttgagtggattggccttgtgatactccagtaggaaggatgcatggtgaaatagccgatatgaagatctttttgttctcaggataaaattcattgttcaagtcgtccaggataaaattcattgttcaagtcgtccattctcaagtcctttggtcattcaaagtcttcaaagtcctcatagatgtaccacattactgtgtcggttaagaaaccatcataaaaatgcttgaaccagaattcaaagaattcagccaataagttagagccagcaaaggtataagcggcttcaccaaaagatatgcaaggtctttcgtctttaccttctttgaattaaggaaatttaagctcttggagggtccgatggttgattaagttgacggcataaagatttaaccacaattggatgaaccaccaaggacctccatgtttcactggggaacccattagcaaacggactgttgcttgacccaaaatctgataagcggccttgagaaggaatttacctagagggattgacttctcctcatgaatagcttgagccagatgaagaaaattggctgtagggccacaagttgtgccacagaaaatgaatctctccaaccataagttaaggaaagagatatgttcctcatctgtaattggtccaatggctctacatcttttgatatatcctgaccaaccacctccagccttggttttaattttgtattcgctcttgtttttcaagctgatgggattagccaatgaggtgatgtctaagcccgttaacattttaatatccaaaagggtgggtgtcatcggcccatgtccgaagatgatggcattgatggtgttagaccagaaatatgtagtggccgataataaagattcgttcttcggcatattggctaggaagagctgaagacactgttctatccccatccttttccaagatgatcgtttggcagttgatatccttttaaactaatcttcccattcgtcaagctttgagggccaggacctaaaaacatttggccaatggtcgaactctggttttgattctttgaatgggattttgttcgtctcggcgctgataaatattgtgggatttggatcacccataggaccaacgagtttcggcatgaaggacaggaatcaagatctggcatctgaggtgctaaaaaaaaccaaaagggcaagaaaccctaagatccaagaaagagctttacacgaaagatattgatgacaaaaggaatttacctcggggatgtcggaagtggttgccattgttagaagtttgagctaatgaagcaaaggggtttgtcaccgggagtttgggtcaccggaggaatcgctgaagataatagagattgtgcaatagaggaagttgtgaaagacttaactagagaaagagggatttgaaacagtgggcctttgcttataagatcaacagtcaaaatataaaaccctagagtttcgcgggttcgaccagagcgaattccgccgcattatataatatagcggaattggggggcatgtgttaacaacagaatttggcatcacattcggaaaaggagggatatcgaaacggatttggtgttgaatcgaaccaaacttagagtcggactgcacatcggctggataccatatcggctgaaacagagtattaagtgggtcgatgcttgatgaagctgatggccgatgcagccgatggcctatgctgccgatataatatgacttaggcacgacatgggcctagattgggataaccgtcattgccaataagagatagagctcgattaaggcaattatatctattgattaggatattgagttggtttgttagagatttggcaagagaccgtcgtatatggtcttgtttgtatcttacgtttagaaaggtttgagtcgtgtccataatgaagtaagtttgtactcggggtataaatatgatccccatagcattgtaatacgggagcaactccaatacaacttcggtgcatcgccacccttttacttttctcgtttcttgctgattgcaggatcaaatcagctggcacgcccttgacacactcgaggctagccttggacctgcactagagttaagcagatctcccaggccgccgtgttttcacatcaacacccgctcatgtccactttacatgtataggctctggatcacctctcaatgatggttatgggttaaccaacctccataagcgtcattccaactgccatatgaatctataaaaggaggagaaactctcactttcaatttacacaacaaagtggggtacaactcactttcatattttaagcatcattttagtagtgtggagaaaataggtagagagtaaggggaaggtccagaggagtgccggagctatcagcactctccactttctcgtacgtcggctgatgcttctttcataaagtaagtattcgagatttcctttcagtatttaatttacttaattaagtgagatatattcccatcgttgtgggtttgtcgcttagtatttattatattgagcactttagtactaggactctggatgaagaaggaaattcctgtgtaaggctagagttgtaatcaataccttaggcatggtgtctaggttagcggttatcttcgtttgttgtgtgctccatgaaaagtgaggtaggcagcagtgatgatagttttgtccgtcctttgtatcccaccatgtttagatacatcatagagctacagaccaggtgagagccggtgcccaaagcaattgatagggttttatctttaactttagtctaattaattaaagcatacgaatcctctctagcctaagcatataattagttagttggtatccttgaatagaatcatgttcctagatgtacatataattcgatatccttggaataatctaagttgaagtactacaacggtatccatgcgcttgcggattaatcagtgattgtaacaattaccaacaaacatttctggcaccattgccggggaacggttgttgtatcatttccgaacctggttaatcatcgtatcttttcttttcttttcttttattcatttcccttcttatctatcatggtgcacctatctattcaaaacccttctgctccaaagggcgagttctgtgagccaccttattcttcaaaaccaatccgttcatctggctataaactatgtcctggttttatatatggacgtgactacacaactagtggtagctggtttgtctaaactagctaccacttcatctatgagagatcctatccacctatacttcaaataaaattttctcttaaactactcatccgatctatgatctgattacatcgttgtgtttgtaacaattaaatctttataacaagatctcacatgattatattatgatgaaaaattgtaaattaattttataagatatctaaattacttttagatttcactaagttacttcttgatacagatgttgtcccgatcttcacgacgtaggatcttgaacaagataactagctgaaaatcagacaagataactagctgcgagtagccggataactagtgcaacctgacgacacgcacaaggagccaaccaccgtctctatacggcagcctgaaccaaggattcgcccaatcacactctcaaagaaccatcctacgcagcctgcacacgaagtatcaggagcatggattgggtgccgatgaagcagccgcctatgtaatcccacgaggaaatcacaagagcaaaggggtagagatctcggtctctcggtgtttgttagcacacagctgaacaaaggggtttatatttcgattatcaaaaagctcccaaatgataaaacataagggatatttatactaggaacaacccccctagatgggaatgaaaagtcttgggagtttactggacataggttagctcaaaagtcacaataagtgaattcccgagatctatttggcttctgagcagtcttccatgttttacccattactccttattggaaagtccaaatgacatgcggtcaattgcattggaaaggtaacttgataagttttcacaccatgtgcataatgcactacgaaatattgtcgattgatacagttttgcatgggaagttgaacgtcttgcagactgttggccttcagagcagtgtccactaatctggccataactctttagtgggaaattcaaatgacgaacggtttgttgggtgtgaaactagactcaataagctttctataatatgctcattcaccttcataacttttgagaataaaaagttatgagtgtttatttcactggcccgttttgcactggactggtccgttctgagctgatcttgcttttgcactggtccgatcttgctgctccattttatcctccttggtgaacttatccatggtgtagtggtggcaatccgagtcaagtctctatctttaagcacaacgatatgctttaacctacaatcatacaagccaagtagcagccttgctcgatgaaaacaataagatttgtagttaagcatagcgttaaccttgcattgatgtgcaacaatcacattacatgtgaatggccttggccaggccgtatcacttcttagacatataaaagtaaatttaataaagcctaaaagtaatttatatatattatagaagtaacttataacaaaaagaaagtaactttaatgcatgcttttttttcataggacgtgactacacagctagtagtagcctctccatccggtgtctactttgaacttgaaaaaggcaacaatatgtatcttttcttaatctctttaataacttatatattttaaattacatattgtttttaagatctatttgcatcattgtactccactcaaaatatgtgacaaaatgagatccatattgaatatattcaaacattttattaatttaaaattatttattacatatttattacatgttagaaagtaacttccatgttatcaggaagtaactattacatcttatacatgattaattctcattagttattccatcaatgttatttataatccatcaaagggtttatcttcttttctcattctacatgaaaaacaaaaataaaaggaaaaaaaacaatcggcgattaaacagatttatagagagttacttccgaaccatgcaaaagttacttccaattaacattgaagttacttttaaaaattgttaaacttacatgtgctgatctgtactgattaaatttaatttctagatagagtcataattttatccttacaacgaatttacttctaatgccatgaccaagttacttccgttttatattaagttacttttataatatatgtaaattactttcaaagtaagtaaatttacttttatatgtctaagaagtaatttagtgaaatctaaaagtaatttagatatattataaaaagtaatttatatttttttcatcaaaatataatcatgtgagatcttgttataaagatttaattgttatgaatacaacggtataatcggatcatagatcgaacgagtagttgaagagaaaaatttatttgatgtataggtggttcctatttacttaatagactattattatatatattttcagtgtgatgggagcaaacctctgccacgtctgtctctctcattctctctctctttttctcggacgcgaatggatgaggatgatgactcgtggtgggttggctgggacgaggacgcgcggatggaggccacgtcaactcacgcgggatggacggttttcccggcgtcgcacgatagcgccagatcgagaggcctctcgaaatagtttttacgtttatatagctatggttcgggaacaatccttcttaaggcgtgaaagcgaaaactcctaccatcatctgcgtgagtttgagcaattgtgttcatgcttgacaatcgcggacatggcgcaagacaccttcaagtggaaatgttttccctttgcgaagcaatggtacacccatacgtcagaaaattgaatagtgaacgagagtaattaaaaagcaagttttgtcttgattttttcccgtaaacccgtgtagtctctctgcatatggatgttctcagctacagcttgggcttggttctccttgttaactcaagccagcctagacttacctttatccgatcatgtgttgttacaacactgcttagatttagacagggagtttgccatgtatctcgatagttccgtcggaggttcgttcgcacacaaaacgacatcggaaggaagagaactcttgaatcgtacccaggagaacacctctttcgttcattgcgaaactgtctaggaaattgagtatacacatgaggagcatcaaacgccaaatcagagcatatatcctctacatccaaagattcgaccattgaatgctcaccctaaccttgagaaccggaggaagaggaaattcaccctttaaaattccatttctaatttaagggtgatcgttctaaagattatgaaaatacctcatactattcctgccaaaagagaccaccggtccaatgcagttctcttgaaccgctcgaggaaaatttcctcaaagatgctcaaggaaaattttctcaaaatgacgatgcaggaattaactaccatcataagcatataatgagtagttaagggagattaaacttttctccaaagtaattcagattagctccctatgttgttcctgagggaggggtggcatggcatccagcctttgggcgttatgttgtgcagaccagacagtatgatccacacaaagtagtttccatcgaatataattactctgtagcaagatacaaagatattactccataacccacttgcgtctcgctccttttcaagttactttgtatttcagatgtttttctgtaacatgttacctaccataaggctcaatacaaagacacaaagtacacataaatttagtggtggaaccagagaagcacaaagtacacttttgaggagctgaggccggaagtgctaattagtataaaatttgctcagctacaatagtttcaatgaactcatgggggatgcaaagccccctgttcacccctccactcataaattgcaaaaattgatgttacacttcgctgatgaattagagcttccaaggttttctagtcggttagaaaccaactcatgtgctggctaaaactgatgacaatctcctgcataatgtacataaaaacatgagtttccgtgccaaaagatgagcatgagaacacacgtagaaagtacaatacatggaaagaggtacgatgttttgcttacgttgaactagaactccacaagtactgaacttgggtgaaaaataaactatttgacaagttaatcttactgataacttttgagctcaaggtgcattttttttaaaaaaaaatctgaactgctacctagagtaaaacagcagataaaaatataacatttctcacctaattgacagcaatgaccataataatcagttgcatatcatgtattctttggagacggcatctgatcaagaacctcacgcacaaagaggtcctgtaactccaagtatttactcctccattctacaccctgttgttttggtgcaccatacagagcactggccccagattcaaacaatctggacgaactgccaggctgctagatcaaagcagaatggacactaagagttcagatagaactgaaaggtaaaagaaatttgggcccctgtgtcaacagcaatacaaaatcagctgacctgaagtgcatccaggcagcgctccagaaagtcggaactgaagtttccaaaaatttggacatcattttcaggttggggcacaattacagcccgtgattcagatcctccatttgctgagcaaactttccgtagtgattgtagtggtggaagatttactcgtttaggcgttactaagagaacattcgtcactggacctagtagacaagttatgaaaagctcaaaagaatgtaacgtcaataggaaattacaaaaaaaaaagtacaaaaggctaactctatttttctttcagtgtagttaagatttcatatttccaaactatgacaattacaaaacaatttttaaccatgcagtgaacatctttaaagacaagtatcaacagagcatccacttcatcactccacctttaaaaacaagggtgcagatcagtgaagtagcacaagttgcattgtgaacaccatttgtgtccatccaataattggagaaacactgttcaatccaataatttaatggtggtattatgctttgctgctccagacaggtttcagactatgcatggaataaacccactgtatccctgctctctcattacttactattgtttttcttttggagatgggaggtgggtgggtgtggggtagcgagattgacaacatccactattggttacggtagccagctgctgcaccatactcacaagggcagacatgtcataatgacaaagagaagactcgtacccatcatgccactgtatgtattccatggtccatgggtttctatactttcactcatgagcctttgtgtgtaggaagggcatatatcaacaggtttgtcaacatgaacttaacaaatcatgaatagcatctgaataaaaactaacattttgatttggtcatccatttggtcttgtattaaactgtgggcttgagattttggtttgtcactactcactcggaccttgagccaaattaatttcataatacagagtacatatttcccgttatttattgataagcactgttttaagattcactcaggttctccttcagaaagaggaagggggactctgaagtgagttagaatatcaggaagcaaactacaactgaattataaacaaggtttcctaaagagttctatttatcctccattatgtgcaagagttcctaaagaaacaattgtttaaccttataagtatgacattgaatatcgtacttaacattggatgcacttcctccgtcccaatacaagtgcatcctagtacaaacgtgacatatcctaagactacgaatctggacagctgcatgtccagattcgtagtcctaggatatgttacatctgtactaggttgcgcataaattgggacaaagggagtactgaatatgtttcagtctagctaaaatattcaagaaaagcttaaattgggacgaagggagtactgaatatgtttcagtctagctaaaatattcaagaaaaccagtatgtgcaggaacaacatgcgcatacatatgcattaataactttcttcccatggtatgagcaatgaatagaattaaatctacagcgagtgcttgaaaaccagccaatgagattcctatcaatctattggaggtgacagcattcaatataagcttcttctgtttctcctagataaatgttcctgcttttgagaggtgacaactatcaagtaacctaagtaacaacagcgatgcagataaaggagtgttaaaactcttgcactactttaaagaagggtgtgtgtgaacaatctatgaaccttgggaatgtttgaattttcggattacttgctgagttcttgtatcccaaactcgaacattaccatcctcagatccagagatcaatataagtccatcagtactcgatgctaagctggttactgccttgctggatcaataaaatagaacacacattaaagaaggttagacaaaaataataccacagtagttgttaaaccaaaaatgatactacagaataaggtcagatacaaacaagaaggctgtgtttagatccaaactttggatccaaacttcagtccttttccatcacatcaacctgtcatacacacacaacttttcagtcacatcatctccaatttcaaccaaaatccaaactttgccaccaactaaacacagccgaagtgcaatcaaagatgaaatacaacccactggcagaagaatggttcaaacaggacacgctctccacgatcaggtgatcctaactgcttttctttacaagtttgagttcacacaccacgaattgtatcaccttttcttctctagttagtagttactgccatttctgtacccccagttgtttagtatgttagacaaacagtgcgccctccaagatgcatttgttttctaaagctattaactaaatagacaagaaaatttgcatcaacaaaaatcattttcaggcgtattaattaatcactttccacagcaatatgaaaaaaaaaatgttttcattaaaaacaaactggtcgagctaggatggatacaaccaaagttaaagcatgaacaggtaagataggtttataaccactctactactacaagatatcaaactctaacttgtatattgaagctgtttacatcacaggataaataagaggtgctaatgaaagcaaggagtaggcaaacctatggtcatccaaagccccattaatagttgaatcatcactactaggagaggtgacatcaattcccatagcagtaacatatatctttccatctcgaccaccagcgtagaaaatatgactccttgggtctaacgccactgaatcagtaatagaaggaaatgaaatgcttcttagcattctaccctcggatagactccaaatctaggaaagagggggaacaaaaagttaaatgctaataaaaatgactagaccatatagtcaagtacaattctacaaaatatacagctcaaagacaaagtacaagtagattgcatactttacaggtgtgatcctctgaagatgatacagcaattgctccatgacagcaagcaacatcggttacaggaagtgcgtgctgattaaagctgtatatgtgttgtgtctttgcctccaatcttgattgctcatcaagcatcctgcagtaaacaacacaaattaagtaaaccaaacaagcaatcagtgtggtcagtattaccataatcacatacgtgaggagatcccaaactttgatgctaccgtcttcagaccccgagataagcaaaaagtcatagagtgcaaggcacctaacagcacgataatgtgcatgccactggacaagcaactccccactagccacctacacacacaaccaccatagagaatggggtgtaagaaagaacgaattttattatcaaagacagagttactggatgaattaggaacatggagtggaaatgttaaatttctatgcaaaatgccaaaatcaaacaaataggaatataattcactaaaagaggaccagatagaatttagcacactttgtgtcctgtgaagacagataccaaatataaagaggcaacatttcaacacaagaaaacaacacagatgattgtacttgcacaccaggtgaaaaaagtgcaaaatttcaagaaaggtatgaaagcacaaatagattaggcaaaatctgaactctaagaagctgcctgacagaaaagttgaaacagaaacagaaggcatattttagggggaaaagtagcgaagcaaacataagatccataacatgtcataagcttataagtctaggtcaatttactagcaacaccaaaaattgccccgggcgtaaatgcactatatgggtgtgtttggttgcttgtatgcccttagcctgacccgtatgccccatcctggtggagtttagcctggctagccacatgcaagttgatgcaacagggtttgtttgattatcagttatgtctggatcgtgtgcgatgttgtttggttagttgaatattaatgcatgtatgctagggattttgtttggttggttgtatgaatttggcaaattatgctataggacactcaaagtttgtggcctttactgtgagacactcaaagaacgtatatcttcctatggacactgcaaaaatatggtaattagctactggacacccgaggcattattttattatttccagtgaaaacgtcgagagaaagaacgtagaaagtaccaaaatgcccctggacattgttcttcttcctgcttcagctctcttttctttcttctcctctcttctattctcttcttcaacgagcctgggaggccgccagcggcaaagggtggagtggcggtgggtgagcgcagcagaggaggtagacggtgggcgggggaaggggcggcgcccctgaagcagccacacaccctgttgccggagaaggaaaaggagcagggacaggagatctccgcttctagcgccgcctcccgctagtccaccttccggttctcgacatcaggctgctacacggcgtgggcgtccacggcagcgacagtgagggtgcgggcagagagcgcaacatggcagagcgagcagaggcatgcgcgtacgtgcccacccgcgcagcagagaagcatggcgtcgatggcgccgcactgtgcgcggcgtgcctcatcaggaggaagaggacaaaccgtcgcggccatggaacctccgcacccgccgctccgccaccgtggcgcccaatgcgtcgaagctgcgccggggggggggggggggggaaggcggctgcggcgggaggaggacagacgctgcacccgcatgcgttgtccccggtgatcgcgaggaacaggagcttctccgttgcgctcaccagggaggagatggtcgtggacttcatcgccatccgtggcatggcgccgcctcgccggcccaagaagcgctcgcgcgccgtggtggagaaagagcaggcaagggcaaacttgtcctttttaaatctctctccgcgtttttatcaaatataataaaataatgtctcgagtgttgaacagctaattaccacatttttgcagtctgtcgacaagaagatacacgttctttggatatctcacagcaaattgcacaaactttgagtgtcctgtagcaaattttgcctatgaattttgagtgcagttacccctttgcttgcatgttgaggctgctttctttaaaaagattaaaaacacaaagttgcaataaaatttgtatgccaaaaaaatcatcctatttttgcttgaaacaaattactactatatactgtagcatctttacttcattattttactgtatgtatacatatatgaatctatttatctgtatgagcctatgaaaacaacaaaacgaataaaggaataaacaaaaaaggaaagggaatgggaaagtggccacaacatcttggtggcctctagtggaaacgccggctgctcggtttgtatcgacagtcgctagctcgctgcctcagttggattcgacggctgctgtgtcactgccatcaaatcagcagcccaacaccggatctgacagacaagtgctagtggcctccggctccaggtagaaggggagaagatgagcttgttgagggtggagaaaagctcagcgacgatgagacgaacttggtgacagaggacagcagcagaggcatgttggaagttggaggtccatcgtcaccctcgtcattgagcccatgccttgctgctcgagccgccgcattggccagatctggcacctgagcagttggggctgccgtattcggcgtgtgcacggtcgtagacaccgaatccaaacgagaaaaggagcggatgggctagatgacgacgagaagaggagggcaacgatgatgcgacttgggaggtgaggcaagtcgatgcaaatgggagatggggtgagggatgcgccctgcttgcactgtctgcacccgcacgtgctcgcttgcatccgcggccacatgagccagacctggctgagaagcgaaaggtgaaaacctgcatctcttaggcctggctcttggggccgaattgcatctgctcatcctcgatcgcgagcacacctaaccaaacaagatattcactgcatctctcatgtgtccgggcaaccaaacacaccctgtatgaactacacgagtttcccaaatatgtatgttcttcagaaaatagcatagttgcatctcactgaatgccaaaattcaaatgcccaaacagaacaggcatctccaacataaccaccacagtacgacaagactgaattattgtacaataaaggttatttttttatgaaaactaaactgatgattaaataaaattactcaatatacctaaacaaccatgggtgtataggctgtggttagttcccttcaaacttccaacttttccgtcacatcaaatgtttgaacacatgcatagagcattaaatgtgtacgaaaaaaaccaattacacagtttgcaggtaaattacgagatgaatcttttgagcataattacgccatgatttgacaatgtggtgctacagtaaacatttgctaatgacagattaattagacttaatagattcatctcgcaatttacagggagaatatgtaatttgttttgttattagtctacgtttaatacttcaaatgtgtgtccgtatacgtcaaaaaaaattgccaaaacaactaaacacgaccataaccttccgaaacagtacacaaagtgcacaaaaagcagcaatgacaactgtttgttccccaaaactagcgagtgttttaccatagaagaagaaatcaatagcaaatgctctgacctcccaaaagaatatgtcgccagagatcccaccgccgatgaggtagctcccctccggatcagcgatgagcgcgcgtatcggctcaaccgggaagctcttgacggccacctggggctgcaggggaccaacaaaggacatgaagctccgcctccgagatagggttttgtgagtttaaaggaccgtgggttaaggtcgagtgatttaccttgtcccagtggtagtagtggatgggtgctgagttgccggcgggggcctgggaggcggcgaggaagcggccggcgacgacggtgagagcgcgggggcgggaggcgcaggtgcggtggcggatggcctcggcgcccgtgcggaggtcccacgcggcaacgccggcgtcggtggaagaggccgcgagcaccagctgctgcggcggcgccatggtgtgttggaggggacggaagacagggagcggcggacgtgatggcgcggccgcgtgggagaaggccctgcagggggagcgcctccaaggcgacctacttagggttagagtatagctgtcaaatgggccggaccaagacccggccggggcacggccgtactctaggactgggctggccggcacggctaccacaacccatgggccggcacgacacgacccaagcacgagacacggcccggctgacccatacattttattctaaccaaaaaaaaaaaagtccgtgcgttgcaacagatgaaagttattttaatcttattattgttatacattttagttaaggtgaaatctattgtaagaactcgtttggatatatatttttttaagaaaatcatgcgctgcaattaggactctgatcgtttcaaggtagcatgcaagttttttttaaagagatttcttatgcgattccttctatattttaaaaactaaacgaacttaaaaaccgactctatatttttctcagaaaatcatgatctgcaattaggagtccggtcatttcaagttagcatgcgagtttttttaaaagaggtttgttatacgattctttttatatttccaaaagcgaacgaacttaaaaaccgacttaaatacggaactgtatttccaaaaagaacaaacttgaaaaccaactcatgcacggatgacgtaccaaagtaccggcaaaaatatcttcaatttttatattttattcttactagaaaaaatgcccgtgcgttgcaacaggtgaagtctattttaatcttattattgttatatggtttagttaagatgaaattcactgtgggagttcgcttggatatatatatagaaaatcatgagctgcagttaagagtcagatcgtctcaagttagcatgtgagtttttttaaacagatttcttatatgattccttctgtattaccaaaagtgagcgatcttaaaaaccgactcaaatacggatatgtattttcaaaagcaaataaacttaaaaaccgactcatacacggatgacgtacaaaataccgacaaaaacatcttcaatttttataatagttgagatagagatagaaaagagatatagattaaaaccaaaacataaaattaaaaccaactcaaacatagatgacgaaccgcagaaatatctttaatttttataaccgactcaaacacggatgatggaccgcggaaacatcttcaatttttataatagtacagactaggaaaatgtccgtgcgttgcaacgggtaaaaacgtttttgatagctatacattatactcgtttggttttggaccgaaagctcattcattcattcctttccagcccgatcccggttcgctacctcactacgctcggcctttcactcttcgggccagcccaaacgtggagttgtaggtccaactcgcacaacccattgtcgtcttcaaccttcggaagatagtcccttcctcgtacgatgtcgagctgatcctccccattaaatctagtcgaatctttctcgatcttccaaaattggtttagggttttttatctacttgatttcctctttcctttttttttatcaaaatcggaccgcaaaactcggataaaaatggcgatggatagatggagattaaatccattcaattaaagccttggaaaggaagatcaagcggaaaatgatgaggtagcagcggggaatcgatttttcagtctgaatcggctgaagatgatcggatcaaggacagccgatacagccgatggggttgatacagccgattccagtggcgatggctttggggctgtttctagaatctatcaacatgcttcacaaggattgccacgatggagataaagctctcggaaaggcaattgtatctattaattaggatatttttataatttccttagagatatgtttgggcaaaagtctgccgcaaagagttatggtatcttagaatttgttagatataagagtcgtgtccggcaaggacatattttgtaatctcgggtataaataggacccgaacccatgtaatcaattaacacacgttcaataacaatttcggcgcatcgccaccctgtttactttcgttctatttcgacgagttcttactttcggattgagctgcatcgattcgatcttcaactagatgtaaacttatcatggcggcttgcgttctcaggattagtgcttccatctttatgacactctaatcatgtttatgtaattcgtcgagttatcatatacacgttacagtctttgttagttgcgttatataacttgttatcgggtagttcttattgtcaggaagtgaccgatagtgttatgtttggttattaagttagattatatcgtgtatccaccatcacttagaggttttcatcatcttgtttagatcccacgattatctttatgcttaatgctgcatcagttgagttcaatctgttgagttttacttataattgtgatatctggcttgttttatgattatcgagagagatagtatcggggtttcaaccgatcttacttgatttagctactttatatctcatatgcttaattaatatgctagatatgccctttatattaagatcttattgcattaagttatattaggcttcttgtttcaatattctgtttgtcttgatattttaatatagagtggtatcggagtattagccgatacatgctagatctatttgatcagctatgctataaacatctatataatcagtactttactttatatttcgacttaagtgatttatactatctcggcatggcgaccaatttatcccaatcatttagtttaaatatgtattgaagtaaggattatatgttgtcaatatctatagccgatcgagtagatttagtcttatcttatttactcatgactaccgatcgattcaaatatgacatcggcttgaagataaatgatatgtcatcggcgactagtcgatcggttatcgtttatggatttaaccgttgtttttcttgtctttctttcttgctgattgtaggatcaaatcaattggcacgttcacgaacctaaaggcaagattttggacctgcactgaagttaagtagatcttccaggccagtgtgtgtttttcacatcaacacgcttttggcacgcccagtgggaccgagttgcgacaactttttctcatggcagaaaaacaatcaccggcatcgacaggcaaggctccaaaccctccatggtccaagcctccaaatcctccggggaccaagcatccaaaacctccaaggactactcaaccatcatctgaagtcgagactgcgaacattgtcccatatagataagttatcaccagaacagaagaagcagtttgagcaagtgatgaagagcgctcaggagcaattcatgaactcattcaatgaaatccgccagggaacagtcattcagaagtataaggtgaaggtggttgctgccgatgaacctggaacaagctcatcccaaggtgataacaccaaggggacaaaaagtgctgcggatggctcaggtaataaaggtgagggacttcaagatggtacagtcgaggatgttgatgaagatgatgatgaggagcaagaggagcctttgaggtgcaacaatttccaagaccaggttgactatgctgttcaacatgccttgatcaaccaatcaggggtgcttgtcaatactttaacaaatatgattaaatctgtggttgatggcacgatagctgagcatcaaaacacttggccagtctttctaccaggtggcgtcttcccaccatacaggaatttggtgacaggcaaccagcaacatactaccaatgcaccatcggtttagccgatggcagcggtttcgtctccagcaccagttgcaccattctcagcacaaaggcaggtggttaatcctcaagtcttgaccgggaagcaaccacaacatgttggcagaacgccaatcggctaactcaggagcagattgctgcgatgttcgcgccaactcagccgactatcgagccagtacagtcgacaccgaccaagcagcaggttgtacagccgattaggcagcagacggtgcagcagataccaacaggacagagaacacctactgcttagcaaaatctacctgttggagcccagtttgcacctgaacagcatatgtatattgtgcaacagcctcctcagaattatcttggtggtaatttcaatctccagtatccacctcagtcacctcagatccaatatcaaatagggggatcacctcagccccagtttgttccccagctcaatcagtttgatccgatacagcagcagatgcaaggagtaccccagcagaagccttgggcagacatgattgcagatgtgatgagggagcagtttgggcttaagccaaaagacactggaaatttgtatcggcatccttatcctgagtggtttgaaaggattccactgcctaaccgatacaaggtcccagatttctcaaaattttcaggacaagacaatgtttcaacttataagcatgtcagccgatttttggctcaatgtagagaggcatcggctgatgatgctttaagggttagattgttccctttgtccttgtctggatcggcatttacgtggttttcttcgctaccttataattctgttaatagttgggccgatttggagaaacagtttcatagctacttttacagtggaattcatgagatgaagctttctgacttgacagcaattagacaaaggcatgatgaaactgtacaagattacattcaaagattcagagagatgaggaataggtgctacagtttggctttgaccgattctcagttagccgatctggcttttcagggtttgatagctccgatcaaggagaagttttcgtcccaagactttgagagcttgtcccatcttgcacaaaaggtgaccctgcatgagcaaaggttcgcggaggctaagaagaatttcaagaaggtcaatcatgtgtatccttatatgtatgactctgaagaagaagatgactccgaggtagcagcagccgagtaggcccgaagcaaaaggattatagcatgtccatgggtgaagagttctaggaaagaagaaagatatgattttgacatcactaaggctgacaagattttcgatttgctgcttcgggagaaacagatttaacttcctgtcggtcatgtgattccgtcggctgaggagttggggaaaagaaaatattgcaagtggcataattctagctctcatgctactaatgactgcaaggttttcatacagcagatccaattggctattgaggggggcaaaattaagtttgatgactccaagaagcagattaacatggtgcacacgtctggaagagcagccgatggaaacaattatcggaatccacagttcaagtcaactaaaatcattaacaaatatttgaagagacatgagaagcaggagcagaggtattatgaagataacgatggtttcgaccctcattgggattgtgagtttttcaggttctgctggaacgaggggatgagactgccatcaattgaagattgccccggatgcagtgataatgcggggagtacaagccgatcctacagtagaggcaatcagctgggtcaaaaagggtgcatgttcatcagaggttgggtccagtgcatcatgatcgtgatcaagatgaagacgaagatagaaaatcacaatggtgtccttctggtatttttaccaaaaatcagaagagaagggttcaacggatgaggaacagggaggttttcaggaggtgcaacaggagatcaaccattggctgaaaaagaccaagaaagaatggcgcgtcaaaagtaaagttacaacagccgatgaagttgaagtcgacaaggcgaagagattactcaagggcaaggctactgcatccacatcggtaaacatggtctttatgctgcctgcagaattcgaagccaaacaagcctatgtcgacgatgtagaagaggtctctgctaggttgatttggcgccggagcaagcaatctttgagaagccagaagggacagagaatcggcaccttaagccattatatgtcaatgggtttgtcaatgggaagccgatgtccaagatgatggtcgatggtggggctactgtgaatttgatgtcgtacgctacatttaggaaaccgggcaagaatacagatgatctcatcaagacaaacatgattctcaaggattttggtggtaatccatcggagaccaagggagttttaaatgtggagttgacaatcggcaacaaaactgttcctacaacttttttgtcatagataggaagggatcctacagcctattgcttggaagggattggattcgtacaaattgttgcattccttcaactatgcaacagtgcttgattcaatggcaaggtgacaagattgagatcgtgccagccgacaggtcagttaatgttgccaatgccgatttagctctttgggagatggatggtattgattgcctgtctggaaaagtttgggatggagattttctgaaagtgttcgattgtgatatacagcgaattgaagatgaagagcccaaattattactttgagggcgtcgtggagggttcaaatttctacaccaaggacacggtagatgatctcgatgacaagcaaggacaggtcggccgatgatttggaagaagttgatattggtccaggggataggccaaggccaacatttatcagtaagaatttatctgcagaattcagaaccaagttgatagagctattaaaagaatatagagattgctttgcttgggaatattatgagatgtcaggactcagccgatcgattgttgaacatcggctgcctattaagccaggatttaaaccacatcagcaacctccaaggaggtgtaaagccaatatgtatgacgctatcaaggctgaggttactcgcttatatgatgctagtttcattagaccgtgccgatatgctgagtggatttctaatatagccccggtcatcaagaagaacggcaagcttagggtgtgcattgatttttgagatttaaataaggctacccctaaggatgggtacccaatgccgattgccgatcaattggttgatgctgcttcaggacataagattattagttttatggatggcaatgcaggttacaatcaaatttttatggcagaagaagatattcataagactactttcaggtgtcctggtgcaatcggtttatttgaatgggttgtgatgacttttggcttgaagagtgctggggctacatatcagagggccatgaattatatattccatgatttgatcggcttgttggttgaagtttacattgatgatgtggttgttaagtcaaaagaggtagaggaccacatatccgatttgaggaaagtttttgagagaacaaggaaatatggcctgaagatgaatcccacaaagtgcgcttttggtgtatcggctggtctgtttttgggttttcttgtttatgagagggggattgaagtaactcagaggagtattgatgccatcaagaaaattcaacctccagaggacaagaaacagttacagaagttgatccgcaaggtaaattttattagaaggtttatttctaacttatctgggagattggaactttttacacctttgctaagtttgaaagccgatcaagaatttacttggggggcagagcagcagaaagctttggacaatattaaggcatatttaagttcccctctggtgttaattccaccacaaaagggagtacctttcagattgaatttgtcagctggcgagaagtcaatcggctcagttttgatccaggaactcgaaggcaaggagagatctattttctatttaagccgtcggctcttggatgcagagacaaggtattctcccatggaaaagttatgcttgtgtttgtatttctcttgcaccaagttaaggcattatttgttataccgtggtatgcaaagccaatgtgatcaaatatatgttgatggctccggttctcaaagaaagagttggaaagtgacagaatttgaccttagatatgaatcacccaaggcaatcaaggggcaggctatagccgattttattgtggaacatcgtgatgattcaatcggctcggttgacattgttccttggactttgttcttcaatggatcagtttgtactcatggctgtagtattagcttggttaaaatttcccctcggtgggcaagttttgagtttgtctatactatcaaaccttatacaactaacaatcaggctaagtacgaagcagttctcaaggggttgcagttgcttaaggaggttgaagccgatgctgtggagatcatggggaattctttgttagtgatcagtcaattggtaggggaatacgaatgcaagaatgatgtattgatgatctacaatgagaagtgccgggaattgatgaatagttttcggctggtaactttgaagcatgtccctcgggagtagaacgttgaagctaatgacctggctctgggggcatcaggatacaagccgatgatgaaggatattaagatagaggcggctgcaatcatggccaatgattggaggtatgatgtttttcaatatttacagaatccatctcaatcggcttcacgaaagttgcgttataaggccttgaagtatacattgttggatgatgagttttattattggacgattgatggggtattgtttaagtgtttgagtgccgatcaagctaaggttgtgatgggtgaagtacatgaaggtatatgtggtactcatcaatcggcacacaagatgaagtggttgcttcggcgcacgagatatttttggccgacaatgttagaggattgcttcagatattacaaaggatgtcaggattgtcagaaatttggagcaattcagagagcaccagcatcgactatgaatcctattatcaaaccatagccattcagaggatggggaattgatatgatcggtcagatcaatccaccttcaagcaagggacataagtttatattggtggcaaccgattattttaccaaatgggtggaagcagttcctttgaagaaagttgattctgggatgcaattcagtttgtaaaggagcatatcatctaccaatttgggatttctcagactattacaaccgatcagggatcaatctttgtatctgatgaatttgttcagtttgccgatagcatgggtatcaaattattgaattcttcaccctattatgcacaagctaatggccaagccgacgcatctaataagagcttgattaagttgatcaaaagaaagatatctgattttcctcggcaatggcacacacgattggctaaagcattatggtcctatcagaaactacaatcggctcaaggagaatagatctacaggatgatttaccagcttataagcttgtttatggacatgaggcagttttaccatgggaaactacaatcggctcaaggagaatagatctacaggatgatttaccagccgatgagtattataatcttatggtagatgagacagaagctctagtccaatccagactgagagcccttacaaaggtgactaaagataaagaacgagttgctcggcattataacaaaaaagtggtgcccaagtctttttctgaaggggagctagtttggaagctgattttgccgataggaactcgcaataataaattcggcaagtggtcaccgaattgggaaggaacgtttcaaatatacaaagttgtgtccaaaggggcttatatgttacaaggacttgatggtgaagtttatggacgagcatttaatggaaaatacttgaagaaatattatccaagtgtttggatcaattcatgatcggctaagtgttgacatcgccatgagatggccgatataaggtatatcacccttaatggtttttttcttatcataatcggttgtgttctgccgatatatgatggtcgatatagattatatcgcctttagtgcttttttttcttatcataatcggttgtgttttgccaatgaatgatggccgatatttgatatatcgcccttagtccaaattataattttatcaatgccttcaacattgcaaaattagggggggggcaagtatatatgagaagtctggatttccaaagcaaaattcaagagcaagcttcacaagagaaaagttattacatcccaaaagttaagtttcagaattaaattacaagacttagctcatccagacacgtatctttggatggccgatattgccctttgcctaatttgatctacttcatctattgtcttggcatcggctgcatcagtgctagagatcggcttcaaagacttggtcagttcagttagatgctttacagatgctttcagcttggatttctgatcttcgatggcttttggcaaatcggcaagcttttcttgttcaagagcaagttgtgcattgcgttgttccggttcggctaggagttctatcttccggttattcagccgatcaatgttagcttgagttgcacttggaccagcctccaattcatccagcttagctttttcttcgttgatggatgctctattggcttggatggttgcttcaagatctcttctctcacgccgatcggcaatcctcttttgagctttttcaagcttaagccgatgttgctcaaggtatgctgttggagtgatggcattagctagttcatccgggatcttgtcatgaatttcgttgagtctgtcaaggatggatccgcagcttgtcaccaaggtttccagagagccttcatgcctttttgagatatccaataaagttgacttggtatcatcggctaagggcaccagagcttggcttgttgtttcttcctcttcatccaagaatggcctaatgtcaaaagagaacatatcggctaaaacctgaaatagaatatatttaatattatgggttagaaattgtaagaagacagacctaaagtatatacttacagggatagcatgcaggagctggtgatgctacttcttcttcttctacatggtgacttcccacagccgatggagtgttttcacttgattcagagacaagagttggaggtcgaggaggctgaaaacataagtacaagtcagcatcggttacttagagaataaaaaagaaagttgacatgattaaggaagttaaccggtggagatgtcccctgaggtttcttggaagccaccttcttcttctgcaaagtacaaagtcagaaaccagctttaaagtatgagggcgatggataagaggagatgcatacccttggctggtaagtgggacgtattggaggtgatggtgttctctaaggactaggtgaatcagttggaggagtatgctcccttgtttcactaatgtgttcagctgcttcgtccacctcttctgccattgcttcatcttccaggaattcagctacatctggatcaatggctggtagatcgtcggcagcagtcttttgtttcctggccttcttctttgcagccgatggtgcagcagccgattttgctcttttctttccagcagcaggagcaatcggcacacgaggcaggccatgcagcaatgtggaggtcttagggggcattgtagccgataactagaggtgttagtccaccaccgttggcaggagtcctggagcatattggatgtctacaccgctgttgctgtgatgaggaggagaagattctgttgtctgcaaaagaagaatttacataaggttaaaactgatacatcggtttgcagttaacaaaattgacaaaagaaatgattcttacttgagggacagctttagggaaaagatttgtcaagtacatggaagccggttgatggaataaatgtttcttccactctatccatcatcggtcaaaagctgcacctctcagcatcctaaaattgatattgttgatgctgcccaaaggtggtcttggtagatttagcagccgatccatcatgagcaatgatgtgatttctcctctactttggattttgtcagcaaagaataggctgattggcagttgacccatgccgaattgccttgcagcacttgtcggatgataaaattcgtaggtcatttggatgtttttgccctggtgaataccgacaggaatgatgcaagggctgatagctgctgagaatacttctctggatttgtcatattttttagagttgatttcatcaaaccgaaaatcgcctagtagctcaaaaatgccatgtccttcatatgcaaaccaaattctactattcttggggaacccatcataaaagttgttgaaccactctccgaagggcttagccgatagcctggatgtaatgctgaccgatgctgcttctccaaaagacatacatcggcgcgtggtgctcgtttctccatcatcatcgatgatcggctcaaatcttggagatcttgcatcgactaatggtggccgattgacaaccatcctggtgtgcaaatttagccagatccgcagtaaccaccatggaccccctgtaccgaataattctccagaggctatcttgttaattgcggtattgagagtctgatatagatagcctagcaagtattttccaagggggaagtgcttcttttctaccaagttctcggctacacgctgccagtttgcggtaggaccacagcttggaccgcagaacaagaatttttcgagccacatcataaggaaagctgcatgttcccttggagagactggcccagttcccatgttcttcgcaacataacttgtccaaccgcctatgcttctagtcttgaactcgtgggtgagttgggtatccaaactagacaagttagccgatgaagtgacatctagcccggtgatcatgatggaatctaacagggttggggtcatcggcccttgggagaaaaggaaggtattcatggctctggaccagaagtaagaagtggctgccatcataggctcatctcttgccatatccgctgcagttaaggccaaggcttgggatatgccgatttcttcccagtgggttgatttggtagccgatatcctcttataccaagcaggccaagcttttttcggccaacggccaggatttgaaggtgttcttccagcagctcagatctaggttagcaaatctaaagggaatttggttggtttctccattgataaattctgtggggtctagattgccgattaggccaaggaaaaactggaattcatcagttatacaaggaaacgcaacttggtgggtgagatgctacagaagaagagaaatcgaggattgagcggaagaagaaccaatcttgtgcagtaaagaaagggatttagccaatggtacttgtcacgcccgaaatttctatccaaaattccaaacgcttacatgtgtgttaaatcctcgtccaggaatcagccgaggcacacaataacaaattgataatagagtattattaaacagctaattaatactcgcaaaataataagttattacaaaggtggatagttcctctcaaaagaataaaattctacgcagcggaacaataaacaaaagactaaatagctatggcggctccactccacaagcaacttgacccgaacaaagcctaatcctcctgatcatcaccttcagtgaagtactcctcctctgatgaatgaatattgcaagaatgagcatatgacatactcaacaagccacacagcaaatatggaagtgcacaggataacaaaggatgacatagtatagcttatttgcataaacaacatttaatgaacatttgagagaatagtaaaacagttgagtaattaagcaatattaaataaacaccatacaacacacccgtgttgcataggcccaacctcatctgaacaaccaaccccggttgtacaaatcaaacctccatactaggaatataccattccaaaccaggagtcaatttaaatatcacaggttatcaccattaatgagtagtgtgaaactaatcacgaaaaacattgttagactcgcccataaccgcgcacacggctatttgaatagttttactctggccagatatgtaccactgtacccacaagacacagctccacgacatgtcaccatgcgcctcaatacaaccacggtacctcggaaaggaactgtgacagtacccttcgcacaacacacaacacaactcaccacagtgcaccatacctggatcataatcacctcctctacaactagaggcatggacatcccagcgacccccacggacctctcgccgcttctcagtctggcaccccgtaatgaaccatgctattcaaaaggtaaagctgtgacgtgcacacgtctatggatcacgtgtgacgagaagttgtggcccgatcttctcaaaggatccacgaacttgataactatcgccgagagtctgcacacgcgacgaactatcgagacaatcacccttccacgtaccgacgaagccagcccacgcaatcacaccataaagatgtgaaggcacaaactaggtgaaccgtagttcggcgttctacaattccctcgggaattgaaagaacaaatttgcaagcctctcgagactcacatggaaagaagaactcaaatagtttgtatttctaaattggcagccaaaaagtccccttgtcatctattacatggctatatatagcactagtggagtctttaaaaacataaatgaaaacatgcagtaggaagtcacaataatccttgcattcatggcctagtggagctctcttgatgtttggacttcatttgcatgcagctccacatgcgaaacaacaatttgaaggttttatttactatgtatagcagctgaatggttcctctttgctatgcacgtccaggctccttagtccatatatttggagggtagaaaccatcatcatcccatgtccgttcgtgcactccatcattcctaagaacattaaaacaagtactcaaaagcataggctcatccaaagtaatttgattagttaacacaaggttagcgttcacctgagagtgaatttccttctctaattgtttggctctgctccttgtaattggacccactatatcagatgcacgtttattaggaggtggggaagagtggctgctagggatgtcctcatcaagctgttgcccacactggcttgtggttggcacggttaatgtttcacaacagtagctcgcgaactggtccttaattgtcatgagcacgaccatcaaaaccatgtgctcataacccacctttaatcgggttttaattatcaattaattatcataacacgattaaccatcgtgagctaccattatatataaccataaataataatgtagtgtgattcatcccattaatgagctaatgtttctaggcatggctaaacaattatatatatagcatttagctgaaccaaaccaatatataaggttcaagccaatcaatttataacccataggaaaataaagtcatctttggccataattaattggaaaaggctccccacctgatgacattcgaaaataatgcataagttgaaataaaatattagctttaaacgggttcatcatgctcaaagggttgtttgggatctgtgtgacttgccttgagcttcttcaaatgcttctgaaccttcctcaacgtaaacgctctcctacggaacatcggaaactaaagcaaataaacaaaatcaacaaaacagttaaaaaaacaagcataaacagtatatgtggatatttttaacatgtagatctcgattttagatgaatttagcaacttgaaccacttgaatctgagttacgatgatttagttatgatattccgaagtttaatcagtttttcacctaatacagaaaattattaagatttaaataaaatatttatgatgtcaggatgacatccctgccgggtatggttctggaccacacaaccgccggcgaacgaaggcacaacggcgcaaacagagagcaccatcacaacgagcacgacgagaggaacccaccggtggtgacggcgacgacaatcgatgagagaaaatgaccggcgacgaactccgacggcgacatggctcggcttgacgacggcggcgactctccagcggtcttcggcggctgcgaaggggcggacgggatgctcctccacctggcgaatctgacagtggtgacggaaggcggcggtgacgatcatagcggcggctgaagcggctacggtggcgtcggcgctagggtttccgcggcggcggcttggacttgaggcaaacggaagaggacgactaggggatgctttatataggcatgggtgagggagatcggactccaaacgagaggatttgagccggaaaatccgacggttagtttggagagataaactcgaaaacgaatccaaattcgcatcgaactcaaagggataaaatcggatttttggggaaagggatagaagaggataaaggaaacaaatctcctcaactaattttagaaatgcacgtgaggaaaggccggaattggaggggaaaaaccgagccaattcggtctcgggtcggctgacagaggttgaagaagaacagtgcatagggaggcatagtagactttcggtcttgggccggctgaaaataaaacaaagaaagaaagagaagggggaagctcggctgggccgacttgggccacacagcactcgcgcgagggaagagagttgggctgaaaacagcccaacggcttaggggaagatttaaaaactttttcaattaaaataatttgtgaaatgatgtttcatttattaaaaatactttccttactcaaataattcccagaaaaaatctaaaaaatagataaacaagtaaagtatttaatgaaattttatccaacttagttttatgttgcgatttttcctagattattagagtttaacttgtaagcttttaaaataatttctaaaaatgcattagagaatgaattattaaattaggcgattttcagggcgtgacagtacttacctcgacatattcggtggccgatgcgcttggtggactggtagaggtcgacattgctagtgatgaagattggagttgcggagaatcgcctttgggtcgccggaaacttcgaagttgtcgtcggagagctcaaggaggagatcggggaaagttttcactagagtggttaaaacggaagctgacgccgtgaaaagtgcaaagcggtggttactatttaaaagggagcgcggtaacggccaaaacagagtcggtaatggaaacctagttttaatcggaaggggaaattgagcaaatctgccacattacaaatatagcggacttggggggcatgttttaacgaccaaatttggtaagacatgaaccaggttcggcattgggatcgaagcggattcggcaaagagttagattcaaataacagcgtgcgcatcggctgtcaagacatcggctagagtctgaatcggttgaagatgatcggatgaaggatagcagatatagctgatggggttgatacaaccgattccagtggcgatggctttggggctgtttcttctagaatctatcaacgtgtttcacaaggattgccacgatggagataaagctctcggaaaggcaattgtatctattaattaggatatttttataatttccttagagatatgtttgggcaaaagtctgccacaaagaattatggtatcttagagtttgttagagataagagtcgtgtccggcaaggacatattttgtaatcttgggtataaatatgacccgaacccatgtagtaatcaattaacacacattcaataacaatttcggtgcatcgccaccctatttactttcgttctatttcgacgagtttttgctttcgggttgagctgcatcgattcgatcttcaactcgaggtaaacttgtcatggcggcttgcgttctccggattagtgcttccatctttatgacactctaatcatgtttacgtaatttatcgagttatcatatacacattacaatctttgttagttgcgttatataacttgttatcggctagttcttattgtcaggaagtgaccgatagcgttatgtttcgttattaagttagattatatcgtgtatccaccatctcttagaggttttcatcatcttgtttagatcccacaattatctttatgcttaatgctgcatcggttgagtttgatctgttgagttttacttataattgtgatatctggcttgttttatgattatcgagagagatagtattggggtttcagccgatcttacctgatttagctactttatatctcatatgcttatttaatatgctagatttgccctttatattgagatcttattgcattaagttatattaggcttcttgtttaatatattctgtttgtcttgatatcttaatatagagtggtatcggagtattagccgatacatgctatatctatttgatcagctatgctataaacatctatataatcagtactttactatatatttcgacttaagtgatttatactgtctcggcatggcgaccgatctatcccaatcacttagtttaaatatgtattgaagtaaggattatatgttgtcaatatctacagccgatcgagtatatttagtcttatcttatttactcatgactaccgatcgattcaaatatgacatcggcttgaagataaatgatatgtcatcgacgaccagccgatcggctatcgattatggatttaaccgtggttttttttcttgtctttctttctcgttgattgcaggatcaaatcaactggcacgctcacgaacctaaaggcaagattttggacctgcactgaagttaagcggatcttctaggccagtgtgtatttttcacatcaacagacacgcatgaggagatatatcgacgtggcggtggcgtggccggcgatgtaaaaaacaagacatatagaaaaactggatccttaccgcgtgacctaaaaaatagcaacaaaaagcgaatggaaaaaaaggaaaaacaactaaaaaacaaaacggacaaaaaaatagcgatgtaaaaaaagatgaaaaaaaggcaatcgtaaaagaccgcgaggaaagaaataataataaaacagatgaaaaaaagcggaaaaaaaacaaaaaaaggcaaaaataagaatacgaatgaaaatatatcaaacgttacttattttgaggtaaaaaataattaaaaaagatgaaaaatactggaaaaaataaaaaaaaaggcgagaaaaagaaaatagacgaaaatatacggggaagcagtacttatttttttattagttatatatatagatatagattttttttctaatattccctacatattcctcatttttttttcttattgcccctattatttttccttttttttcttgtatatttcctcattttatttcctacttttccgaaattttccccgtattttttttctattttttcattcattatttcttttttcatttttaagctttttgtttttatctatatttcaccaacaatagtcttacatcctacatacttcatacaaggtcaggattatcgtcgtatttggatctaacgcttccgattactccgacatgcaacctttattctctgtctagtagcggtgtaccccctcccatattctttcccacgccacccacatccggtgctactccgcgcctccatgtcgaggaccgtcgaagccaacgacctcgctgatctcctccgcgcggccgctgcccaagcatcacgaatataggcaactgccgaccagagctgccccctaccatcgccacgcgcatcgctgatctactccgcgtctctacctcgggggcagttccgcgtctctacctcggaggccacaccgtcgtctccatggtgctactccgcgcctccatgtcgaggaccgccgaagccaacgaccttgccgatctcctccgcgcgaccgctgcccaagcatcaccgatataggcaactgccgaccagagctgcccactaccatcgccatgcgcatcgctgatctactccatgtctctacctcgggggtggttctgcgtctctacctctggggccacaccgccgtctccacgccacaacagacaggcgcctccaaaacccaccgtcgatttgtccgcaccaccaccgaccttcaaggacagaaaaagttcataatagagtaaaataatactccctccatctacttttgatagtcatatttcatcttggcacacagaccaatgataagtaattctgtttatcatctatttaaacatgctactagtcattcctcgtaaaaaagcgattcattaatatttatatttctcgatgcccatgtagccaatcatatgtggaagaatggagagtcacgcattaaatccgagaaagtcattagatgataagttgttggattgaaaaatatgcctatcaaaaataaatttttcagattcggaaatatgactataaaaagtagatggagagagtattttaagaaatagtctataacagacctccctccccaccgtcgatttgtccgcaccaccaccaactgtcgaggacaaaaaagttcataatagagtaaaataatattttaagaaatagtctataacagacatccctccagaaccgcgtagccagcccatccgacaggcgggcccacttacacatatcacacttacactttcgtcctcgcttcatgtaaaagggttaacctgggagtgatatggtaggagggaagatgtcttataagttagttccactcatgctaaactagtaaggtggtactaaacatgcacacactactcacatggggcacactgacttcatcctaattaggctaggatgtcacatagtcatcggcacaagtattcataataaacaatcaagcaacattaaataaggagctaccctcctagttttaatagtatgtttatttttttaaaaaaatattgctatatttttctataaatttggtcaaagttatagatatttaacttggaaaaaagttatggcgttttataattattaaatggagggagtagcaatcccgattaaatattcatgctaagcttttgttgattacgctttcaacttgtcacatgaatcactttttgcttaaccaaacagagtgaaatgacaaataagttgtgataggtccaggttagtaaaatcccgagttaatgaaatcacacaaatacattaaacagctcaaaggcagagaactatagagcatccgaagaatattactactaggataaggttcatcaaccctgtgttgaccggcttgaatcatagtacaagatcatattaaaacacatggacgatgataacgaaacgtaagacctccatcctttgaaggtctgattattgctcgagagttacctccacttcagcgccgtcttgtacctcgtcatttgtaatttcagccctgctttcggtttccctcggtagagtgctttggataccaacagaatcttttaggagtatgttcctagattgataatctgtactgtaatacccatcattttcttcggagaagcttagttgccctgcctcttggttggaccgaacagtgatgctgccaatctcagaagcatctttgctcactgcattccattctaacctccttaagaaacattcttcaatatcattgggcgacacatcatcgtcgctgccgtagctaatgtaaggcaaccggaaatcaattgacgtgtgcctcctggatgcaccaatcggctgttcattgacaacattttgttgaaggaccttggcaacatctttttggctttgagaaccatcatctccaaaattgtcagtgtcactaccactgtcaccaccttgttcaacatgatgatgcatctcatcaagttcatcagatgaagatgactgagatgaaattgctgagtattcgctttcatcatgctcacgttctctaagcgtcttgagaatcaatgtcttgagaagattcatcacttgaacagcatgcatcagagcagtaagaggatctgacatctgaatgcaagtgaactatctcatcttagcgcacttgcatcagcatacaattgatcacgtaaaaaaattcttatggtaagaaaaattacctgcgtcatattgggtgcaaagaccatagcgacatttcgggcattcatcttgtttgactcctcttcctcgacaacatcagccatgaattctacaacccagttaagaagtgcagcctgtgtcggaggaagaagccgtacgagctcaacacattcctcctctgtgttgcagtgaagaacttgctcaggtgagaggctatccagtacaccctcagggagttctctgaaccaggcctgaacaaaattgtgcagcatacgtacttaaaacatcaaactaaataatactaaatgttaatccttagtgtgtgtgttttagatcagtcccattacttagttgaaaatgcttagggtactgaacattagtaatctcatcatttccatggtgccagcgtttctgatcaggaaggctgtttaaagattatgtagactgcatcccaatcagaagttctttgtaatttattcctacggagataacaatttcttattgaaattcgaacgcgcatagagggaaaaaaattaaatgactacagtttcagttaaataaatcttcggacttacatcttagttcgactttaaataattctttaataacatttaactaaggatcattctttaatagcatcttactttgcaaatattattattacttaggaagttatttaccggaccaatctccattaatatccaggtatttaaccttgtcgagaaaagaaaactgccctatgtgggtacattctttttcctaataattaatgggcactgaagaactaaaatgacactaggatttattaccttaatcaaacttgccaagcaatgcacatcgatgtcgtcgggcacaaggcccctgttaagctgctccctgacattctcctcctggctgttctcaggggtgatacggaagatcccttctgcctagataacgaacaaaattaaatttactaacttagctcacatcgagacgcctagctccgaactgaaatttctccaaagaaaaatggattaatggagaattccagtgagagagactctgatttgttgttcatacaaccttgaggccatcctgcgcgtacagcctctcctgcatgagtaacagaatcttgggcaccgagttcccgttgtcgtcgaagcagcactgcatcgactcaggtgacacgccgaaaacgctcgcactgcacggaatcaagaagaacattaaccggtaaatccaacgccgagagacattaaccggaggaatcattgcaggcttagatttcgccagcgcgcgcgccaggccaggcatacaacgtatactagtactgacctggcgctggggacgtggcccgggatctcgagctcgaactcgccgggaagcccgaggaagccgttgaggcggtcgaaggtgacgtgagcgacgtgccggacgtcggtgggccacccgatctccatcccccacgcgactgctgccgggtcgtcagcgtcggccatctggcacgggagcaccaccgacctgcgtagcgcggcgagtagcagggcgagcacctgcccatgttgcccctccgccttcccctcgccgggtcctcctcctcccgctcccttgactcggactccaactcttcctccgcctccgctgcacccatgattggacaccagcaccgcctcgcccatggcgaccgctcttctcgtctcctcacttcactggctgtcgagctgagctaagcaacgggacagcatgtgctcctccaagtggggaaagagctgctcttttaaaaggcagcagcgcgcggtgggaggatgcttttttaagcttttgcgtcgtcttcgtgttcgcgaatcgcgatccgctattttgaaatgggggagaccgcgtggggccgagcgcccagacaaggaggggtcgaagggctccaacggctgtctaattcaaacttcgggcatgtttgcattttagtacctcaactgttcaaataccaaataactgaaggaccacatccaaacagacgttcaaaactgttcggccgtttccaagggaacaaaattagcaaaatctgctataacacaaaaagtttgtggtctttatcatatgacaccttagaaacgtgataacgctattggacattccaaaaaaatagtaattagctaccggacatcgcgatcattgtttaattatttttgatcctaatgaaggtaaaaaccatgtggaaaaggcaatccccccgaccccgcgggggaggggggtgcttgtaccctaattgggtcttgtttgaaccatacccaagccgctctccatccccctgatcacttctccaaaacaatagaatttgcgtagcggtgccgacgtccacggtgcctacaaacatctgcccatttccatcttcgtttggagagaaaataataaaacaatggtcacggtatcccataattaattatcagtttttcgggtgcccaacaaccacaagttttctaagtatcctacatgaaaggccacaaaatctggattttctgtagcaaattttgtcaataaaatttagtgcagcctggctgcaaaagggcttccgatgctgccctggtttatgtattcaacagcaactcttgccatagtcattttgtggtgaagcttattgcttgctgtttgtggagcacctgtatgtgctttttaatgtgcatggtgttggcaactctttttttttggcaagaagacaatcacgatcaggacacctaaacgccttgcggtgatatggagtcgccaaccaccccgatctagccaacgaccaaatcaagatggattttgcaaactagaccggctagcgaagccgatctaggtgcaacaaaggataaccacccgtctcgtgggcaaacggaagatttacgggacaaacctacaaaggggtattacactctcagcgacggcggacggtttatggcgcaaaccgacaaagatagactaaactaggataaagtagaaaacatgactaaaaaataaaggtaaaagaacgattcgattatagagattgttgggattggggattggtattaatcgaaccggccttggcccttatataggtgttggtcttgcctcctacaattatctatttcttgtcaggctgaaaggagaaggaaacttggggaaacaaatttcttgttgttaaaccaagcgcaccatgttacgttttcttgtcaatgcgtattcgtatttaatttcctaatcagcagttgatccagatttattcatttagatcatctactgccagtttaaaaaaacatagtgatcacttgaattgctctgtatgttatgataatattaataactattcttccaattgttagaaaagatggatctgttacagaattaaacgaaatcccacacttcagtgtaagtgtggtattttgtttaaattctttaacagatccagtttttctagctttttgtgaggctggacagtatggtcttggttacaagcctcctagcatgtatgaatggaggaaaccagtgctacataggcaagttaagaagacaaagagatgctagagactcacagagagtggtggaaaaaaatgggatgcacaattatgacaaatggatggacagataagagaggtaggagcctaatgaatttgtgtgtcaatagtgagatgggcactattttccttcgagctattgatggctcagcagatactcatactgcagaacatgttttgagagtggaatcaaagatgttggtgaagaaaatgtgtttcatgttgttactgataatgcttcagcaaaccttgcagcaggtcgggtttttacagagaaatatccttgtatttaatggacctcatgtgctgcattttttttcgcgaacgcgtaaaaggattgcacatcaatatattagaagaaaaagagtttagttacacgatgcaatcagccagaccggcttatgccaggggaagggagaaaaagcaaatgaaaaaaatctgaagcttagagaaactacggcggcttaaaacatactccacgcaacagaagggaccaagccatgctacactcccaacaaatccccaaaagcggcgacgccagctaaagaccacagatggccctccgaatggatggactccagaaccactgagaccgaagagagagcggagtcgaaaaccct

SEQ ID NO: 7086 - DNA, 1398 bp, Oryza sativa
gatcgcctccaaggagccccagaccaccgcggagctttttcagctcgcggaccgtgtggctcgcaaggaggaggcctggacctggaactcctccggtaccggtgtggcagctccggccgcccccgggtccgccgctcggtcagggcggtgggacaggaggaggaagaagaggtcggcccattccgacgacgagggtcacgtcctcgctgtcgagggcgcttcgcgggccacccgaaaggggaggcctgcgagcgacaaaaagaaggaggctggcgctcccagcagggagcgcccgaccggcaagtggtgttccgtgcacaacacctccctccacgacctcgcggactgccgtgtggtcaaaagtttggctaagcggacgaggaagtgggaggaggagaggaggcaggagcgccgtgtgggcaaggccccggcgactcccgccggcaaccggcgaggtgaggccaagcagaaggccaccgccgaggacgtcgacgatggcgacgatgacctggggttccaggagcctgaggccaccgtcgccaccgtcgatgggggagcgtgcgctcacgcttctcgccggagcctcaaggccatgaagcgagagcttctggccgcggcccctacccatgaggcgacgcggtgggcgcggtggtcggaggttaccctcaccttcgaccagaccgaccacccgccgtgcatttcccggggaggacagatcgcgatggtggtttcccccaccgtttgcaatgtgaagttggggcgtgtcctcatagacgggggagcagccctcaacatcctttcccccgcagcctttgacgccatcaaggccccggggatggtgctccggccgtcccagccgatcatcggtgtgacgccggggcacacttggccgctaggtcatatcgacctcccagtcaccttcggtggttccgccaacttccgcacggagcgggtgaacttcgatgtggcggacctcagtctgccctacaacgcggtcctggggaggcccgcgttggtgaagttcatggcggcggtccactacgcctatctccagatgacgatgccgggccccggtggccccatcaccatccatggcgacctcaaagtcgcgcttgcttgtatggagcagcgcgcggaccacctcgccgcggcgtccaagcccgcgggtggtgacgagaggctcagcacctccgtccctgccgccccgaggcagcggatgatcacgtgcgacgaggtcccggtcaaggaggttgccctgggcgacggcccgtccaagaccacacgaatcggtggtcttctggacgacaaataggaagacgcgctcgtctccttcctgcgggcaaacgccgacgtcttcgcctggagaccggcagacatgcccggggtccccagggaggt

SEQ ID NO: 7087 - DNA, 11541 bp, Oryza sativa
ccgcctgacgggtctgcgatcccaggggctcccgggggccatggtgtacggcgactactttcgtcgccggatcgcgccgctccagcggcgcgccaggggcgcctggaagtacaccaagtccgaggactacatgaggacccaccagggggtcaaatgggactgggtccctgaagacttcaagatggtgatccaacgggtgctgaatctcagctccgtggaggcatccctcatcccccaaggtgtcctccccctctgcagtgatccagagcgcgccaacatcctgatcatcatgcaggcggtcggggcgtcgggggagcaggcccctcgaggccacgatggcgcgggcgggagccgcaggggggaacaatctaccccgggagggggtcatgcttctgggccccgcgacgggggtccagggggcagccgccctgccgacgcccggggaaagaggaagcaggagggtacctcttccccatctcctccccaagggggcggggcggtacgtgccagcagcaggcgcccagagggtaccgcgccgacgtcgcagcccgagggggagcgaaagaagaagcggctccgcaagatgggggggaccgaaccatgccggggaaacctcatctcccccccaaggtggtcgtttagcctacctcctcgcaggttcgtccccgcgcccactgcggccgtattcattctcccatctcccaaggcaagttttcactcacccgttttttgtcttctggtttttcttctgcctcagcgagatcccgtcgcgcccccaccccccccccccccgccattccaagtccggccggtctgaggccggggagacggcgaccgcggaggccaggaggcgggaagctgaccagcgagaagccgcggaccgccttcgggaagccgaggaagctgcccaggaggccgtccgggctcgccaggctgaggaagccgctcgggaggaggccagactccgccgggccgaggagtccgtccgggaggcggaggcggcgcacgcacgccaggcggcctgccaagcccccgacccgactccgcccgaggcgacgacgacttccgaggccacccacgacgaggccgcgggcgcaccgctcgggcccgacccctcgggcgacgctcaggacgagccagcttcgggggacatccccgagtccggcacgtcgatcggcgggccgagccgtgcggcaccctcaccgaggcggctctcccccatgccttccgctaccccaccgagcgcggagcccctcctgcaggccttggccgccgcgaacaccacggtgttggacgggttaagtgcccagatggaggtcctgcaggcggagcgggcggagctcgacgcggcgtgggcgcgcgtcgaaaaggggcgacgctcggtggaggccatggtggaggcgggccgcaaggcacaccgccggcacacctcagagctcgaggcccgtcgtagggacctggcggaggtcgccagggaggtggaggaggagcgggagactgccctcatcgccaccgccgtgttcaacgcggcgcgggacgacctctgcctccaatacgggagccgggcggcggagctagagaagaagctcgacgccgcccggggagtccttgatgctgccgttgcccgggaacggcgggcggcggagatcaaggcggcgtcccggcagcgcgaagaggcccttgaggctcgcgccacggtgctggaggagcgcgcccgcgcgaaggagagggacctggcggaccgcgaggccgccgtcgccatccgggaggcaacactggcggcgcacgaggccgcctgcgccgaagaggagtccgcactccgcctccgtgaggacgcgctcaccaagcgggagcgagctctcgaggaggctgaggccgcggcgcagcggctggcggacagcctgtccctccgcgaggcaacgcgggaggagcaggcgcgccgcaatctggaaggcgcccgcgccgagagggccgcactggatcagcgggccgctgagctcgaggcgcaggcaaaggagctggacgcgagggcgcgcagcggcggggcagccgcgggcgacagcgacctagtcgcccgcctcgcagctgccgagcacaccatcgccaagctgcagggcgcgctggactcgtccgccggggaggtcgaggccctccgtttggcaggcaagggagggcccggcatgcttcgggacgccgtctcccgtctagaccgcgccgggcggcaggcgggcctctggggcgggcggaccgcgaaatacgccgccaaccaggggggcctcgcccagcgcctctcagagatggccaggaccctccagcggctccccgaggagctcgaggagacgatcaagtcatcctcgagagaccttgcccggggggcagtggagctcgtactggcaagctaccaggccagggaccccgacttctccccgtgggcagcgctggacgagttccctcccggaaccgagaaaggcgcgcgcgcgcaggtccgggacgccgccgaccacatcgtccacagcttcgagggtacggcccctcggctcgcgttcgccctcgactccgacgaggaggttggtgacggtggtgcggacgacagcgacgacgaggcttgcgacccgggcgcgtcgaagtgagcccccaggcccccgccaatcttaaatagctttttcttcttcttccgaggccttcgggcccccttcttgtatagactaatttaatctgcaatcaaataaagaggaaatttttgtgtcaatttcatttgttgtgtgtatgagacgaggatggtctgtgccgcggtccttctgtgtcttggcttgaacaagggctcgtgcccaggtcccagcctcaaacggcgcgggtcggggctagtgcctggggagatccacgtgtcgagactggccaggccgggagcgcggtgaccgagggttatggatgacccgattgtgggcctttgccgattcccccccggagttcaccacgccccggggcacggctcggttctgggccccttttggcgattttagccggcccgggccaccgagggcaggatcgagcacgagcgtgctaattcaagtcaagattcttcaaaaggaaacaatggcacagacacagtccttaggaaatcgaaaatgcttttattgaaatatggaagagaaaaaagataagtatatgcatgtggtagcccccggccaaccctgcacgcccgggggggtgcggggttggcccgagcccgagacctgacacccgacccccactaggggtagaagcgacgaaggtgttcgatgttccacgggttaggcagctctgtgccgtcgcccatggccagccgaacggagcccggccgggggacaccgatcactcgatacggaccctcccacattggtgagagcttgctcagtccagcacgcgtttggacgcggcgtaggacgaggtcgtcgacgcagagtgatcgggcccggacgtggcgctgatggtagcgccgcaggctctgctggtagcgcgcggctcggagggccgcgcgccgccttcgctcttccaagtagtcgaggtcgtctctgcgaagctgatcttgatcagcctcgcaatacatggtggcccgaggggacctcagggtgagctcagatgggagaaccgcctccgcgccgtagacgaggaagaaaggcgtttccccggttgctcggcttggcgtggttcggttcgcccagagcaccgctggcagctcctcgatccacgagtcgccgtgcttcttgaggatgttgaaggtcttggttttgaggcccttgaggatttccgcgttggcgcgctccacttggccattgcttctggggtgggcgggggaggcgaagcagagcttgatgcccatgtcttcgcagtagtcaccgaagagctcactagtgaactgggtgccgttatccgtaatgatacggttaggcaccccaaaccgagcagtgatgcccctgatgaatttaagcgcggagtgcttatcgatcttgatgaccggataagcctcgggccacttagtgaacttgtcgacagcgacatacagatactcgaacccgcccggggcccgcctaaacggacccaggatatcgagcccccagacagcaaacggccacgaaagaggtatggtctgcaaggcctgggccggctgatgggtttgcctggcgtggaactggcacgccctgcaccgccggaccaggtcgaccgcatcgttgagagccgtcggccaatagaaaccctggcgaaaggccttgccaaccaaggtgcgtgaggcggagtgggctccgcactcgccttcatggacatcggcgagaagctcgacgccttgttcccgaggaatgcacttcaggaggactccgttagccgcgcgccgatagagggtcccttccaccagcacgtagcgcttggagatgcgctggacgcgttcactcccttcgcggtcctcgggtagagtcttatctgcgaggtacgcctggatctcagtgatccaagcaatcaatctaggggagctgggagcgctcccctcgggtcccgaggcctggactccgacgggcctcggaggccgttcaggcgcgtccgtctcccctagggggtcgggtcgcgccgacggctgggcaagcctttcttcaaaggcgcccggtgggatctgggctcgcgaggaagcgagccttgagagttcgtcggcgaccgcgttatcccgtctaggcacgtgccgaagctctatcccgtcgaaatggcgctccatacgccgcacctggcgcacgtaagcgtccatctgcgggtcagagcaccggtactccttacagacctggttaacgaccagctgggagacgcctaacaccaggaggcggcggatccccagtccagctgccaccctgagtcccgcaaggagtccctcgtactccgccatattattggtcgcccgaaagtcgaggcgaaccaggtatctgaggacgtctccgttcagcgaggtcaacgtgacccccgcaccggcgccctgaagagatagggagccgtcgaactgcatcacccagtaggcggtgtgaggcagctgcgaggggcccgagctggcctcgaggacggagacgggctcgggagctggggtccactctgccacaaagtcggcgagggcctggctcttgatcgcgtggcgtggttcaaagtgcaaatcgaactcagagagtttgattgcccatttcaccacccgtccagtaccctctcggttatgcaagatttggccgagggggtaagacgtaaccaccgtgacccgatgcgcctggaaataatggcgcaacttcctcgaagccatcagaatagcgtaaagcatcttctgggcctgagggtatcgggtcttggcgtcccggagggcctcgctaacaaagtagatgggccgctgcacctttcggcggggccgatcctcttcgccaggggccgcatctccagggcgctcttcatccgagaggccacgcggggcgcactcggcttctgtgccgacaacctcggggtcagagggcgacaggcgcggccttcccgcagtggccccggggccatcctgggggtcgggggcgcctggcaccgtcggacaagcaggcggagggccagctccggccgtcgggggcctcgggccaccattcggctcgggggcctctcctccctgctctctcccgggtcgagtcgacacagggtggggatgcgcggagtgagggttgtcctcgttgcgctccacgaccaacgccacgctgaccacctgcggggttgccgccaggtagagtagcaacggctcatctggctccggggcgaccaggactgggggagaactgaggtacgccttcaactgagtgaaggcccgctcagcctcctccgtccaggtaaacggcccggagcgtttgaggagcttaaataggggtagcgccttctctcccagcctcgatatgaaccgacttagggcggccatgcagccagtgacgcattgcacatccctaagcttgctgggggggcgcatccgctctatagctcgtatcttctcggggttggcctcgatgcctcgggcagagaccaagaacccgagaagcttgcccgcaggcacgccgaacacgcacttgtcggggttcagctttatgcgggcggagcggagactttcgaaagtttccgcaagatccgagagtaaggtctcttggttgcgcgtcttcacaaccaagtcatcaacataggcctcaacattacgtcctatttggctacccaaagaaattcgagtagtacgttgaaaagtaggacctgcattctttaacccgaaaggcattgtcgtataacaataagttcctatgggggtaatgaatgcagttttttcctcatcctccctagccatgcgaatctgatgataaccagagtatgcatctagaaaacacaaaaggtcgcaccccgcggtggagtcgacaatctgatctatgcgtggcagggggtaagggtccttaggacatgccttgttaaggtcggtgtagtcgatgcacatccgaagcttgccgttcgccttgggaacgacgaccgggttcgccagccactccggatggatgacctcacggatgaatccggcctccagaagtcgcgccacctcctcgcggatgaaggcttgacgttccggggcctgccgccgcactttctgccggaccggccttgcgcccggccgcacggcgagacggtgctcaatcacctccctggggaccccgggcatgtccgccggtctccaggcgaagacgtcggcgtttgcccgcaggaaggagacgagcgcgtcttcctatttgtcgtccagaagaccaccgattcgtgtggtcttggacgggccgtcgcccagggctacctgcttgaccgggacctcgtcgcacgtgatcatccgctgcctcggggcggctgggacggaggtgctgagcctctcgtcgccacccgcggacttggacgccgcggcgaggtggtccgcgcgctgctccatacaagcaagcgcgactttgaggtcgccatggacagtgatggggccaccggggcccgacatcttcatctggagataggcgtagtggaccgccgccatgaacttcaccaacgcgggcctccccaggaccgcgttgtagggcagactgaggtccgccacatcgaagttcacccgctccgtgcggaagttggcggatccaccgaaggtgaccgggaggtcgatatgacctagcggccaagtgtgccccggcgtcacaccgatgatcggctgggacggccggagcaccatccccggagccttgatggcatcaaaggctgcgggggaaaggatgttgagggctgcacccccgtctatgaggacacgccccaacttcacattgcaaacggtgggggaaaccaccatcgcgatctgtcctccccgggcaatgcacggcaggtggtcggtctggtcgaaagtgggggtaacctccgaccaccgcgcccaccgcgtcgcctcatgggtaggggccgcggccagaagctctcgcttcatggccttgaggctccggcgagaagcgtgagcgcacgctcccccatcgacggtggcgacggtggcctcaggctcctggaaccccaggtcatcgtcgccatcgtcgacgtcctcggcggtggccttctgcttggcctcacctcgccggttgccggcgggagccgccggggccttgccctcacggcgctcctgcctcctctcctcctcccacttcctcgtccgctcagccaaacttttgaccgcgcggcagtccgcgaggtcgtggagggaggtgttgtgcacagaacaccacttgccggtcgggcgctccctgctgggagcgccggcctccttctttttgtcgctcgcaggcctcccctttcgggtggcccgcgaagcgccctcgacggcgaggacgtgaccctcgtcgtcggaatgggccaacctcttcttcctcctcctgtcccgccgccctgaccgagcggcggacccgggggcggccggagctgccacaccggaaccggaggagttccaggtccaggcctcctccttgcgagccacacggtccgcgagctgaaaaagctccgcggtggtctggggctccttggaggcgatcttctcgagcatgcggttgtgccgcacgccccccctgaacgcgtagatcaccgcgtgagcggggatgcatggtatggtgttgcggacttgacagaaccgctgaatgtatgagcgaagagactcatcgtcccttcgctgtaccgcatgcaagtccgcttcttcacctgggcgcggatatgtgccctggaagttcatggtgaactgctggcacaaatcctcccaagagtggaccgacgcgggtggcaagttcattagccaaccccgcgcctgacctttcagggccatggggaagaaattcgccatgaccctgtcgtcacccccggcggcctcgatcccggtcgtgtagatctggagaaactcggcggggttgacgcttccgtcgtatttttcggtgatggtgggccggaaccttgggggccaacggacgttccgaaggctcgccacaaaggctcgacagccggcactgccaaccggggacacgggggggctggcccccgtgcccggaccgaagtggcgctccggacgaggaagcgtcctccgttgcgtgggcagcacgacgaccattacgccggcgctcgatattgaggcgggcatccggccccccacgcacatcttcttgggtcggaggcgttgacgagggaatggcggacgaacggcgggtaacggccgccgctcgccgcgccctccgccttgacgacgcggagccggcggtagcagcgccagaggccttggtggcggaggaccgcccgccggtgcctaggcgctgctgcgccgtcatgaccaagtcggccacgtcatccagccaacgtcgggctggagtctctggatcggggacgacaggcgggtgacgcaggagcgcgcccgcagcctggagcgcgccctggggcgtgctgccatcgccatagacgaggagacgacgctccccgtctcgctgtccttctccatcgcccgtgggcggcgaagtcgcggatctttcgaccccctcgagcacctcctcccgcccaagacatcggcgagagggggacggtggagtacgagctcgacgacgcgggttctgctccccgtcgtcaccgctagcgctcggagagaggttgtgcgccactgcccgttcgaccattgggctgagtgggagaagcttggcgcacacgaaagaggatgagggcttagaaagacacacgcgccccctacctggcgcgccagatgacggagcatggggctcctcaccgggagaccgcgcaggcccccctttgccggttcggccgggggcgctaagtgaggttcttagcccttggtatgtggaatgttcgcgagagagcaaatgcacaagacacgggcgatgtagacaggttcgggccgctgagaagcgtaataccctactcctgtgttctgatggatctgtgtgtgaaggagttacaaagagccggagagcaagagagttcaaactctcgaacccctctcttctggttctggcctcccatcctcggtgggcaaggtcctccttttatatctcaaggggataccacatgcaccacttctacctactctttttttgggtggggacccaccctatcttgaccaaaacttggctcgcatcttcgcctaaaagctaaatgatagcttgtccttgagtgaggcccagcgccgtcactcgcccgacacaggggatcaccctgtcattccttcattaatgggcagagatttgcaatggccactgtccgaatgaccctccgatgggatgggtcatacctacctccactccgccggaagcagatgcaacgtgggagcacggttgcctgccgatgacgtgaccggcgtgagaccagtcacagaccggtcattcttgtccaccacgcgtcagtttagcatgccgcacgtctgcccttcttcatacaatgacttccttgtaatggttgcgatgaagcctggtatgaatctagccgggactgacgtgctaactccaggagttagcacaccggctccggctagggacgagtgcctagaggctctcatcattccgacgggacggggcgaggcgtgtgacaggccgcctgttgccacctaacccgcgatctgaccggtctgtgaccggtcacacactgcgaccggtcacggaccggataagcgtgcgctgcgctgcattaaatgcggcgtggcgcgctcgtccatcccgcaataaatgcggttaggtgagtgccgctgtgctcacctaacccacacacgtggcgccaataccacagggggtcggggcgccccagccctcggggccgaaacgggagcagcccgacccctcggggagacagagggaggggaggccacgtcaccctcgggcccgacccccccccccccccccgagggggtcaggccacatggttgaccgcggctgcccaagcctctagtcacgatactctcggtcccatgtcaccgacaatgtggtatccattaccatggtagtagcccccgacttcaactcaaatgaatccacgttttatccgttagcgttgtcatgctcacttggtcgttcttgacaacaattgagaagacgtgtagtactcaatatcattgaaaaaaattaacggtccacaagtgaatttgaattgaagtctacacaactaccataaacgggcctgaaatcaacgcaaatgaacgagttgatgttctcgaccgaaaaccttggaataacaatgtcgttctcgcttgatcattctcggacgagcgagaatgtacggagtatatgactaagtcttatgtcttaccgtaatcgagaatttgggttgaactcaagaattttcatctcggcgggtacaccatcggttcattccgtagtctttgtcgaactccaccaaccgttctcgagtaatcgagtagtcgtccaaccgttctcgagtaatcgagtagttgtccaaccgttctcgagtaatcaattacttatagaatctacgacaaagccctgaaatatgactttcctgaaatcaatacttagaacagattgttagatacaaatagttcccgagcgaacgctcaagggtaacacaatataatataaatttaaaaattgaaaataaattgaatttgcacatgccaataaaagaactgagaatttgctcaaagtttaccagtctgagaatttgttgagcagtgatgcacatgaactgagctataatgaacttggaccaaattgctccttaggtttgcacaagccaatctcttttcttttgaaattccctgtcgaccttctttgtacgcaagaaatttcatactaaaaaccatcatgaaaattcatgttttagaatagcaattttttgttgcaaaatttcctctttattctataattttagttagttattaggatcaccttcttccttttgataacttcaatattttggatttactatccctattgcttacttggcaggtaacagttcagtggttccgaatcatgacgg

SEQ ID NO: 7088 - DNA, 1552 bp, Oryza sativa
gggtgtgggtagggggagtacactggtaagtacggcgcacgctagctgggggagcgcggcccactgggagtgctggcaaacccgcgggagctgtgggaggacaggtggctggcgtggcagaggctgcctgagtcccaagagacagtgtcaactgaggtgacaccctcctcggccagacgggcctccagagcggcgtaacggctgtcaagggagcggtaagcctcaaggagtaggtcgtgctgagtggactgagcctccgaaagctcaaccatgcgagtcagcactggctgagactcgctgtacggacaagggtacctggcgtctgcgtggccagaaggaaggcgtggaagctgccggaaggctgagcccccgagacggtggctgtagtcgtgggccaagcgacgaagcgcagtccaggagaggtcctggtacgcgatctggagagtgggcctggccacagtgaagtggtgtgggcgaaggccaactccgtgtatacctccacgagggtaaaggtacacagagagctcacagtgagggggaacacggtccacggagtaccccgtgtactcggggcacgagaagccaaggaagcgggcgaggtcacgaagctgagcgacgtggtgaccctcaccaaaaccgtgggaactgaagcaaactattgaaagagggagccatctacaattttgaaagagggagaaaagatcagtaaccattttagaaacaaactattgaaaataaggaaaccaaaagaagccttagcttttcgcaagtagttttgaacttagtatccttagggtcgtcctaaatgtcgggtttcgccctagggccaagcctgtgctcttataccatctcttgtcacgccccgaactagtaccgaccggaactagcccgtgacgctctaaattaacctgttaatcgataccagtcccaggaaacggtgctggtatcacaggaagacggattatcacagcaacagaggtctctttattatagagtagaggtacagtcatgttgggctgtggacagatcccgagctcacaactgcattacaaaagggaagcggaagccaagacatggaccaaacaacacaggcgcgacttgggaactaggccgaaaccctaaaactcatcgtagccggcttgctcctcgaagaactcctcatcagcaggatccgcttcatcttcttcagcaactggggggggggggattatttatatagagcaagggtgagtacgggagtactcagcaagccatgggaaataagtgtttaatgcaggcttcaaggaaaggctgttgtttttgcaattgattttatttgaactcttttctaaaaacgactaagtgagtgcttctcaaacgacacggatgagacagtgcatctcgtccggtcggagtatgtgcaatgcatcagtctttagaattgaaacaaggttggcacccggccaacagcttttcaacggccacccgggccaacaacttttcaaacggccacccgggcctagctgatcccatcagctacagatttttcaaacatcgaaccccttttcagcaa

SEQ ID NO: 7089 - DNA, 19609 bp, Oryza sativa
gtttttgctatctctctttttttaaaaaaaagataatattgtagttctggttagctggaagtctgtttttagattttcatttagtgcaaatgtatatgtatattttttaaaaagttgttttataacactacaattataacaacttttatgttggtggagttgtaatttatgttgtgattgtcttaaaacgccattgcaatattggccataaactttatattatgtatagtaggatgttttcttcatgcgtgcttgtaatatactccatccgtttcacaatgtaaggctttctagcattgcccatatacatataggtgttaatgaatctagacacatacatgtgtctaaatgaatgtgagcaatgctagaaagtcttacattgtgaaatggaggaagtagtaaggctctcctattatttttgctccttttatcgttagattggcttatggcttcttccttgcttgttaattttccataacctcaagtagactgggttatttatttatatctaccactaagaggaggaggcagggcgaggagaaagatgtgttggccgtaaggaagagggagtaaaaggtgaagtagtctatcgtccttggaggcagtgccgtggacagcgtgatgacgataagatgaggcggtttgcagcttttttgttttcacaacaggggcgtgggagagtaggagcccaggcctatttgtgaaagaaggtttgcaacatctccataaaaatggaatggctcatgcatatttgtttcatgacgtgacacgataattttgcaagaaactttagtgattcagtgttctagataagatagctaaaactaagccaactattgttttatagcgtccgtgtaaaacaatcttctcacctctaaaatcagatatccaacacccctaagctattcaaactattcaatttaccccatgtttaaagtagctgtgtttgcctatatatcattgacgtggtgaaaaagtctaccacatcggctaacatcaatgtttggcgatgccacaaacaaagttatgagatagtaagaagtaaagaatgtcatatttgaaaacaaaaatgaaagaatatgctatatggaccgcaccataaaaacacagttctgagtttgtactcttcatatatcttttactaaaggacacaagctgacttttataacagaatttttactaggatgaatgagccaaagtggacacaagatcttgcctgccatccacatgaaaaacaaaactattcctcttcttcttcttggattaaaagatgatggatgggcccaggaaagaaacctggcctagaaagggccggccgggaccggagcatccgatctcctgtcaaaaccgacgcccatcatgatccatgaacaatgctaccctaatcaatcaacatgcatatgcaagcatggctaatggtcccacggagagatcgatcaccaacccgaccggctgaccccacatccatgcatgcaatgatgcaaatcagcatatacatgaatacatccgtccatgcggttgagctaacaaaatgatgaaacgagatgatcgccagattaatccattgtttacatgcagccaaagtacaatgacagttgacaaccttcaatctgcaggcaataatttacacttttcttttaaataaaccttttttttcctcttagaaattaaaccgaagctgtgagcaagagcacatcatggtcagttcttggaagtcttttgtttgacacacacttgaattgctcccattttttcccaaccaatttgccacctaccatgcctatctgcacgcacccgtcgcgcggtttattagcctcttttctcctgcgaatcacggcgagctgatcagcgattaggcgaagcaaacgtaccaaattataatgggtgacgcccagcggcggcagcttctcctcgtcgccctcatgctcgccgccgccgcagaccactcgctggccggcttcttcggcggcgcgccgccggcgtctggtcccgccgccgccccgccgacaacgacgaggtacgttagagagacatagtatcgttaattactggaaaggttaaagccggcgatttcgttggtcgatcgttctggctaattctgatgttcttttcttgtttcttttggctgatcgatgatgcagaagtgcagccggacgtgcgagtcggagcactgcctgggcacgtatgcacgtacgtacgtatatatataccactctccctggccgatcgataattataatttgtcagtttctcttgctgtaatttgtgttgtgagcaagtgttaattgttgtgaaatttgcgtgttgcgtgtgcagaggcgccgttgatgcggtacggcaagtactgcggcgtgtcgtacaccgggtgccccggcgaggccccctgagacgccctcgacgcctgctgcatgctccacgacgcatgtgtccaggccaccgacagtacgtatccacaccaggtttaaactaccaggtaaatgtttggtgtgctcgtttgtatcggggtgggcgaaatactgaaattttgaaaattttggttcgaaattatatgaatttttgaataaaatttgacaaattttgaacataatattatcaaattcaaaaataaaaataaaaatttcggccgaaataatatcgtatcaggggttccgatagaaccgaaattttgaaccctgaattccacaccaatctttttcacttatcattttgatcattttgaacatctacacattgggacaaattcaaatccaatataagattagagagagggagcttgtctcctcctttctccctcagcttcctattgtttctccctccctcttttcttctatcaacggtgatccaatagaatagagccggaaaactcgatcgagttctcctgcactcatgttggatccgcacctatcgacatacggtgtaggggtgaaaacggtcacggaaattcccgatcgaccgggcgccgtttccgtttaaggggtaccgtttctaaccgtatcgtttttgactattttttaattttgttttttctaatttcttttcgcatcgtattaatatcgatactaagtagtttaaatgataaatatggtcaattaccggctgatcgagcatcgtttcagaagagatgctaccgattccgaccgtttccgatcgttttcacaccctaatacggtgtacactgataacgggatgtgtctgtcgaaattaatgcatgtgtgcagatgactacctcaacatgctgtgcaaccagagcctgctggactgcgtggcggcggtgaggtcgccggcggcgaggatcaggacgttcgaggggaaccagtgcaacgtgacggacgtcgccgacgagatcacgtcgctcgtcgaggccgccgtcttcgccaagaggatcctgcataggccgtagctttaattagctagcttgtagccgccacatgtaattaattgttgtttttgctaattaagctgctactgtgcatgttgtctggcatcatagatcgatgcacattgattaattaattccagtcgtccccggatgctacaaaaatcgaagctagagagtacacgtaagtgtagttggagttggtgatctccctacacgtgtctagtttgcgtaagcaaggcttttttgttttctcttctttttttttttgtcatatcctcgatcgtcaacttgttcatgcacatcaatctcagatgtgctcgcagttagcacgtgcgtccgaatcatgattctgctcggaattcatttttgtgaaggcccatgagaacggtatttacaagctagtatattttcaaataaaccttttgtctttcgtgtttacaccaagctagcttgcgtgtaaacaagcgtagcatagcaccatgcgtacgtttgattcgaaaaagaagccaaaagtaaaaatggttaattaaatccatataattatagatttgctcgttttgaaaaaataatattactagtcatctatttgaaataatgccatatattacaatcttatatatattcaagatatatcccctcttgcgaagtgagtatacctcaactgattaggttattgtggtgaaaccagcccactcaagtttaaatcagtcgcacctaacggtgcttgtgctagatccgtcaagcccagggcaagttggtcatgctcaacagtaacaccgttgctgctagatcctcaagaacatgcctcgttggttggattattgcgtggtcgtggaatcgttgtcgattgccagcagtgggagatagagaggagagaggggcatggaagaaataagaataaggtaatttcattaaaaaaatttttgataaacacatcaaaaggataataagtagtgacatataactaataggtgtgaaatcatgacgaaatggctccaaatagataaagaataataatatattttttttaaatgtaggaaacttataatgacacttctccaatgaatgtaggaaattttatgttctccatccttggaacaatgtaatagtcaaatgtaatcaacccatgtctgaatcacaaccaagcaaacaaaaaccatctcaaatctgacatatataaatcgatggatatagtgatatggttcaacatctatgctgattaatattatagggataaagtaacatttggtagattattatgtaagttacaatctgcacatcaaactctttaaaccaaaactacatcgaatcaagcattaaattaccataattgtatattaatttattccatccactcctaaggaatactacttcctccatcccttaaaaaaccaacctaggataagatggaatgtttcccatctgaagttagcttttttttttttgacgaagtattgactagtagaaaattataacccattggactatgcaagtcaaaatcaaatcagaatccattggatttctataaatcaaagatcaaatcatacatggttacaagtattaactactgcaataacattcatatcaaaacttcactttgtagcatcaatgcgaaggcattcaaatccaagtcaaaaattaataggggtgtataaccccctgaaaacagtggtagaggtaggaggacgaccagtagcctcgtctcctccaacagttcctttttttatataatcctctaattaattagataattaacctaagcaatgatatattaagctttatctaagacttttaacaaagtattatccatcaaatccttctcaatcctagctccgcctccgcctaaaacgagaactatagcaacatctaaaaacactgtagcaagtactcgtactatagcatccttaataactgacaacgaaccctctgcaacttgcacgtctcagctctcaaccggacaacccccgatccatcaagtacaccgacgaatgcctacgtgcgcagcacggggaaacagtccggttgaacgtgcatgagtgcatcacctcgccccataggtagggcccgtttagttcctgaaaagaaaagtttttttttttgtcacatcggacgtttgaccggatgtcggaaggggttttcggacacgaataaaaaaactaatttcataactcgtatgaaaaccgtgagacgaatcttttaagcctaattaatccgtcattagcaaatgtgggttattgtagcacttatggctaatcatagactaattagactcaaaagattcgtctcacgatttcccctctaactgtgcaattagttttttaatttatctatatttaatactccatacatacgtccaaagattcgatgtgatatttttggcaaaaagtttttgggaaataaatagggccgtagtaggccgggtgaaaacagtcgtgaaaatttccgatcgaccgagagccgtttttaataggaggtaccgttctcaaccatatcatttttagctattgataaattttatgttttttaattttctttttcatcgtattaatattgatgtagattagtttaaatgatatatataatcaattaccaaccgatcaaacatcgttttcgaagagattgtaccgattccgaaccgttttcacccagccgcatcactgcatccgcagttcaccggccaaacccaaccggctgtgttcgttcagtggagttggtaacacattctctccacacgaaaaacagagcgacgtattttcttatgattaattaagtattattattttttaaaaaagataaattaatatgatttttaaagcaactaggaaggtagcccgcgcatatgcgcgggcatgtgcgtgaaatttactgtgaatgttcatgtgtgggtggtttctataaaaaatattcttttgctttatcataaactaaaaatgaacttatttaacatgctttgagcactggtagtttttaaattgtgaactaaaattactttaaaccgtgtagtttttaatttatgagtgggacatcgaaaaaattagtaattagctgttcaatatctgtgatattattttataatatcaaaaggaattggacagaaaaacaatcacaaaagtatgatttttcccctccctaccaagtctgcctcacattcacctccaacgctgccaccgcacccgcagccggtgaggtggctctctgggggcggggtatcgaggagggcccgtgcgcctaggcccatgggtccgtattgttcccaaactcgtcgccgctgcagcgcgaaggccatgccggcgccgatgctccgccacacaccgcagttaaggggagcacaacgtgggccaccgcctggttcatgttgagcagggcgccgcagagcacatgctattgcagtcggtctcgcagtggcgtgctgtgctaccgtaccctccgctgccgatgtcgtggcgtcgacggcgtcagagctatatgcgagccgcacatggcagaaaggggcaaaatcatactttcgcaattgtttctatctccttttcctttggataacaaaataatatcgtgggtatacaggcagcttattaccattttttgcagtgtcttgtggcagatatacattcttgtagtgtctcccagctaatcacacgtttttttaatgtcccgtagaaatttttgcctttattaagtggaggcctcaatatgcatgtgggtccataatgtaattttttgttagcaattaaatatagtcaatatgggtattaagttattgatttgacttaaaaaaaaaagttggctagacctaataggtggagatttgtttgtggtcttttctttgcccataaaaataattttaattttaattatcatagagataggaaaaacaaagaaaagtaaggaaaaatagagagggtttggatgttttctttattaaaaaaagagtgatctgatgacctaaaataatgtgttaatgtttaagtaaaaaaaaccgatggttggaatttttttttaatttaagtgagacaagtaacagcttagcaaaacgttcatgtactttaatgcccatagggatgagaggaagggaatatggtttgggatgatttttttttaaaaaaagatcgaataacgatgtaaaataatgtgtctattgatttaagtgaaaaccaatggatgaatgtttctctaatttaagagtgtcacacaatagtttagaaatgtttataagatgtttaaaggactttaatgcctatttgtgatttttttccataaagacaattttaattttaattgtgatagggatataaaaagagaaaggaacagaaggagcgtacaaattgatcagtatgtgcgtggtgcacgatatgcggacgtgggaggtttttgtttttaagatatatctaacgatctagatccaccgatttaaataaaaatcgaatgtaagatttttttttattttattagggttccatgtggcgacttgggattacttgtattttggggggtgtttttacgagcaatacttacgagaatgggagattaaaagaagggagttttttaaatagatataatctaccagttgaaaataacgggtatgtgaaaatcaagactacatgttttgcttttatcttagaatttataggaatttcttttatttattatagtgccacatgacggcttaatagtatttgtagaaagtttaattaacttttagtatataatagataatatatagattttatatacaagatatagtttaactgcatatatttatagagtactatattttatttttaaatagtagaaaatcctattttaaagcccatcgattttttttcaatgacactacgatgtatgctttttgtttctttactttatcgcttttatcgtataagtccgtacataggtttttcttgaacgtattattcatcgtttttcctttagatgtatgtagaacagttttttttcctaattccggcccacaggaggtgacggagcgtggggctcctcaccgggagaccgcccaggccccctttgccggttcggccgggggcgctaagtgaggttcttcaccctcgatctgtggaatgttcgcgagagagcaaatgcacaagacacgggcgatgtagacaggttcgggccgctgagaagcgtaataccctactcctgtattctggtggatctgtgtgtgaaggagttacagagagccggagagcaagagagttcaggctctagaacccctcttcctctttctctcctctatgagctcaggtattctccgagtcgtcccccctttctcttctccgtcctttacttcggtgggcaaggtcctccttttatatctcaaggggataccacatgcaccacttctacctactcttcttttgggtggggactcaccctatcttgacccaaacttggctcgcgccttcgcctggaagctaaatcacagctagtccttgagtaaggcccagtgccgtcactcgcctgacacaggggataaccctgtcattccttcattaatgggtggagatttgcaatggccgctgtccgaatgaccctccgatgggatgggtcatacctacctccactccgccggaagcagatgcaacgtgggagcacggttgtctgcctatgacgtgaccggcgtcagaccagtcacagaccggtcactcttgtccaccgcgcgtcagtttagcatgccgcacgtctgcccttcttcatacaatgacttccttgctatggttgcgatgaagcctggaacgaatctggccgggactgacataccaactccaggagttagcacgccggctccggctagggacgagtgcctggaggctctcatcaatccgacgggacggggcgaggcgtgtgacaggccgcctgttgccacctaacccgcgatctgaccggtctgtgaccggtcacacactgcgaccggtcacggaccggataagcgtgcgctgcgctgcattaaatgcggcgtggcgcgctcgtccaacccgcaataaatgcggttaggtgggccccgctgtgcttacctaacccatacacgtggcgccaaaaccacagggggtcggggcgccccagccctcggggccgaaacgggagctgcccgacccctcggggagacagagggaggggaggccacgtcaccctcgggcccgacccccccgagggggtcaggccacgtgggtgaccgcggctacccaagcctctagtcacgataccctcggccccatgtcaccgacagtagcccccggcgttacgccagggcgattgccccttcgtgggaagcgctcgggcgtgacgccactccttaggcccagtgacaggtggggccggtccctacaggcgggtaggaacccagcggtcgcaagtcgcgcgcatcggcaagggaaaaccgaccgacaataatgagcggcctctttaagaccgctacatcactcaagcagcgcgcgaatcgggacgagccggttcgtttcgcctggagacgtgatgatggcgcttttcacgtttggcgtgcgtgtttaatgcgcgcacgatctgtcccatctcaactgctacggccgcacatctgcctcgtgcgccgcaaacgggcgagttgggttagtggaggcgtgggcgcgagaaacgagggggcgaggtagtgggcgcgggaaacgaggagccgggaatagcgttggcaagggtataaagacgccgaggaagagatttgtttccttcctctcgccattcttccccttgccttcgccacttgagctctaactcttcgtttcctgtgccctacccttgccgcactcactcgctctcaagctcctcctccgccggcatcatggcacggggctccgcaccgctcgacggtagcgtgctgccgccttcccgcatcgtgagcgagaggcaggccgggctgccgcgccgattcatgccggaatctgccaccggccgggaggtggtcgcgctgggcgagggacgcccgacgccacactacctggggcggtccgtcttcttcctctctttcgcaatggcagggctggtcccgccattctcttcttttttcatggatattctggagttttatgatctccagatggcgcacctcacccccaacgcggtaatgacgttggccatcttcgcgcacctgtgcgagatgttcatcggggtgcgcccatctctctggctgttccggtggttcttcaccgtacagccggtgtcgccgccgtcggtagttggtggctgctacttccagccgcgggggcaggtgctgcaccgctacattccctgcgtcctccgcaaaaagtgggacgactggaagagcgattggttctacacccccctcgccgacgaagcgcgcctccgacttccgagccagcccccggcgcaggcctccagctggcgggcgacggtagatctgggaaacggctacgacgccgttcttgaccgcctggcgggtctgcgatcccaggggcttacgggggccatggtgttcggcgactaccttcgtcgccggatcgcgccgctccaacggcgcgcccggggcgcctgggagtacaccgggcccgaggactccatgaggacccatcaggggcgcaagtgggactgggtccctgaagacttcaagatggtggtccaacgggtgctgaatctcagctccgtggaggcatccctcatcccccaaggtgtcctccccctctgctgcgattcagagcgcgccaacatcctgaccacatgcaggcggtcggggcgtcgggggagcgggctcctcgaggccacgatggcgcgggcgggagccgtaggggggaacaatctaccccgggagggggtcgtgcttctgggccccgcgacgggggcccggggggcagccgccttgccgacgcccgggggaagaggaagcaggagggtaccccttccccatctcctccccgagggggcggggcggtgcgtgccggcagcaggcgcccggagggtgccgtgctgtcacgtcctgataaattcatcccaaaataaaaattattttctaaaaggaataatagaattaattaaaattcgaaaagaaattggcaaacactaaaatgcgtacaagaaaaattcgaatgtggcccggggaatttttgttaaattctccttggtctaaaaggagccctcaaattttacttgaattttcagagcaccggaaataattattaagcaacaaaaacaattattagagtttattaaaaagaaaaacctaaaaataatctctctccccccctttaggccaagtctggcccaaagtcctcattctctcccctcggaccacggcagaagtctccctctcctccctctccttctctccctcctcctcttgggcccctcttccccttccggcccactccctcctcctccctctttctcccaggccgcctccccctcctctcctcctgggccggccgcccggcccaagccgcgcccaagccaggccgagccgagccggccgtgcacacgcgcaccgagcgtgcgctgaccgcgcgtccggccgcgtggggcccgcgcgtcaggcgggtcatcgtcctcctcccggccggctgtcctctctccctctcccgtaacccagcgccattcctccctcaaatccgcgcgattcaagcatgggattcccaaattgattagggggaattaaacccctttccctcctctctctttcccccttaattcccccttgaatggcgcccccaatcgccgggaacggacgcgccaagtccggccgccttcctttgccgccgaccgccattcccgtcgccgttccgccctctcccgtgctcggctcgcttccctccgctataaaatgcaaccccctcgctccgttctatcgttttagccccctcccgtgatctcccgtggtccctagccctctccccgccatcctcctctctctcccgtgccgccggccgcctccagccgcctctccctcctcaccggagcgtcgtccggtcgcgccgtcgcctcctccagcatcgcagctgcctccccttccccggcttgccctccgtttcccgcggagacccccggagctgcgttcccgccgtcgcccttccctttcctccgcgtcggccgccttcagccgcctctatctccctgcctgagcgccggtcgacgtcgccaccacctccctcggctccgcgacgccgccctcatccccggcatcacctcctcctcgcccgaatttcgccggaacaccgtcgcccgcgccggcttctccttcctcctcggcggcatctcctccggctgcccctttcgccatgcccgtgcgtcagccggcgctgccgtcccctccctcggcacggtgacgtagccctccacctcgtccacccctcggtttcgcccggaagccgccgcacatcgccgcgaacctctccatccgcctcgccggagttgttcggccgcccgtccctcctcgcccgtgcaccggtcggtcacacctacaccacctacggcatcgcagcggcaaggtcgtcctcggcatcgtttcccctccatccaaacccctccggggtccatcagcgtcgtctccgatcgttctcgtcgtcgacgtcccatcggtcgcccggctcgtcgtctcgcggcgccgcctccgtcgtcggcatcgcagcggcgtggtccgcgccatcctcgactacgtgcagccgctgacggcagccctcatcgcctactcgccggccccggacgatgtcgacgtagacgtcctctcgtcgcttccggtcgacgtggcgttcagccctccgacaggccgctctcgtacgtctagtgcgcgtccgacaagtgtgccgctgcagccccgtcatcgtcttcgtcctcggctccgcgtcgtcaagcctcgtgccggccgagtctcgccttcgtccaaggatggctgccgaagccgtcccctcgccgttcgtcttcgttgtgcccgtctgtctccgccgcgcccgttcgtcgttgtcgttcccacgcctcgtcgcgtggtggtaaggttccctctccctcgctgccccgtcctcgtcctttcggtgtcccccgtacccgttgtgcggttgtcgaccccggtacccgtgtaccggtgtcggtagtcgttcgcttgtacgtgtggtgaccgtgttagtgtgcccgctcggtagccgcgtggtttccacgtgtgcagcccgtgtggtgtctagtggagtccgtttgtcggccactcgcctcggttgacacacggggtccgcttccgtcgacccgtggaccgtctctgtgtacccggtctaccgcggtcctttaggttgacatgtggggtccgcatgtcaacggcgcagccttcctgtcttttccaggctagcgcttacacctgttttatagttgcaaaacctaattacaataatccgcaaatctccatataacagcattaaacttcggatgatcatatcttggtcatacgagctccgaatcgacccgttcaagtctcttaatgtttgttataacctaaagaactgtgtgctttctttttatgtgttgttattgcttctttttaggcttgtagctttgcttgtgtgcttcgcgtagtcttcgtcgttccggaggttcccgaagcgtggttcgcggccgtcgccgaaggttcggaaggccgttctctctgagcaaggcaagtcacatcatccttgagcatattgaatcccagtttataaaattattttgatttaaattaatgcattatcgctttatttaaattcccgcgttatcactgttttatttagccatgcctatttacctttgttaagaccttattattgctattgttattattaccttgttcaccctaggaaaacaaaaccccaactagtgggtactctattcatggttccactagtatgaatttaggtagatgcttcgctgattaattaggcaacattaggtgattttataactttagactttgggaattctcatatcatttggacactatggaatggttggcttatggtggaattggacatacccctctcttcctctttcaaagcccctaaaacctgtttttcggtggggtttgggtgcatgccagttgtgggaagtagcaccccggccactataaggattaagctcgggcctctgttgcaaagcactaccgtacttccacatgtctagtgggtaaggcttagtttgtggctcagtctggttataaacaaaagtacacggattggagatggatgaagtcgggggtcgatggacattctccagggcaaatgaaggctacacgagctgcggcccggtagtcgagatgtcatggcacagggctggtgtcctgctgctagggggctcaatcctgcctgcctgtcccgggggttccggtcgtaggtggggttgggtcggtactcttgtttatggctaggatgggttgggaactatgtcacgtcttccgtccgtataccgtggtggtatgtggcacgtggttacacgtgaggaaaatgtgtcttgtgggtaaagatgtacacctctgatcagagtaaaacctattcgaatagccgcgccctcggttatgggcaagccgagcaatgtacccaagttagtgttttaattcttaaaatttgctcaacaactaaaatgtggaatggttggcctgggttggcttgggacgagctgggacccagggtcgggttgccagttcggtctgaatcatcgtaggccttgggttaaggcaggttcgtgagggttcacggccttgattaataatattgtatagctctaggatcgtctttacaaaatagctttgggcaactaagtgacttttaaatgctgttttctgcaaaacttaacccctatattattaccccttgtacccccttgcattaatcatgcatctgccggtgtggcttgctgagtactgtggttgtactcattcttgctcaatctttcccccccttcagtaagagaagctttggagaagaagtcttaggtggagtcctggcttataccccagttgagcgcctgtgaagatagagccgtaggcccgttagtccgctgctgtttattttttattgtcaggccttaagtgcctttgtaataatgtaaatattatcgatataataaagatgtgccttttgtaccatatttgtgtggtgtaccccggcttttcctgggacggggattaatacactagcgttcgggaaaatgtatttttctcggtcgcgacaagctggtatcagagccatctcgactgtaggataagccaagtggataaaacctaaggacatattttataaatgaaactatttgcgaaagcccctttttcctcctttcccctgtgctatttgcaaaatatttactccttccttcttcaaatttcaactagtactagatggttagttttgcgaagaagaagatgtcgccaattgtttgccgaagctccggaagactgcaggatctgctagcgaagtggaggaagcagtgaagatcttggagaacccgtcgcagaacctaagccaccctctagggtagaatcgttagttgtgtgtttccttgcttgtgtgtgtagcgcgtggtttgcatcagtgggttgtgatgtaaccgcgctaggttgtttgcttaatcaacttgcagaataagcaaaacaaacaacacatcaacaaaaagagttagttcctttaaggtcttgcccctagttctggtctattctttccttatatgctccccctctcaacctctaccttgtgacagatggataacactggtaacaaaggctatgggaatgatggatccgatgactcaagaacccaagccaatgggaatgagaaaagcatcaacgaaacctcatcagtgctaatccaaattgtggttaaccaaaccaacatgttggcaacagcctttcaactattacagaattggaacaacccagcaggggcaaccaacgttcaagtacctacagtccagcaacaatgcaagttatcagaatttctcaaaactgagcctccaacctttgccattgccgtcgatcctatggaagccagtgattggttgcgcacagtcgagaagaagctagggttgattcagtgcaccgaccaggagcgggttggcttcgcaactcatcagttggttggaccggcttcagagtggtgggatagctacgaagcatcacggccagaaggacataccatcacctgggacgagttttcatctgtattcaagagatcacatgttcccgtaggaatgatcacactaagaaaacgagagtttcgctacctgaagcaaggagatttgaccgtcacagagtacctgcacgagttctatcgtttggctcactatgcaccagaagatgtggaaacggatgaagacaaacaagagaagtttctccaggggttaaaagatgagcttgcagtgcaactactcctagaggattatgaagattttgagaaacttgtggacaaagccatgcaactcgaaagtgagcataatcggatgacgaactgcaagagaaggattgccaacgtcccagtatttccatgtggtaaccaaagacagcgcactgagccacttcagatcaccggagcttctgttgcgcatcaagagttcctaccccaagaagatggacacattgcagacaacaacattagcaatactaatgctgatgataccaccaacaaccatggttcttgccccattcatgaccacttagatcaagcgtgcaatgtcaacagcattcaccaagatatcgacgatagtatcaatgaaggcacccagaatgacaaccctagcaattttgacactgagaaagactccaatggtgatagcaactatggtaccactgatgccaatattagcaaggatttccaaccaccaattccaactccaagtcagaatgatcgttcctagatggacaactcagtaaagaagacattgatttgttacaactgcaaagaactaggtcatttctccagagattgtccacagccgaagcgtaacctgcgtcatcactctggccattatgcaagaagaagacaagtcactcgccttgtggtcactggagcaaacgccatacctttgaggcctcgtgtcaatcataacccatagtagaaacaatgtaccgatgttaagcatcttccctttttgtttaaggtagtgccttgtattcatgtaataagggagaaatgtgtaatacagacaagtcctattaggattcttttggaagatgtggatatgggattatgtgtgtaattgtttactgacaaaggagaaatagggtctcatttcagaggaactatattctaaccttgagttaataaccaacctgatgatggaaaagaaaatcaagcgattaaccaaagagacatttgtttggactaggagtttcagatgtgtcttattcggatcaaaggcaacgacagtcagcacagcttttgacgaactacttcaaggtttcaccgaaaggcagtaggccaaaggacctcatcgccaccagaagtgtccgctacccaccttaaagagtaccacctgttagagatagcccgaaagatgattgatcaaagagattggcaaagatgttctctagcaggaaaagaagtaggccgaaaggtgattgataaaggataaatagaaacatgctttgcatcgctcgaggaagacctctgatcaccctgcaacagtcaccttgacattgaggaaaaaaaaaatttatgagtaagcaagatgacctaggtaaaagtgtttctatgaaagcaaggagtgaaatcttcaactcggtatcagatgctacacggagtgaaaagtgcaggcaccggttaccaggcaatgccatgtcttggaagatgatccaatgggaaggaactcatcaaggtcgaaggtgtaaaggaagacgttgaatgctaaaagatgacaacatgaagagaatagtggaaagtaaactgaacataaagaaagtgaatccgagttgtttgttcgtgagagctattcccagttatgaaccaagtgatatgttcgaagataatctacagatgttagattaaaatcacatctaacaacgaagcttcagatttggcaggatcacgatcagaccataactagtccaacagtaaagccatttgggaagacgtcaaagcacgtcaagtgggataagttggttctgttgagaaacataattcaaaggcaaagttatcgacccttgcatcaaatagcagaagtagctagcacccggagaccaggaaagctaatatgaggcagttggtggcaagttagaagtaaatgacaaacatggtatcctagtaatgacaagctagtgttgacgcatgacatgaattggtaacttgtatgaggttgactccaaagatatgagttataagaagttctggaactgaagccccatccttcaatgccgcagcccagtcgaagtcagctagaggtgcaaccagggaaaagtcaggtgaagagaagattccatctgcaacaggagatcgagccaagcggtccagagtggagaagttgtgctaggcaagtttgttatagaagacggagcggaagaagtcaggcaagaagagaagaccacccaacctatcttcttgctagcctcctcgaatctcggggacgagattcttgtaagggggtggatttgtcacgtcctgataaattcatcccgaaataaaaatcattttctaaaaggaataatagaattaattaaaattcgaaaagaatttggcaaacattaaaatacgtacaagaaaaattcaaatgtggcccggagaatttttgttaaattctccttggtctaaaaggagccctcaaattttagtggaattttcagagcacatataataattgttaagaaataaacaaagttaaaatgattttataaaaagaaaaactctaaaaagtcccctttccctccctctccctcttgggccggctcggcccatctccctccccctctctcctctcccccgcggcccatccggcctctccccgcgcgcgcgccgctgacgggcgggcccgcccgccaccctcgctgacgggtggggcccacccgtcatccccttcctcccgccgctcccgccgcctcgcccgcgccctagcgccgccgccgccgagaatcccgccggcttcccgccgtccccgcgcgcaataaagtggggggaattattccccgggatcccctccccctttccccccatttttccctctctctctccctcggattcgtttggaaacccctcccctaaccttgccggcgccattaatggcggccgggtctcccgcgcccactttcccctc

SEQ ID NO: 7090 - DNA, 6240 bp, Oryza sativa
tcccgcttagattaatccaggtttcatcgcacccattcaaggaagtcattgtatgaaaaaggcaaaacgtgcggcatgataaactgacgcgtggtgaacaagaatgcccggtttgtgactggtctcacgccggtcacgtcatcggcaggcacccgtgctcccacgttgcatctgcttccggcggagtgaaggtaggtatgacccatcccatcggagggtcattcggacagtggccattgcaaatctctgcccattaatgaaggaatgacagggtgatcccctgtgtcgggcgagtgacggcgctgggcctcactcaaggacaagctatcatttagcttccaggcgaagatgcgagccaagttttggtcaagatagggtgggtccccaccaaaaaaaagagtaggtagaagtggtgcatgtggtatccccttgagatataaaaggaggaccttgcccaccgaggatgggaggccagaaccagaagagaggggttcgagagtttgaactctcttgctctccggctctttgtaactccttcacacacagatccatcagaacacaggagtagggtattatgcttctcagcggcccgaacctgtctacatcgcccgtgtcttgtgcatttgctctctcgcgaacattccacagaccaagggctaagaacctcacttagcgcccccagccgaactggcaaaggggggcctgcgcggtctcccggtgaggagcgccatgctccgtcacacatacccaatagtaatcgactaagctcggcggggcccaccataataccaattcttatacggaatcatacctcgtactccctccgtactcgtaaagaaattcgttttggacagcgacacggtctccaaaacacaactttaacttcttgtttctataaaaatatttattgaaaagtgatatatgtatacttttataaaagtatttttcaagacaaatttattcatataacttttacattttcaaactcaacaacttgagagttattcataatttatattttcaaggtttgatttaaacattgtcctaaatgacttcctttatgagtatgaagggagtatatagaaggagttcaggataaggaaggacaggtagagttctatatggaaacgacaaggactactcggattgtatccatattggctccctagttctagttggacaaagggatgtctatggatataaatacaaggccccctaggaggatagaggacacaataagacacgacagatccacacacaagccagaacaaaccaatacgccaaacatcaacatcagagataagcctagacagacccaatccagtgcctacgaaggccaacaagagggatctagtgctatctctgatctcgatgagttcgtactcgaggaggaagactactctgtcgtcgactacgtgttggttatctatgccgccaagtcgatggcagttagataggttatcccaattattgtacttgtgtgatccagatgaataaagagcaacaccggctccggccaacaggagtagggctattacctgtcagataaagagtccgaacctgtataaaaatccttgtctccatctcttttatttcaatctcgcatataccctggtaccaataatctccatatcatgcaaataccgtagttgtgacctcctgttgacaacagctcaagacagagttcagaagcaatctcaagcttgaagcgttgtgattcaggtggggtgtttagatatttgttagtgtttttgcatgagaaatgaaactattcaacatttgtttgtagagtgtcactatgcaaaatttctttggaaagctctacagtttactactggtttatatactcctcatagtatatctcataattttgagaattgtcttgtgggagttgataaaaaaatctaccaaacttattcttgttggagcatccgctatatgttgggctatatggttgtgtagaaatgatatggtttttgataaatcaccatctatgtcctatatacaagttcttttcaggacaacatactggctccggtcctaggctcaactactaaatggctccggtcctaggctcaactactaaaatgtgatgaagaaatcaagtcagtgaaaactgcatgtcgtaatcttgagtcaatggttatgcagctgttcgctaactatgaatggagattcacaaatagaattcaataatttttgtgatctttttatgttgtgtgagtttttattagtttgtgtgtacttttgtttattcaggtgtgagtttttgttgaattggtgtaataattggctgtatctctttgagcaaaggtcgggattatattctattattaaaaaaagatatttgttagtgataaggcttagtagttacaatgtaatctagatagcagataagataagatagaatatgttcagagtttgatgtataatattatcaccttgtaaaccacggtaggggtatttcctacctatataaatgaaatcacgggccgggcaccgtttccgccattctttgatatcagatagtaacccaaatcaaaatgaagaaactaaattgctgctatatttacgctaacttctctcaaagacatgttatggcaccctttatacttcaacattagcaaggtattcttgcgaagatcatgatcaagaattcaagatattcaataataaatttatgaggctattttgtttaccaattttactacacccttatttcaaattatagattcgttcgaagtttaacatgtctatctttgaccgctaattttaaaaaatccatgtagtttaacaacatgtaaataatatattgtaaaataaaatataaatcttacgatgttaaactataacaccgtatatcactaattgatggctaaagattagaatatatgatttaaagaagacatagaaagaaaaatgtaatttgaaacagatgaagtatatatatatgaattgtaaaagactcgatcgttcgtaccaggtaccgggacatcaagaatctgcccctgggtgaggtttttgggatcggtgatcccgttgatcttcagcagcgtagattccttgaccccaaacctcgcggcgatcttcgatacgttgtccgcggcacggactttgtaggcaaagtgcgtcacattgttcccctccacctggtcgcagctgcagggaagtgggatccagagctcctgcccgacttccaggaagtcaggattggagatgttgctcgcggcggcgatctcctggtaggtcacgaagtcgtcaaattgagcggcgatataggacatattgtcgtttatctgtatgatgtggaagggctggctctcaggccggttggcaccggcgacgcaggagcagcggaacgggacgataacggtggcgttggtggggatggctgtgtgggacggggtgctcggcgggaggccgttggcgtcgaagaggtcgcggagagtggtggtctcgaagctggagaggagctcgatgtaggtggtggcggcggggggcgtgtagacgatggctgactggcatgttgtcggccaggtgcaggtgaagttagtggccgatgcggacgacgcgaggatgaggaagaggaggaggatagccgccgcggaggaggagaatgatggcaccatggtaacgatagctatgctatatgcaagaggtaattaagtgtttgagatgcccggtaagtttgcggaggtgagcgtttgcttcttcatgagagaggagtgcgcgcggacacaacacgtcaaaaaccatagggcaagtgtaatgtgcctgtggcgggatgaccggtagtagtgtgacgtgtgacggtgggtggcggtcaaaaacaacacaagccgtgttctgcggtttgatgtgtacagaggtcagcctcagaaagatcgagaaaatttgcgatttgttcgtcttttccgtcgtctcatcgagtccattaattctacgatcgaagagccccgatatgattgcttaaatccaagctaaaattttaattttaaaacttacctttgaaatttatttaatatattgtagacaaactttctttttcagcgtaggaatttaaatcacactaacagtacatatataaaaagataataagtcgtaatggtttataataagctttttgataaccgaggtctgatgttaccatccactggacgtctggatctgatggtttttatttcgaaaaattgtttcccaaagtcagtggtcaaaatagtgcagcgtgcaatataaaattgaccaacttttcctagactatactttattcatttattggctctagctattaggctgtgttcgataccatgggttgggaacccaaatcctgtgcacggaaaacggagcggtctattagcacgtgattaattatgtattagcaattttttttaaaaatggatcaatatgattttttaagcaactttcgtatagaaactttttacaaaaaacacaccatttagcagtttgaaaagcgtgcgcgcggaatacgagggaaaggggctgggaacctcctcatccgaacgcagcctgtctaattttgactacttttgagttggggctatctatttgtcaagtggctgatttttcttatctatcagtaacttttttagcactagctcaaatcaacaactcacacttcgcatattatttcccatgcggtgaagccaatatatagtgttctaacctaaaggtagaaaatatatattcttaggtgtaaattcttataaatatgaaatatataagtgtagcgcccgttccgtcgtggcgcctaacgggaaaactatctcttaaaaaccctaattgcgaaatttgtatcttcgcttgttgtctagtgtccgtgccatctcagatctcaaatccccgatctatcgtcgagttcaatcccgaatccaaatccttcccaaatcaattcctccgcaaaagtctaatttgcctcccccgggttcgatgggccgaatctctctcggcccatctcctcctccctccccagctctctctctctctctgtccccctccccctccgctccgcccgcgcgccgcgcgcgcgtgcgcgcgagagccgcgccgagcgcccctccctcgctctgcccgcgcgccgttgttcgcgcgcgcccgcgtggtcgtcgcccgcgtcgcgcctgcgctgtctgcgccgcccggccccgctgccctgccgcacctgcagccgctcggccccgcagccagcgcgcgtgcccgagccgcgccgctcaaaccgccgcgccgcccgttgcttcccgcgcgcgcgtgccgtggtggccgaccgcctggtcgccgccgccgtaagcctctgccactcctgcccgcgcctgccgcccgtgtcgtcgcgccgctccaaaccgtcccgccgtcgtcatcgcctcggccccgccactccgcgcgcaagccgccaagggacggaggcagagccctcctccctctgccgcgacgcccccgctcccctcctccttttcccaaagaagcaaggggcgagccccctttctcttcccctttctcctcctttttccctctcgccggcgtcacctcctgtcgccgttttggccgccagccggagcgccagctcgtcacaccgataatcggctgggacggccggagcaccatccccggggccttgatggcgtaaaggctgcgggggaaaggatgttgagggctgctcccccgtctatgaggacacgccccaacttcacattgcaaacggtgggggaaaccaccatcgcgatctgtcctccccgggaaatgcacggcgggtggtcggtctggtcgaagtgagggtaacctccgaccaccgcgcccaccgcgtcgcctcatgggtaggggccgcggccagaagctctcgcttcatggccttgaggctccggcgagaagcgtgagcgcacgctcccccatcgacggtggcgacggtggcctcaggctcctggaaccccaggtcatcgtcgccatcgtcgacgtcctcggcggtggccttctgcttggcctcacctcgccggttgccggcgggagtcgccggggccttgcccacacggcgctcctgcctcctctcctcctcccacttcctcgtccgcttagccaaacttttgaccacacggcagtccgcgaggtcgtggagggaggtgttgtgcacggaacaccacttgccggtcgggcgctccctgctgggagcgccagcctccttctttttgtcgctcgcaggcctcccctttcgggtggcccgcgaagcgccct

SEQ ID NO: 7091 - DNA, 41451 bp, Oryza sativa
caactagtttctgtaggtcaccaggaaaatctgcacggtactggagaaaagcatcaagaaaggtcagtaaaaacgtaacacaatttaaaagaaaagaaggaatctttaagttcaacaggaaaataatacagtgaggttgcacttgcccaagggaaaaacagaggtccataaatgttatgataggcagaattatacagttaccaatctatgatgtaaaaacacttaatcccatgattatagaatgctagttcaaaccaacaacaggagaaggtaggctggacagcatgcagatagtgatttagcaaagaaaaaaaaatcaatctgctttccactgaaactgacaattaaagaacatcgtaagagcgaagagaggtcataaaacataagaataaaggatggagacaatacatagtccatatggcaagtctatattccagtatgaaggactgcagaaagtatactcacgaaaatcaacacatcaggatcaatcactataacaaacagcaaagagtaggatccacaaacctcaaatgcaagaccaagaatttcttgggacaaatggtagaagtcgttgtgaataatggcagctacttgattgatactatcgagttgcttctctagctgcagaagacccaaaaaaaaaagaagaggtgagtgccaaagttcaattagtttgtatcatggctcagtaatagcacctgtaactcttggtggcttgggaaatatggaatcatagaaatgactgtgtttaacggcgtcggtcctaatgtaatgactgtcattatggtggctaatgagtgtggcctttggtgtatgggagcttctttgcttagggagttcctcagtaggtcgctatccccacttgggtgaggtcattgttttgtggtttcatgtaaacttaagtcctgtatgtctgtagggtgagggattgcttctgcttccctccccgtgttctcttgcactcttatgaaatgatacgcaactctcttgtgtattcaagaaaaaaaaatagcgcctgtaacatagaattagtgtaatgtctgggatgcaccaaatagccacacataccaccaccaggagctgcggcatgacagataagtcagccagctccttatattttgcttaggtttatcttcagtccatttgtttcattctcaacttaagagtttgttagacagacttgcgatgtgaggaccaacacagcaacactattatctcatgtaccttttctactctcccaccccctgctgtcggttaggacttagggttccctgtctagggccttgccaactgaagaatagaatatggtatgatctactaaagggaggtttccccataacacaaagcagcaagccagcaattaaattgtttgaacagttttactgtgttgccctaaaaaacagttttactgtgcgttattaaaccatagggatgcaccaaataggaggcacattagctacatgaaacacttgcttaaactaagcatgccatgaccatgtgactacaaagggtgttttactgtagctaaaactaagaattatttcctctacatttacatctattagggtgtagttttagttaaagtagaatacacactgagggaaatcatcaagccatgcatattaaattgaatcttattctactaagttttcctttctccaaaagctaatagtgatataaaagcatatagatccttgctaatagacattcttatatcagcaacatgcaaaaacaaaaagagcaaaacaaacaatcacatgtacacctgaaggcagcaccatacttgcaaacaagaataaataatagtcattaattaacactccaaatataatggacatcaattgatatttctctgtggattatcctaaatggtacagctaaaagccaatccatatgattgaacagcagatgttatcatctctggagctttggttgatttgcatatgtacaaacctgaactggcacaatagccttgtacaagagtaaggcgtccctagcagcatagcataactcctttgcaactcttgcggatgacaaacaagcatcctgcactggttattcaacagcaaaaatggatgtatatcaaatccagacttttttgtttacaatagccaacagcatttgcacagaaatgtgataaggaataacaaaccatgtcaaattagtacaagtactctagataatatatataaacagcagaaagaatgtgggtccaggtataccttcagggctccatgaacaagtttcattaattgaagtgctgatttagatataaaacacttttctggcaggaaaagtaaatcaacaatggaatcttctcgatcatgtgatgcctgaaataacaggcccctttaatatgttttgtacgatgaatttcacactatactgctcagtagtttgcacatgaaaacagggaatcgaccaaagcaactcacaagaggattgtcgtaatcataatgtacaagaagatgtcttgcttttaccaagatctcatttctcttccttacagcgaaatggacttcaacatcatcaacaaattgggtcaacttgccatcccttttttcatgtgaaatgaacatcatattcctaagagtattctcaaattcagttgtacttctcacaacatcttggaactcaattagcttggatgcctcatgaggaacagcctgacacaattgaatgattactccaattaatcaactcttgagcataattttatcaaatgaataaggtaaatgcataccttggagataaaatgtttgataaccaggtcagatattcttgaccaagttaactttgaaaaagactgcatccatgtgatattttctccacaaatggtctcacatacaaacttgattatatctattattcttgagtaaagagctgaaccatctttgtagcccttgaataatagtaaccaattagatgactttccaagacaataagaaatgaatacaacaatcaactttccttagtactcaatgcatttccaagatatcataatcatcactcaagggttcgtgatttcatatatgaaattgtctaattttccatactcaataaagcagccagcagccagaaaaagattttaatctttttctttagaagtaactgcatctttaattttttgaatatgcaacatatatgttgagttaatgccttgaaaataacaggcacatgattgacaatgaccaattagctctggtgaatcaagaaacactacgaaccacttacctgtagttcctctgttggggttacacacaagattgatatagggtattgaggaccacttttctcaagttcttccacagaaactgccacagatatgttgctgatagctggaactaggacatgcttgatcatcaagtctgctagctttgtcattccatagtctacagcatcaattatctgtacataaaggaacatcagaaaatgagaaagtgacttgcttttcaaagctcattgcagcatacaggtcatcaatacaggtagtggagacatggagcttcctactatatcacatatggcttagcctagttattctgcaacatctggagatcaaatgattcagggggctagccttatggggacccaagagaagtaagaaaggttgattccacaaaccacagaatcacctgctacgtttggagggtatgaaaagaataaaacaatagtatcggtacagaagatctaacaaatatgattggtgcaatatgctccttttcaaaggtgcgaggagacaatttcagcactctgaaattatccacctctcccgctggcaaactttaatgctattattgttcagtacttaacaaattgtagagcttaaagacaatattaccatttgatgttccaaatttccatcgaaaactaaataccgtagcacaaaaatatgcacttatgtatttcttattctaaggcaatcgctgaacaccaagataattcctatgatctcctggcaacatttatctgctagatatgttttatggtccaaatttggagctctcacaccaaactgattttctcagtataaacctcacctccaaggcctgcagagccacgcgaagctccacaccaggtgttccaccggacttgcctacaggcgcagtcctcaccatcaccttccctccctccggcgcaaactccacacattcctccaagttcttcgcaagcatcacttgcaactacattatcaccaaaaaatcattatcactgacagttagcacaactgcacaaacacaaatcgtaacaaaacccgaaaccctccggagtagaacccccatcacctcgtcgactagctgctcccagtcgttccggagaagcccgaacacgacgggttcgtcctgactagatccagatccctcgggatccaccaggagaggcttgagctcggcagcggcggcggcggcggcgagggggtcgggtgaggcgcgagcggcacgaagtcgagcggcgaggtcggctaccgaggaggcggcggcgaggtgctcctgccgctcgcggagctcgcggcgggcggcgaggaggcggtcggagagctccctgaggtcggagaggcccggggacgaggagagcggggcgagcgccgacgcgagggaggactcgagggaggaggacgaggccgaggagtcggcggcgcggaggagcgcggcggcgagcggggcgcggtgggaggaggcgaaggagagcgcggaggcgtggaggcggtcggagcggatgcggaggcggtcgatgaggaggcggaggtccggggccgagagcggggtggaggggtcggcgtcggcggtggtggagaggaggagctcgcgcacgtcgtcggccatcgccgccggcgacgaggcggtggtgggggtgggggcggcgctgcgggatccggacggggaggagttaagccgttggggacttgtttgataatagcaacaaaggtaggggctaggggcttaagaaaaaaattactccatgagtaagggcatcttccatagttgcagggtagtactccctccgtcccacaaagaaggtcgttctgctcacaagcaaatgtcttatatttgttgacgctgcacttctccaacagcacacagttgcaaactcctagaaaagcatccataaagaaagtgaaaagttttgaattgattggactggttgcattagtttagggcctgttcactttgatgtcattttcaaccttatcaagttttggtaaatttaccaaaaaaagtggctacatttagtttgctgctaaattttggtaattatataagaaatcctgccaaaatttggtaaggttttttttggcatcaaagtgaacatgcccttaatccatgaagtagcatatatggcagtgtactagtactactcaagccatgaaatagcagatgtggctgtgtactagtactactcaagcatccacatgattagctctaatcccataaattaggggcaaaattgccattttcactcacaactaatttggctcaacaatcctagaacgtctagcattttgggacggagggagtggcagttgtttacagtacccacaaattagtttatgtagaatgaaaagtaagatgaggcttgctttgaaaaaaatcgtaagttttctagggaattctatgatccggtattagttcttcaccacctccacactacctgctattttattataccgcggatatcctaataatgcaaaagaaagtctctacttaaggcaatggaacgttttctagattctttctaatttttacatgtcatttaaaatgtcactgaaaaatatcaaacaaattgagttacctaagtctatagttgaatgcaaatcatatgaacactacaaagaagataagtttttccagtcatatatttaatttgagctacctaatataatgccaaataatataaaccaacatttcaagaacaatctgctgaaattctaaaaccccataaagcaggcaacaatctgtagagtttaggcttagttagtcaacgcatgaagttttatgatgattacatataagaaaacaactagttccaaacctcctttctcattccttatctttttcctcaccatcacttcaaccacccgcttgcctttcttttattgatattattcaccctactggaaggacctatgccaaattggattgttagtgagaagtcaatgtgctttttagactcaaccctcaatatgaatgacgggatgctgaaatttgtctgtcaacactaatgtggtgttgcctaatcaagacacgagcatggtgaaagatgctgctacaactcggtaccgaagggaagacgacgatgacaaaggaagtagagaagactatgctccaaatcaagatattcctagaaaccaaaaagagcgggaccataatccaagttaagatgcatcaacgccaaggccttgttctttgttcaacaaggagttgctgagagtttgttctcatgtattactgacgccaagaaatgaattaaggggaagttggttggaattaattcaactcttgaaacccttgtctagcctactctttagctcatgttttcaagtgttcccgaaacataagtcaaactagttcactgcaacacttgaagttcttagacaagtctagccacatttagtagctagtaactttactagcaggtagtagtactactagttgagctcattaaacttctgtgtatgtcgttgtatagcctataaataggcaaccatgcatgtatgaatgaccgatgatatattgtccaacactttgagtgaaaaaaaacaagctagctaaatacactatcctgactcctccgcttctagcatgagctattccagtgcctctgtcccttgcgcttgataaatatttttgaaccaataggctcctccgatgtcgacgttagtgaggatggatgccattggtgtcttcctctcatcaccaaggtagcatattttggtagtccctgatcttgccgagcgtggcaagccacggtactaggggagacagctctcattggcggcacacataaacgcgagagtgaaggacaacatcgagcgggtcgttgagaaggtcgagccatgagttgcaatgaccgaggaggaggcggtggcggcaacgatagggcctcgctcgttttctcgttgacgacgtagcgatctcgatagaaaacaagatcttcatgggcaagaatggaaaatgaatctatttatagcttctaattgagggatcacatcaggtgcaactgaattttggcaatttaaccttttttatgaaacttattatacaaccctagaaaaaatttaatcgaacctagacaaagcctcagctccaaagacttggtgatgagctttatgggaccgacctctataataataaaatacatgggctatgattcactaaatgtcaagcatcatggtggtttggtgtctacttgccttccccgacgcacgtgttcaactcctctatgcccctctttttttcatttactttttttatcaaaaagcaacccgctcgtttggattcttaatgtttattatagtagccactattaaagaaaactattttattgagtctgctcttttgttttattggttctattattattattattttaagaaagaggtgagggggtcaatgctaggtcccatggtactgagaagttgggccttagcaccaacgttggcgtagtttttgttaaggctcatttgtataataaagtttgtaaaagggttaaagtgtcaaaattttcatgtgcatggtaacaacgcaagcttctaaaatgcaatacacatactatactagactagataaagtactagatgacatcaaatgattatatttccaaaaacactcagatgattcaagtatgcaaactacaaaaattagcaaacagtgaaacctcaaatcgtggcttcaacagttcgatataacattataacctcatcacatgtatgaaagacatttgcaacattgctaaatgaaaaacaaattagccatatcatgtacagcatagacggtttgaagcatcagagttgttattattggtcgtgaagattatacatatggattaaaagaaaaataatgaaagaacaatatacagttctactaacctgtaattctgatacatacaacaaatgcatccagattgcctcttgttctgtttatcttaatttagaccccccacccccaccctatgcgaggggtgtaatcagtttaatttatttttctttttatacactcgaattaaagagcaaaactttatcctatcttcctttctcttgtatgtgcacttataacttggtaataagcatgctttggatggggtcctgctgtgatgtaaaaattcagttctcgctgtattcaaatattgcaccagtatgattgaaaccacatgacacatggacggcccttgcattcttgccgaattccaccatcataggttcaaagtaatcaacatcgtttccgtgtccctgaaaagcagtcgatggttagcacaatcagctgaaatagcaatttcagcataaatgaaagggaaaaggtccatataccacctaaactttggatgaagtaaagcagggatggacatatttaaattttcaaatgaaggtagaccaatcatttttactgtactaatcgattggacgaaaaatgtgaaatcaagtaagtgcacaggattaacatgacaaacaatcttgtagttgcagacttgcagtggtagcaagtaacttactaactgtccaccagaagaatggccctcttcgaaaaaagtaccgttagcacctccccagccccacgtgtaaatatctccacctgagtgtttccagatgcttcaaatatcagtaacacgtagcaactaaataaaatatgagaaactagactattatctaatatacaataatacaaacagggcagtggcaaaagtgttaaatattaagtcatgatgatggaaacttgttatcaatatataactatttgcttcaaacaacgctgtgctactaagttatactccctccgtttcatattataagacgttctagcattgcccacattcatatatatgttaatgaatctaaacacatataccgtttcatattataagacgttctagcattgcccacattcatataaatgttaatgaatctaaacacatatatatgtctagattcattaacatatatatgaatgtggacaatgctagaaagtcttataatatgaaacagaggaagtagaatccaacatactagctaagtagctaaaagacagtacaattatggtacctgaaattacagcggtgtgcttccaaccacatgatacctacataggatatatggtgagtgtccaccagaaattgtaattagaattgtccatgatagatgcaatatataaaaaaggttcgaacagatgactagatgaactaaccttagatacaggaaacttaaataaagaactcttcagaacctccggagagcgaaccatgtctgtaccactggtaaggaatttaatgtaagcaaacatcctcaattttgataaacattggtacaactgtaacaacaaaagttgaagtagcaaatttcttgacaaagtggaaaacaaatacccaagaccaaggcagccattttcatttgaaccccaagagtacaaatctccactatctgcaggacatcacaacatatatttttagaaacctacaacaatagaaacaaagctgtaattgataaattctattgtgaaaacttatcatgaaaattcaccccccccccttcccagtaatggtacgtaaaacaatagcaggcataaaccaattaaattgactgatttgaacctttttgtagtatggtccaggacaacagaaggataaggcagactaataattggaagcataacaaaggggtttctggtctgagccaggtatatacagagccacatttcaaccagcgatccaaatcactgagaaggatctacctatataaattccaatatattgtatcccctaacctgccattttaatttggagaacaatccttattctaccaggaaagtaaatgtttatgggcaagattttgatctaagtacattatggaaatacttaatgccatggtgccttctaccaagttactgtaaacaaaagtaatcagtgcacctttgtataccaagttactgtaaacaaaaagaaatcagtgcatctatgtactcacaaatgcatagaacaagaaaacgatacctgtcacaacacaagtatgataacctccgcaagcaacctcttcagaaaatggtacctcctcaacaacagttggtctaagttcatcacctgatcttccaaatccctgtaatgttgatgttaaatacaaaggaatgaagggaattcgaaaaaatagatttcaacaagggcaatgaaaatcaatgccatgcgctgtaccaccttctcagtcttctgcccgaatatgaacaatgtacctttttctgcaagttgttgtgtaagagaagtgtaagatggggaaattatgatgtgtacaatttgaagattgattctccatagtcttaccatcgatacaagctgagtgcagcattcccgcagctatccttttaatctggccaatgtacaaatacataatatgagaacggaaacactattatctggagccaacattgaatctaaaagtaccttgacaccatcaagattcttgatcaaccttggagtatattcactgcacaattaatggtacaatcatcaattttttcatccttggagtatgttcactcacaattaatgtattgcactatgcaaacacatttagaaccaccaaactatttttacagtgaagattctgatagaatgtcaagtgaggccaaaaatatgccaggcactcactccagcacatgtcaatagcttagagacgaacattagtgaagtaatttccatctaatcagtatataagtctctgattaattttgtttcttagtattcaaaatatttgctagagataggattagattacattgctaggggttaagcaaagaggttaatatctattatttccttatccccttctctcttcctccatcctgtgcatctcctacttctagcacattctctcctgccatggcaactttcaagaattagatcctcacccacctattattgcatcacccaccacaaccccattagatccaatttatccaaaccaacacatgcctgtgacaaacttgtatatataacccgcaaatgatgacatatgaatttgttgccagcttggagtagagaattttgcatctctcgtggttaagattttttttcttttatgtttgtatctttgggttaccacggaatgtagagtactggtgtataccaaactcatgcataacaaaagttatgagcgagttaaaattttcagagatagttaggctcataccttgtagttatagagaatcccagtatgctagttttatgtccatgtccaagcctgccagcaccagcagctccccagctcaagacttcaccctcctcttcagaggaaaatttcagaatcttaaaaccagtgatattcaaaaaaggttgctgtaatacaactacttgttgcactcaccggtagtagcaattgaatgctccgaccccaaagcaaccattttcactctagcgtcagccaagcagtccacctttcttggggtagaaactacttttcctgcccctaaaccaagtaataagaaaaaatactttactacgtactgattaaaagtacacaattgatcaggtgatagacttagactaccatattgccaaagtaaatcttagtaagattatccattcatagttggatactgatgcaaagacatacgaggcaaatagagcttaagtggtcatgtaaatctgcatgcgtatgaaattatcgtatagctcctagcttaaaacataaacacgttcaaaaaatttctgggaaaaagtgattttatgaaatgacagtacaaccatgtgttgccttaaggaagtaaagtaaggatatcacgttattacttttgccaagaccaagctggccacttgaatttctgccccaagcgaagagcttgccatccgctgttgggaacaaccaaacacaaaatcttagtgtaaattggtttcgacaattacacccatgcacagggtgtgcagcataaaataattttttttccaataagaagcataaaataaatttggcaaatataaataaaaagtatcaatgataagcctgtttatctcactaaatagaaaattataaagtggaattttgtattattgtgcactgcaagtagcatataatgaataatcttaaatttgtatacaatctacaaagaacaaacgagcagtaagatatttcagctaaggtatggattgcacagcttaggtctgggtagagtgcataattacagataaaattaatttttatttgaaaatggagcctattcaatatgtaacatacttccttaaatttagtctgtgtatccaccatccaatacaatagtaggaaccataactacaatcttctaaggagagtattgcagcaacatgcacaatttctgtagatttctatgtgatggttgatgccattaaggatgtcagtgggctaatcaattgttacacattgacccagcctagttcaactgaaagtagaccttttcactagcaatgaagaaaggtgcattgttagttgaaccagtgggtcataaaagggcacccatatgtcaactcactccaatccctattccctagataaacctagataacatgcacataatcatgagatctagtagtaaagtaacactaagcatcgtgaagccagaaatgatttgtttggttctattctcagatatttatggtcatttcattacaaaatggcaatgcttgaagcgacctttacgcagagaagtgtgaatgctgctgtgctacaatttacagtaacataacgggcctttaagtgtgatattatcagtatatacattcccttctcctggtcaaacaaaatcatgtcttgcactttttgctcaccagttactgcacaagaatgatggttgccagctgaaacttccacaactttctcatcaaagccagaaacttcaataggctcctgcatgcaaaagaaaagaactattttatcatgcacataactgacattgggaacaatgactacatagatgaaaataatcagatctgtagattccatagcttatcagggaaatgatctaagttgaaatcaaccaggagaaagactgaaagacaatccaaaacaatctctttatttttgacagatcaaaccaaaacaatctggagactacaaaaattttatatcaataaatgttgtaaaattgacaattggaaaatgtgtgtctgctttatttcttaagctcggggtatcaagatctgattaaaaaaaaaagtgatactgctcatacagtaagagtggtttttgcaacatgtaacaggagtcagaattgatttggtcaatccccattgcaactctgatatgtccagccagctttcgcttactgtgtaaaagtaggctggctcacaatgtagatgaaaatttcacatggaggcatgatgtacaagaagctcagtaccagggaatgagtcacggaggagcctatcccgagctgcccgaagtcgttgagacccgcggcgaacacgcgcccgctctctgagcaaaaccagcaggccaaaaatcacatactcccacattaatctcgattcaacacaatctctctctcgctcgagtaattacacaagcaggcgatttcaattcaggagtaccggtgaggaagagggtgtgggcgccgccgcaggcgagggaggcgggcgggtcgtcgtcgtcgtcgccggggcggccggtgaggaagaaggggcacgccgtggggctccaccgcgactccagcgcccccatccccagccgcccgtagtccccgttcccccacagcgccgccaccctccgccgccccgccgctggctcacccgacgagagcatcctcgccgcgcgccgctgcgaccgccacggccacggccaccgcctcgcccgccacatcggcggtggttgctgctctcgcctctcgcgctctcgcgctctcggctcgcggcgtcgggtgagtccacgtcggcgacgagaggctgctcctgctcgcgttcgcgcggcggaggcggagcccaaggtaggtggactggtgatggatgggcttggtgggccgtggagtgagagagaagaaactgggctggtccgttacgggctgggctggctgttgctcggtcggcctatcaaattggaaaaagtatactttgactcccttaactatggcacaagtatgattcatgatctccaaccacaaaaccgggtatatcgactcctccaactatcaaaactggtgcaaaatatatcccaggtggttttataagcggttttagcttacgtggtgcttacgtggcagtgttgacccggtctccgtcatacgtgtcgttgacatgtcacttatgtggcattttagcatcaaaacaaaaacaaaaatacgtgagaccaacatgtaattcacactaaaaaaaatagtgggacccaccgacatgtgtgccccacatgtcatcatcttcatcctttctccttcctctctcctcttctctctccttttccccttcctcttcctctttctgtggcctcctcgctcccctcgcgctcctttctctcggcccaagagcgccgccgcccatctgctgcgccgcaccggtttatgcctgaccgccgagctccggagctgcccgccttacctcctatccatgacgccgccgaaaaccacttcggtcctgacgccgccgcctgtcctggagcaccgccccgcacagggttcgacttcccactgtcgtcgcatccgggaccccaccggtaacgacccctcccaaatctcagcttgaggaggaagatgctaaccgtccaaccaccttaagaacaaacgattaaacaaaaacagattaatttagagccttgtgatgatgtgcaagcaaacggtaaaaaaatttgcagggataagaaaattcccaggagccgaatcagaaggggagggaagaacacggactgaacagatggaagaacatgtatacttggcagggtaaaccaatgaaaaaaagcaacagatgtgcccagaaagccaataaaagagagagaaacacacttttaataaaaggaaatgcttgcttaattgttctgaaccaaaaaatcaaaggaacaaagaagaagaggaagaaggacacaccaagatcagcatgaaaagaaggggagggggccgccgttgtctgccgcctcctcctggagccggtgccgccgagcttcttactcgccaccgcctcagccatggccatggccgtcaaggccaacacaaccggcgtcgtctctttctcgctcgtccttaagccgtcgcggggcgacttcgtcgtgcgcaagtggtttgactccgccggcggcggagacgactcggcggtgacgacatgtgaccgacatcggagcaccatcccgacactggaggcagcgacaagcaggggcggatccaggaacaaaaatttggggggctcaattacacagtttcttcaacctctagccatctagggacctttagtttatcattcatggtgaaaaaaatgaaggggtgctccggagggtatccatgtatcttgtgggtgtaggggggactcgagtcctccctgcacccacgttggatccgcccctggcgacaaacactgccatggcacaagaggaggaaggaggaacaggaagttgaacggggaagaggaaggagagagaagaggggagaggaaggaggaggaaggggatgacatgtgtggcccacatgtcggtgggtcccactattttttatgtgaatgacatgtcagtcccacatatttttgttttttgtttttattctaaaatgccacgtaagtgacacgtcaacgccacgtgggacgaagaccaggtcaacactgccacgtaggcgccacgtcagccaaaaccgcttccaaaaccacttagggatatattttgcaccggtttcgatagctgaaggagtcgatatacccggttttgtggttagaggttatgaatcatactcgggccatagttaagcgagtcaaagtatactttttcctaccaaattcggggagtgtattaaattttggcaagttatcttttgaaattttttgctatgatccattcattggctctttgcagctgagttcgatgcggttaactgtcaagcgtcaacaagagagcacattttttacatatgaatatgttgtgtcacattgtctttcgttatcggtttgatcaaatatagcgtggcaaccatatatctcttctgaggtttaaaaatatgaaacatgtttgttttatgtcgataaatctttgttccatgtaaaaacagggttctaacctactaaattagtgcttaatagagaaaatcttaggttgggcctgatatttttatcaaagtttcaactttttttaagataatgatcaaagttttactttagaatatttcatattcggtgtagctctagctctaggtgactaaagtagatattgagtatggggtcttgctaacgtcatcaatatcctcatgtactcatggaataggagtacgaggcagtgtgctagcggttttttcccaattctcaacattgggatcaaaaggcaggtgaatgcttggggcaacagaggtagtcgagcttcatgtgcagctgaggcaaatcttaagcttaaaagagatggcgagctagcaatggttgtagtggtggggaaccagaggtggagaagagagatataataaggtggtttaaatccaaaaaagataaaagtacccgactagtaaagatattgatattggatagtctattggatatagccctggtttgaagtgagaaaaagttatgtataaacataatttattttataatgtgagacggttatatggttttttgtgttcagctcacccttcttcttcgtcttcgatggccccctcaccatgaaaaagtaccacataccttccccatagcccttgtatttctatatgcatgcatattgtgttatcacaaatcaattggttcatagatatacataacttcaaagcgatcaatcaactaaagaagattaaattaccaatcatttcagaatcatgacgcatgatattgacctcattgatgaggtagagaggcggtttgcgtctcttgatcttaccgcggaggtggaagtccacgagctccttgtccgtcggcacaaagtggaagctaggacttaactgtagccgtgacaccagctcatgcttccagctcaccactagcaccgccgacccatcaccgtcgttgccgccattttccattatcggataatgtacttatgtggcttctaagttcttatggcaatcaaattgaaaaaaaaagaaaaaatatagtggggcattgctataataaactagtatttatatacgctaaaactaattgtagttattaactttttttggtaggttcttgtaaatgtttggtgtttccaagaagggaaaaagaaccaaaaagaatacttcctccatattttaatgaatgacactgttgactttttgacaaacgtttgacttttcgtcttattcaaaaaatttatgtaattataatttattttcttgtgacttgatttatcatcaaatgttctttaagtatgacataagtattttttatatttacataaaaattttgaataagacgagtggttaaacggtggttataaagtcaacggcgtcgtacacgggagtacagaggagttgaacccgaccgaggcaggaggttacgggttacctggttcgagcgacggaccgagaaaacaccgacccgagcctagggtttggccttccccatccccctccgccgcgccgcacgtgtccaccacactcccaaagccaaaggagataccccctccctcccttctcttcctctcctcctcaccgcagctatcggggagcgccgccgccgccgccaccgccgccaccgctaggctttccttccccttcccccaccagaagcttctcgccggagaaggaaaggaggaggagagatggcggagcggctgacgcgtatcgcgatcgtcagcgaggacaagtgcaagcccaagaagtgccgccaggagtgcaagaagagctgccccgtcgtcaagaccggtaatcccttccccttcccctccacaccctcacgcggtggggcaactcgaggaggcgagtggtctccccgtgccgacgcaatcgaggcgtagatcgatccccgggagaggcttcgccatttttgcgcggggtcagatccggggagatagggcgcggttgaggtttagggtggtaccctgtaagttttgcagcttctggggttgtgccacagctgtttgttttagagactagattggaattcttcatacatacacagtgctagtattagtttaattttgtgtgtgctgcgatatcatgtaaagttccagcttccaaacgagcacgcaagctgcggttcctagttgtttcataatcttgccgcttgatatgccgtgcgctaaggctggcgatatgagtttcctgttttgagattgtatatgtggtatggcgattttacagggaagctttgcatcgaagtaactccggcgtcgaagcttgcgttcatttctgaagagctgtgtattggttgtggtatttgcgttaaggtatgtttgctgctattatacatacgcatggaactaggatatgtctttgttctgtaatgtatgtttctcacttccgctatgatctttgttgcagaaatgcccgtttgatgccattgagattatcaaccttcctaaggatttggaaaaagatactactcatcgctatggtccaaacaccttcaaattgcacaggtattgatgtttgatttgaggagctgtgttgatatgaacttttgcatttttttaatccaagtattactgtaatttaggtgaaaccatatctttggatagttactgatttagcacttgcaggttgcccgttccaagacctggtcaagttttaggccttgttgggacaaatggaattggaaagtcgacagcactcaaagtgttagctggcaagctcaagcctaatttgggacgatttaaagtatatatttttacctcgtgcccaatttctctgttgctgactgttaaattatgtgttctcatagaaagttgacttccttcctttccttttatactgatacaagtaatgggaatccacctatatttgttgcagaatccaccagactggcaggaaattctgacatacttccgtgggtctgaactccaaaactattttacacgcatattggaggataaccttaaggtattgcattgccacttctttttatccattgtgtttgtccttcttttaggcttttttagcatgtactctgcgacagtaataaatatcttaatttgtcgtttaccatcactatgtgtgggctctgagtacaatagcatcagtgaggtatttgtttcagtcttatttttggttctatagcatcatacatttttctggtaaacttttgtatgcatgcaaacagtaacaacacatagcgtcagcaagatactattgatcttccacttatgcaacctgcattaaattatgcactcaaatattgtccgaatctcaggtattaaatattgctttgatttattacatgtcaaaaaacccttagtagccaaaaaacagatattctggcattggaatagactgtcgctatgtttgatattatcagtattgattgcttcatacttctattaacttacatgcatgctgacatgctctatttctctttcctaggcaatcatcaagcctcagtatgtggatcacattccaaaagctgtccagggaaatgttgggcaagtacttgaccagaaagacgagagaggcgtgaaagctgagctttgtgtcgaccttgaattgaaccaagttattgatcgaaatgtaggagatctttctggtggtgagctccagagatttgcgatagcagttgttgctgtgcagaatgcggaaattttcatgtttgatgagccatcaagttaccttgatgttaagcagaggcttaaggctgcacaagtcgttcggtctttgcttagacccaacaggtaacatattcgttatgttattactatgattatgtaaatttaaactttgacgaatgcaatatcaagttctatcctatgtattttcagctatgtgattgttgtggagcatgatttgagtgtcctggattacttgtccgactttatttgctgcttgtatgggaagccaggtgcttatggtgtagttactttgccgttttcggtccgagaaggtatcaatattttcttggccggatttgttccaacagaaaatctacggtttcgagatgaatctcttacttttaaggtaacctgtgccttttcagatttagatttttggctatgtgatgaaacattgtttttatgtatgttctgtcctttcagattgcggagactcaggaaagtgctgaggagattgagacataccagcgatataagtaccctactatgagtaaaacacagggcaatttcaagctcactgttgttgagggtgagttcactgattcacagattgttgtgatgcttggtgagaatgggacagggaaaactacattcatcagaatgctggtacgccacccttcctccgtaactaccctaatcttcagttcaaaatcaatcaactaaatctgcagttatctttctgatttgttatgaatggataggctgggttgttgaagccagacactgtggaaggaactgagattgaaattcctgaatttaatgtgtcctacaagcctcagaagattagcccgaaattccagcattctgtgaggcacttgcttcatcagaaaatacgggattcatatactcatcctcagtttgtgtctgatgtcatgaagccactgcaaatagagcaactcatggaccaggaagttatcaatttatcaggtggtgagctacaaagggtggcaatatgcctttgccttggaaaggtaaatagatgtttcttctgacaaatataatacaccatttttgtgccttttaaaagttttaagacttcatgacctgtctagttatatatatatatatatatatatatatatatatatatatatatatatatatatatatatatatatatatatatttcacatactatatgctcatttggcttttgtgaccaaatcttctaggtctgcatttatgttcctgcaatgttttttaaattatatttgcatcaagaacaacaatacatagaccgtaattcgtatgatatttcttcctgttttatgtgggatttcagaatgcattaaactacggatacatgcacatggtctttctaaacctgtcactgatggatttcaatgagttctattccttgctcttctcagaaatgccattttggaatctgttttagttggcttagaacacattttatccatttatatcctttgatgtggacctggtgtggctcaatctgttttgctagatgacattggagttagatatttgtattgttgtatgttttacttaagcatagaatgactcaagaaataattatttttcctgtgggcctactgtcatggggtagatcataagaggagggagataaatcaatctgaaatttgtaacactgattagacaatggtcttgaatttggagacttgtagtgctacagatctcagtcgcggtgtgcttttctcataaaataacaatcaaagaatatgtcttgtattatttacttttgtttgcacttttgaagcctctgaataatggctatgaacaatccaattgatgatccacctaacatatccgtagtactttcatgtggctaagcacctaaatgctgtattgcctatataaatattgacttgattgtcagcttattgatacttgcaatgtggtatatgttcagcctgcagatatctatctgattgatgaaccaagtgcctatcttgattcggagcagcgcattgttgcttcgaaggttatcaaaagattcatccttcatgcaaagaaaactgcatttattgtggagcatgatttcatcatggctacctacttagctgacaaggtcattgtttatgaggggcggccttctatcgactgtactgccaatgcaccacagtctttggtatctgggatgaataagttcttatcggtaagttctgaatattaaatattgagaagagatccacaagtttgttgtaataccatctcgcatccttgtctttggttcagttgtaggcaacttcctcaaaagattaatttttcagtagagtttgacattctatatctgtttttagttgtcgaaagatgtcccacttctgtttatttttcagagtatttcatttatgttttcacatgctaatgctttctattgtttttccttttgtgcatgatagcatcttgacattacttttagaagagacccaaccaactataggccaagaataaacaaactggactccacaaaagacagggaacaaaagtctgcaggatcctactactaccttgatgactaatttgaaggcgtacaggttcctacagctctcatttatgctggagtagtttcatatcattttttaattcttattttcacttattaagtaatttcgtttttcttttgccttgctgtgcagaatcttcttgtggagcttcccgcccataatttgcccaggccttcgatgtcctacgcattacttgttcagaaggttactttgaagctaccacagcttgaagcatgctaaataacttggctgcaggagtgaagtggtatcatcatcagttataaggctgagcatgtgatgctgacacttgagttcttttgctggtttgatatatatgatgatgggaaagagagatgttactgttaaactgagcaactttgtcaggatcggaagattgtgaatttttgtgtatttttgcattattgtatcgtggatttaccaactggcacccttaaatcgttggttttataggcataaagtttttgagctgttactcatgttaccaatgttatcaaagttctctgagttattactgttaattcactttatcgagataataacgtagtttgtctttttttttattcagatttttaaaaatctgtagtagacaaaaccgaggtttttctttgttttgatcggatgccagattcatttgcttgtgtttagttttgttgtgtcaacgagaatgattgagttgcgttacatgcagattcatgttgtttgtttctccacaacttacagtcgtggaaaatttaaggttgcaatgtaagtgaaacttaataaatctattatttgcaagaagccaatattagaaaacaaactatgataagaaacctcaaaattaacgctaaaattaagttttggaatttaaattttgtttgtgaccattcttccaagtagaaaacgatagctccatcaaacaccataaaagttattgctcatttaatttcttgtcaaaattaaccttaccaaaattgatattaccaaattaattttggtattaataaaatttgggagcttttgttgcatttggtttgaccccttactaaaaattggaaaagtttttttggataggaaacttttagaattaccaatatttggtatggtagcaaatgataaagttacatttagtttgttaacatattaaaatttgataatgtcaaaacttgataaggttaaaaatggtactctatccgtcccaaaatacaagagattttggtaggatatgacatatcacagtattttaaatccatagtgataggaatgtgtttcatccaaccaaaatcacgtctattttaatatacttaaatggtaggatacgatatatcacagtcttttaaatccatagtaataggaatatgttctatccaaccaaaatctcgtatattttaatatacttaaaatgaacatgctctcggtgcataatacaaaggccttgttccagaggtgaaatgttttggcgtgtcacatcggatatatggacacatatttgaagtattaaacgtagtctaataacaaaacaaattatagattccgcctgtaaactgcgagatgaatttattaagcctaattaatccgtcattagtaaatgtttactgtagtaccgtattgtcaaatcatggtgcaattaggcttaaaagattcgtctcgcaatttatacgcaatatgtgtaattagtttttttttctatatttaatacctcatgcatgtgtcgaaacattcgatgtgagtaggatggacaggaagcttgtggcttgttagctcacttggctcggcggcaaggcccaagcccaagacaacagctgaacaacaaaaccctaggcacacgcaccgcatctctctttgtctcgcgaatcctcgtctcctcgatccccttcggcccttccgttattcgcatgttccgtatccgcagtgcgccgtcgctagccgctagggccgccgccgccatcgccggacttcccctcctcggctcctcctctaccagctacaaacctgcgtttacgatggaggaagaacgagaggtgcaagagcaagtgcctcaggttgcaagcgtggaatcccagagcaaacacatgagcgtgtcttgttggtttggctcgcgaatctaatgagctagctctagctttcaaacgagccgagccgagctgggtttctagctcgttaggataacgagttgagccgagccagctcgttatcctaacgagctagaccgagccgagctgagctggctcgctatccacccctagatgtgacagggttaaaagtttttgcgtgggaactaaaccgggccaaaatcttctcatggtcatgtaagttgggtacgtacgtattccacttttaaaacaacaaggtggctgggacaacatgatattactagtacgagtaattttctttcaacgtatatatttttataaccagttgattagaccaaaagatatcttgagatgagcttcctttcgctctctacttcacacttgttcaatacggtacggacagattttaaccaccggctgcctgcaagtagtaccggtgtgtccgtgtctgctcgactgctctccctctcctccccgtcttcctccctctcccggtctccccttcggttgccgcgtcaccaccaccaccaccgggtcactgccacgtgggccccacacccccacctccgcgacctcgcggccggtgagccgcactgcgcctcccctccgctgggtacaaaccgagtgaccgatctaccacctccacccaccgccatcccccccaatcccccccacacgccgcgagatctcccgcctcctcctccacccgccatggatctcctccgcgaccgccgcctcggcgcgctgctggtggtggtgctggtgctggtgagcggcgcggcggtggaggcgtcgatccacacctacgacagggagccgttccgggaggtggggaacgcgttcctcctctccgggggcagcgagggcgtcgtcgccgacggggccgacctcgccgcccccgcctcctccttcatcaagtaaagtttcccatcccccccgcaccacacctccgcgtctcggtggttggaaactagtatagtagtaggttctcgaagccgctgccaagggtgagaggcatgtgctgctggctgctcggtcttgaatcgcctggggattaggcgtcgccggcgctgggaatgggaaatggggggcgaggcgtcaccgctggaggatcccgcccgcgcgcacggttttgctgagtgcttgcttgattagtggcaatttaacttttgggatttttcattttggcaagacattagtgctcagtttgtgatttatgaccaaatttataattgtgttgccgatgaagtaaaattcgggttgcttagatacacctaacattgaaaatgataaaatctgcaagttgtgacccacacattgaactcggtgctcaccatgtagttgtttgcagtgttttgtgtcaatattgttcactgcagttcattttagttttatagacttttagttcagctttgaacttcttgtgctgataagcagggctgtgctaccgccgtattaaaccgatgcaggttccactattatcattttgagtaacatttgccatggattaggagaattacatagctagttagctactgccaatgtgaattacggagcatgttgacaagctgatatgtgggctcagaaaatcatttggttgatgctgtccttgtgcttactagctgtttctatctgttttattgcgtccatcaggctttattttttgtaggaatatgtatgggtttaatcttttctgggatctgtatgtgttagtttaccgatggaaagaactatgctccattcataacaattgtataatttagtattaaccagatgctgggttttcttactgtcaggttcacgaatgttactttctggagaactccggaatcagctgaatcacatgcaaaaatggcacacagtacaggtctggtacaggccattttatttgaagcagctgacagggataacattgggggatctgcctatggtggacagaggtccatatgttgtacccctgaccttgctaaactagagggctgcaaacaaggggaagtaatcaggagaccatcctctgatgatcctgattggccttatgtgctagatacacacttcagtggtagtcacctttctgtgaagttagaagatgaggtagttcgcattaccaagacaggcatgtacaacttgttcttcatttcctgtgatccaaaactgagaggccttagtatgagtgggaagacagtctggaggaatcctggcggctacctaccagggcggatggcacctttgatgaaattttacgtttttatgtcactggcttatctattggtcatggttgtctggtcgagtcagtatataagattctggagggacatcatgccaatccagaattggatcacactaattattgcacttggcctttttgagatgacactatggtactttgaatacttaaacttcaacagtagtggtgtacggccaattggaatcacaacttgggtggttactgttggagccatcagaaaaacgatttctcgcctattgatcctttctatctcaatgggatatggtgttgtccgcccaaccctgggaggactgacctctaaggtgttgctccttgggctgacatatttcctggcttctgaattgctggatattgcagaaaacgttggaacaattaatgacatttctgggaaagcaaggcttttcctagttcttcctgatgcctttttggatgctttcctcatactttggattttcacttctctctcccgcacacttgagaagttacaggtaagctatatttgatgtaatttttcttgtctgcttttataatgatgattactccctccgtcccaaaatataacaacttctacaccaacattctcttctcaaccaatcacaaccctccaccattcaattttctcacctacctccacttctcatccaatcacaacccaaacctatttaattctatctactttcttagtaactgtatccaactctaaaaatgcttatattctgggatggagggagtagcattttatccatgttttctcttttcaataaagtcataacatctgatgttttggtggtggaggaaataagtgcttgcaattcttttctgatgcgtaactaactgtgatctggtggagttactagtgtatgaagaacctatgatagtgatgttaatatcaaaattctaatggtgttatgtgtgctcacaaagaggacaagtgctttaaacagtgtttataatttcataaccaagtctgttgaaccatgccaaaatagaagtatgtattgtgttgcttcttaatcatcacctttttttattgctcatcaggctaggaggagctcagtaaagctggatatatacagaaaatttactaatgcattggcggtatctgtaatagcttcagttgcctggattggttatgaggtatgcaaatttgactttgttaatcaatagtgcatattggctcactgacctatgttcctggattggttaatcagtaatgtggtgcgtattagtctcttaagttcctgtaagctttatgaacatccaagtacgtcattatcacatggcattccaaaattgtgccctctgaaaacaacaaagtcttctttataatcaaaatttatctgctatttttagaggacacctctatcagaatgtcttctttgcactttagtgcttcactatttttatgatgtcctgataaagcacccatggaaaatttggatgattcattttttttcataatacttgggttctaagcctgatcataaacttcttctctgcatgagtgtgaaaaagaatcatggaagacattactcacttcatgttctgcaattttcttcatgctgatatgagagatggtttcattcatctgcagattttttttcagggaatcatctgttttatagcattatagctgtgataaataacctgctctgctcaacaatggcttcattttgcaggtctatttcaaagcgacagatccctttagtgagaggtggcagagcgcatggatcataactgcattctgggacgttcttgcatttgttttgcttcttgtgatttgttatctatgggcgccatcccagagctcacaaaggttaaatctttgcctcttcaatgactggaaatgccatagtgaaagtagtagtgtagcttgaaatgacttgaaagtatctgtgttgctacttgtaataaccagcttatctactcaaaatgccgatagctcgcctggctgcctgccatcactagaaagtagtaatgtgtttttatacggcacaagaaggttatctttgaaagcgctctaaaattgacatgtcaaaccttgtccagatacgcatattcaggcgaagctgccgacgacgatgatgaagaatctcaatctctgacgaaggggaccgacggtgatgtagggatggtaaaggttgacaaggacagaagtggtggtgtcagtagtgctttcagcttggaagacgaggctgaggaggacaaaagagagtgacctgctggagcaagaatgctccaaggttcctgagctttcttcttctttttggtggtgatttgatcttctcttttgtaccttctcagttacacaggtcatgtagaagcgcaccattttatccattcctgcgaggatagtatgttcgtggtgttccatgtggagtttcacataggccaggatggtgcacattatttaaatgactacacattcacaacagtgtacatatctgtttttgttaccggttgtgcattgcctgatgtatcatggtatcatgtatgaaactggtgaacgcagtgtttgacagatctgtttgcctaattgactggaagttgcagatgaaaaatagccaaagtttttaatccaaaactccagttctcctgcactagcactaaccatccaattacttcaatgcttttggttccaagacctggcatcaaggtatttaagccataacagttcaatctttctattgttaaagcatcagcagattctcgtgagaagatttttcaatagcggattctatgcacgggatagataaaatcgtaataaaacactgttcgttgtcgtgagaagattttttgatagctggattgtatacatgagataggtaaaggcaatccagatcctctgcaggcagtattgctcactgacatgtggatcctacatatccttaggcccacatgttagtgaagagtactgcactgcagaggaccttgagggcctgtttgggggagctttagattctgagaagcagctgtttggtagccagcttctgaaaatctagaaaagctctgaaactcagcttctccagcttctgacttcttagttcatttttcagaatatgtaactacagattctcagaagctatggactgtttgggacagcttctagcacccaaaagctgcacctgggacaagcttgtttgagtcactcaggtaagagaaacaatccattttttttcagattttaagaaattgtagttataaattcagaaaataaactagaaaccagaagctagaaaatctagcttctaccgtatcctcaaaatgtagctaccaaccagttatttctcggaatcttaagctctccgaacaagccctttatcataataaaacactgttgtactctctagctgaagctgtgcgtgcagccttgagtccttgacagctgacgttaaacattccaacggcagatggcatcatggcaaacaggcaaagagccaaagatgcaggctgagcatataaaacccttgctggtcaagccgcggcatgactgacaattgcacaaacatgcgtcaaagaagtacaaggccaaggaaagatgattacaagtcactggttaactcgagaattgatggctgtgacaccgttcttgatctaggcacaagattcttcacttcagccaagcaattttctcatcaagaacgaaagagtacaaggatggcatgacaaactctggattcttacagagtaaaggctttgtctgattcttcctccctctgtagaacggtttgttctatgttgtgagttatgacatgctttcataaactcctccctatttacacaaatgaaatcaggtgagctccccttctaacttgggttcaaaatgagaacactgtaagcggtttgaacaacacaactaggcatctacaagccttaccttctgcaattctgaactagagtctagaggtcatgagttgacatgcttgtctaggaaagcgtttgccagatttctgaagctggtattagcatctccagccacggcatactctcttactgccttaagtacttctggtttcagaatatctttctttgtcgaagggttacacagataatataaagccccaagtgcatagttcacctgtgaaatcattggaatggaattattcgtataggagaaactacagaaaagtgaggaatcaataagaaaatctattttttcaaaagaacaaaacattcatttcagtaattggatagtgttgaagttatggtttcagaaatactaaccgtattcttcactgggctagataagcattgtatgaccaacggaattccaccgcaatgagtaatgactgaagcatttgctggatctgcatgtatacaaatagaccaataagattttaaaaaaaatctatgtttgctggaaacacaattaaaaagtgggaacattaaaagggaaaattgggagcttgaagtattgcattgctcaccggcacaagagttacagattccaccgatgccaaattcgataagcctttcgtttggctccgtaatgcagtccaagaacaattctaggatatttagctgagaaagcaaaacagatagacaagttactgaacatgatcgctaattcaagtcaatccttatagcacatgaaatctgcacaaactgttcctaaagaacaagtgtgcgagataacaacctggcgcataaaggtgtagttataaggatcatatgcgaaattcgccaaatttgcaacaattctctccttggactctgcgataacaaaaataaaatagaatcaatgaacaatgtttaataagcatccaatgccatgtaaactctggcgtccatgaaccgatgaacttattctactcgacagtataatcccgaattatattttcatttttaaaaaatgaactagcttatgctggcttttatcaataggagaaaaatgcagaaacaattcggctgctatggacaacctaacgacggacggtcatctcatcatgaattgggtttgcaagacgagaaatggaactagctgaccttcatccgtggcctcctggaactgggtgacgagatcctgacgaggcggacgcaaatcaaacggagaaaaaaaaatcagctgatcagcgcgaggattttgcaggataaaccagtcgaatcttttccatgagccaaaaagcaaagcaaaagtgagccaacctggaggtgctggtctctcggggtgccgtggcgtccggtccgctcgacctgccgctgcgcgttcgtgaacatcgatccccctccgacccggcagagagagagagagagagagagagagagagagagagagagagagattcccgatctgctcaccgcgccgccgtggttgggggggagaaacgctgctggtggtggtggcggagccgatgcccgcgggaattgggggcggtggtctcgacgagctccccacgcacggagagcctcggctcgcccagcggaagcgagggggcacctctcgccggagtgatgccgccgccgccgtgtttcgtcgagaggggtctcgccggaggggggatttgccgccgccgtgtttcgtggaggagagagagaggggagagcggggaacagctcaatccgggccgtacgacatcgatctaacggtttcggatggggacacgtcatgcattgaaacacagtttcgggctcttttttggaacgaaggattttcatgggaaatttatagggtttatactgctatatacgtactgtacagctcatatacggttagatatatacaaccataccatagatcaatataagagaagagcatgttcatatgtattgcagctgtttaccaccattgatcaaattcagttatacgtgagtcggatagttgggtcatatgcatagtaattttcgatgtaactatggaattattttatatttttccaatgaagctctttggttgaaagatctggctacaaaatttttattggaatcctttctttcctccaccttttaacttttttaggatttcaaacaggagctcaaacctcttggttttgatttcctttgaaaagtccaattcaccgtgtctcttcatctctcttctcaactctatcttaataatacgagtatctaaattccccatgaatttcttatgaagtatctaaatttccttcgaattccctgtgaagtatctaaacaaccgttagatatattcatgtgtcataggtagtgggccgaggggtcgaggccctagggataaggatagagtcggttggataggattagattggatcctccctccatctatataaggatggtttgtatcgttattctagtcaagcaatgaatcaagattagtctctcccaacctaagtccccttctcatccctagcagccgtcgccgcccggctatcctcccggcggtgtttacccccctatgaatcctaatccataacatcatgtgttttcaattcccgactttctatttctgcgtttttactatttatgtgtttttttcaatttctgcgttccaaaggagccctagcagcttagcaactctgatctttccaacgttgaagtatcagtgcatcttgtaatggattttgctcttcctttttttttactaacttcttacaaaatctactcttccttgcaatggaggacaaaacaatatttactgcaaaatcaaggcaacgagtagcatagtaaagctctcgtgtggttgcagcagtcacactttacaaaccattgtagtattgaactggtaacctagagctggcaaaatttgggaaaagaaatacagctgatgcagttgtacgtgagagacttctgagcacagctggggcaaacagattcagatgttagcttttgagcaaaccaaatactgttaggttcaagaactcagggtcttcttgttggtgtcttctcaatctgtgacgcggagtggctgttcattcttcacaatcaactcaacttgattctggtcagcccatacagctgcatccagatacccaagctcatataatttgtctagaacctcgtcttcggcgggttccagagcccagttaaacagctgtaattgatttgagaattgagacagtgtcaaagtgaatcaaggtgagtggtaaaaattgtgcatttcgaaagtgactgacctgtcgggggctagctctgttctccggattgcagtctggactaataccaatcccttgcaatcctagtcgactggctgggaaagcacaaattcgaacctgcaattgtaggcatagtgtcaagaataagcattgcaaaacaggcagcatggcacattgtcctgttgtatgcatcaaagatgtgtacacaaagtagtacaacgcaactggttctgctaatggatatcgtggggggcctccctcactgtttccggtaaaaaaaaaactcagagtagaatatttttggagacagagaagccctcaactcacaagtgtgatgcatcctgcatgagacaggccaacttgcacacgcccattcagaagaagcggtttcagaattgcacattcaaatttcagtacagttttttaaaacagattgctcagttatggaaaaggaaaagaaagaagataccccaaattcaggttatacagttatcttcactgtaaagtataaagagagcaacagaaaatgtattaaatttgagaagaaaaacacattattatgtactcagcttatgatcattttagtacatgaacacatcacagtgcttgcacctactacagaacaaaacatgtctgaggtgtccctatgttgcattgttcaaaatcatagtctaaccaagacagacatgtcatacggttttcaattgtaaaatcaacaatcagtgggggaaatgcttttcatacatgtgcagaaaactcaatagttctagtgatcagaataattttgcagaaccaaaagaagttatgacatactgtttcggaagcagaagttggtggcataaacaacgtaaggcccccatcaatgcacagcctgttccggaagaaagttgcaggcctgggagctaaatatctgaaacaagcacacccaattattcttaaacttagaacacaaaatatagaagatacatacagtacgagtgaggaaaagttaacatgaatcttacccaggaataaaagaggatgtaataactgcactgattacatcatcttttgagtcaaattggtcaaccagtaagcccctaggcctccaggacagctgagtaatagcaactgatgagaagaagttaagtgttcttaattattaaatccagttacttgtcagaaaataatgtagcagaaaatacacacagcaaatatgaataagcaatggttgaacagtatgaagcttaccacggatccttccgttgcacctaatgtgcacatcatctgggagaaacctgtctagaacatccttgagtacagcctgctcaagtgcacaagattacaaggttaaaaacatatcattcaatcagccagcacatgaactatttagtgacttgagtgccatatatgtctgtcgccttcagcgtattttttaaaggatacaccaggttactcatcacagttttctcgaattattacagtctaaacaccaaggtattgcaaagttgaaacatagttggcaaattggtcataaataaaccaatgatctatcacacatatagttgggtataatttacacaggaagcaaactcacatgttggccgcaagtataattaaaagtaaacaataaatggaaacagaaaacttaccccaaggcgaaaggctgtcccattgctccgacagttatcagctagatccttggtcacttgcaaagcatctcgcatcgtgttcccagatgcaatcactgcacagattatggcaccagctgatgaaccagctaacggagttctttcctaatgtaagtcccagataaagaaaccactataagaaaacttgctaaaaaaaaaagcagcagcatacatacaaaatgtatcacacgtaagtcctaaaatcacaagcataggaatgcagaatttccatgcataaaaatagcaggcaatgttaccacctagacagtacagtagcataaaaattgagagctctagccagccatggcaccaacaagctactcctactactcctactaagctaaagagaccaacacggaaattcgactgttgttagccacaatttcatctcgaaagtaacccgctcattggctaaagagaccaatgtgaattggattgttgttagccataatttcatctcaaagaaacaagccccaatagctaagcagacaaacgtaaattggattgttgttggccacaatttcatctcgagagagaaacaatctccactatcgtaggcacacggatctcacaattcatctgagcagaagctcctgtctcctactgcaaaaatcaagtacgcgttcgcgtagaagaggtaagagagatggggggtggacgcgcaccgtgaggtagcccctgtcgatgaggcactgcgcgacgccgatgtggtaggggaagagcagcccggcggcggagaagctgaacccggggccggtcagctcccgccgccgccgctccgcctccacgtcctcgggccgctgctcccacaccaccccgtccttcgcctccacctcctccaccgccgcccccccgcccctccccgcgcgcaccagcagcgccgccagccccaggaacacctcccccgtcctcaccgcgagcgacctcttctcggtcccctcgggcagcggcggcggctccgggtcgcggcccgcggcggcgcgggcgagcatgaagcgacggaagccccccggccgcgcggaggcggaggagggaggggtggaggaaggtggctgcggcttgggagggaggccggaggcggcggaggagaggagggaggaggccatgggggctcgccggcggccgccgacgacgacacgtgtgcacgcgcggcgaagcatctgctacgtcgttaattcgtttaggtgcgtggaaaaaataattaaaaaatcgatgtagttttcttgtttctgtccttttgttttcgattttattttccgtgggcaaacgaaacgacacgtgtcgctgcccaagtcgatgtacgtcgtagctttggatagtagaactccgtatgcaggaatttttcgtgtcgtggcattggtatggctctgatcggaagtagtatttagtttcggtatcacctatatatttttcgacaaattttctcctaaatatttgacagatataattatagtataatcgtaatataatcggcacaggtgataaccagaggagacgtggtgcgcgttcaagaagctggatcgatttgtgtcgcgactccgtccaaatcgttgtttatcataaccttttgaaagatcgggaaccctagtgcacatcacaccctaattcgatgatgaagctgttgccctccacgctcaagctgtcattgtcctcaacgtcaaagggctggtgcggtctcttcctcgtcgtcttcggcaagtacgcgctcacggatcacgtcctcgctgacaactctcacctcaaccacgtggattgggcacagatggactgcgtcgtcctcggctagctataaggcacgatctccgccgacttgcttcaggaagtcatgttggccacggctacggctcgctctgtttggtgtgatctcgcccatcaattcctcggcaaccaagaatgttgcaccatcaatgtcaacgccgagttccgcaacttctctcaaggcgagctctccgtcaccgactactgtcgttgcctcaagtccatggctgacacgcttagcgacctcggcaaacccgtctccgatggtgcactcgttctccagctaatcaccgggcttagtccccgttttggcaacatgcattcacttttgtccatgtagaaaccattcccatcgttcatggatgcacgctctcagctcccgcttgaagatatcatgaagggctctcaaccggcagaaactgcttccgtgttcgtcgcagacaccgtcagcggcgcctctcgtcccgctagcagcaacaacggttctggtggcgttccccagaactcgaccaacggctccgtctccggcaaaaacaactcgcgaaaccacggctgtggccacagcaactccgatggctccggcggaaacaacggaggtggctagggcaacaccacctacgcaaacaaccaaggccggcccaccacctcccccatgaagcaggccgctgttccggcccagcaccaggcccagtggccgtccccttacaattcctaggccgggacaattcagatgtggcctgccctggtcggtgaggactttgatctgtgctctttgtctagctcttgttgatcttctcataaaaagggtaaaagatgaccaataaactaaatagtgaactttcgatccaccgccgcaggacgcctgacatgatgaaattgacggaattgctcgatagggcaacggaaagagattttagatgctaataaagtgaatgatgaactttcaatgctataaagccaaaaacgaaaacttttgttactataaatacaattttgccttaaaactttattgtacgtactttctatatctaaagtaatgaaagaaacaatctttctcgaaagcacattgggccacgtagtgttaaaaataatggccatcgaatgaatgcatcgagaatggatggccatccgatcattaacgacatacatgcggtagaaaaaaaaaacatgccgtatgcacttccctcccgagccttatagtgtctcctggcaagaataaaaagaccactgtatgtgaaagacaataagttatactagtttatgatgactataaccatcctgttattaatggtgtggatgaaatcttatctataatgtttagaatttgagtattagtttgtgcaaaaaatagaaatgctaatcaataacagaaaattttaaacagtttgctattgtaagatatacttgcaaggatgattttgtaggcagtggcatagtagaaccctttgtgtcattgaaatgaccatatgtgttattttgagcaaaggcatgatttaatgttgtcattgttcttacttttctttttaattcctacaatatgcatgtgtacagccctctggaaattctgcaacccaaaagccagaaccatgtcaaatgctccctcctgtgctcactcagacgatcttttaatccttgagttgcatgatcttcatgataacaactgaagttaacttacttttatgaagtaatttgttaatgtatataatattgtacgacttagtattataaattgcattttatcttattttttgttaaataaaaacacattatatgaaattacattcttgatgagtgcttttttttttcttctagcagctgaacttccagccgaaggcacgtgaaccttcttgattcatcctttttttttttcttttcatgcaaccattcctcccttcactttcaatcctatgtgccactgtgccagcttcattcaccatatcaatccaacagtttatatatttttcatgatgtggctcattctggagcgacaatacattttcattcgctagcggcctgccaacgacataaagattgctatgtacacgatccaatcgtccaacacgcatatgactaagtttaatcaatggttaccatgatttgaacctctaccctttgattaatttatggttatacggcttcagtcagtcttatgtggatagcacaacttgatcgaatgcatagtgagactctcgatacaaacacacgaagaagcaaaagatttttctttgtgaaagatcaccaatcttaatttggagccctcttggtcgacttgtgtaaactcattcagcatttggtattcgttcaagaaaaaatttaattcgttcaccatttggccaccatcccagaggtctcactttggagaccaatccccatcgggatcgtcgccaaattgctacaggtcccaagtcaattctctctcgaggattggcctggatccgatcaagattaggcttcctatgacagcgtttctccagcttccaggtaaataaatggacgtgcctcattcccctaggacgtcaacttgatcagccactgttgtcggttcagtgcccttaaaacttaaaaaaagaaccgatcatttcattagattaaaccctccatcaacattggttaactaatgcaagtactagtattagtatacaataatatctctcacattttgtcggcaagaaaattgcaactggagaattggagggttttgttcctctaactacaggattgtcagtgtcaggacactaaacacacggtcgtggccttttctggaaaaccggaatttcgctggattttggtagtacggattttacgccaaacagcgcaatttgttcctaaaaaaatgttaatttcatttcttgaagtcactcgtcagtacagcatgttgtcttaggcagtacagcatgctgtcagttcagagctccaaaccttaaaacacactagtatttctttaagcaccttgtcagtacagcactgcactacaacatcttctcagttcagccacatactccgtaaagcctaaactgactggctgttttaagtttaaaaaccattgcaatatttgaaataaatgttaagcatctcgagatctgcaattcgattgatctttaatcttttgtcagcagagcaatttgtggcttgatccgggatcgggtgttttgtagtaattcttctcgaagctggaggtgttttgtagtaattcttctggaagctcccgtgatccgaagctggaggcattagaaacagtttagccctgtttagttcacaaaacaaaaatttttacactatcatattaaatgtttggacggaatattaaatatagaaaaaaactaattacacatgattgcgtgtaaattgcgagacgaatcttttaagcctaattgcatcataatttaacaatgtggtgctacagtaaacatttactaatgatggattaattaggcttaaaaaatttgtctcgtaattttttgacgaaatctgtaatttgttttgttattagactatatttaatattgtaaatgtgtgaccgtatatccgaaaaatttcccctgctaaacaatgccttattttctaatgagcaccgactcaccgacaattctgatcaaacaagtctctgaaatgagatcagaatcaaaagcattggcaatgcaacagtcatgtttcccactctcaataacaagaagcaactgaagtttatttatttttatttgtttttgctttgaactgaagatttcattcgaatccaactatagttttgatgatcatatatacttcacaaaaagaagtaaacaaaggtacaaaagcaagatcaaaagcagggtagatttgacttgaaaagatgcaaatttgggccgaatttatctgtccctgctattaccagcactgataatttcattttcttttcttttttactgtaacgaacgagagagaacgaaagagctaggcgcgcgtccaggccaaggccggcggcggcggcgccgccgccgccgcgtcaccgggcggctgggtagtctaacggcagcggccgcacctcgtcggagagcgggtccttgtggcggtacccgtag

SEQ ID NO: 7092 - DNA, 1695 bp, Oryza sativa
cgttccaggcttcatcgcaaccatagcaaggaagtcattgtatgaagaaaggcagacgtgcggcatgctaaactgacgcgcggtggacaagagtgaccggtctgtgactggtctgacgccggtcacgtcataggcagacaaccgtgctcccacgttgcatctgcttccggcggagtggaggtaggtatgacccatcccatcggagggtcattcggacagcggccattgcaaatctccacccattaatgaaggaatgacagggttatcccctgtgtcaggcgagtgacggcactgggcctcactcaaggacaagctgtgatttagcttccaggcgaaggtgcgagccaagtttgggtcaagatagggtgagtccccacccaaaagaagagtaggtagaagtggtgcatgtggtatccccttgagatataaaaggaggaccttgcccaccgaagtaaaggacggagagaaaaaaaagagaaaggggggacgactcggagaatacctgagctcatagaggagagaaagaggaagaggggttctagagcctgaactctcttgctctccggctctctgtaactccttcacacacagatccaccagaacacaggagtagggtattacgcttctcagcggcccgaacctgtctacatcgcccgtgtcttgtgcatttgctctctcgcgaacattccacagatcgagggtgaagaacctcacttagcgcccccggccgaaccggcaaagggggacctgcgcggtctcccggtgaggagccccacgctccgtcatctggcgcgccaggtagggggcgcgtgtgtctttctaagccctcgtcctctttcgtgtgcgccaagcttctcccgctcagcccaatggccgaacgggcagtggcgcacaacctctctccgagcgctagcggtgacgacggggagcagaacccgcgccgtcgagctcgtactccaccgtccccctctcgccgaagtcttgggcgggaggaggcgctcgaggaggtcgaaagatccgcgacttcgccgcccgcgggcgatggagaaggacggcgagacggggagcgtcgcctcctcgtctacggcgatggcagcacgccccagggcgcgctccaggctgcgggcgcgctcctgcgtcacccgcccgtcgtccccgatccagagactccagcccgacgttggctggatgacgtggccgacttggtcatgacggcgcagcagcgcctaggcgccggcgggcggtcctccgccaccaaggcctctggcgctgctaccgccggctccgtgtcgtcgaggcggagggcgcggcgagcggcggccgttacccgccgttcgtccgccattccctcgtcaacgcctccgacccaagaagatgtgcgtggggggccggatgcccgccttagtatcgagcgccggcgcaatggtcgtcgtgctgcccacgcaacggagggcgcttcctcgtccggagcgccacttcggttcgggcacaggggccagccccccgtgtccccggttggcggtgccggctgtcgagcctttgtggcgagccttcggaacgtccgttggcccccaaggttcggcccccatcaccgaaaaatacgacggaagcgtcaaccccgccgagtttctccagatctacatgactgggatcgaggccgccgggggtgacgacagggtcatggcgaatttcttt

SEQ ID NO: 7093 - DNA, 7928 bp, Oryza sativa
ggcaaaggaaggcggccggacttggcgcgtccgttcccggcgattgggggcgccattcaagggggaattaagggggaaagagagaggagggaaaggggtttaattccccctaatcaatttgggaatcccatgcttgaatcgcgcggatttgagggaggaatggcgctagggttcacgggagagggagagaggacagccgggcgggaggaggacgatgacccgcctgacgcgcgggccccacgcggccggacgcgcggtcagcgcacgctcggtgcgcgtgtgcacggccggctcggctcggcctggcttgggcgcggcttgggccgggcggccggcccaggaggagaggagggggaggcggcctgggagaaagagggaggaggagggagtgggccgggaggggaagaggggcccaagaggaggagggagagaaggagagggaggagagggagacttcggccgcgggccgaggggagagaaggaggactttgggccagacttggcctaaagggggggagagagattatttttaggtttttctttttaataaactctaataattgtttttgttgcttaataattatttccggtgctctgaaaattcaagtaaaatttgagggctccttttagaccaaggagaatttaacaaaaattccccgggccacattcgaatttttcttgtacgcattttagtgtttgccaatttcttttcgaattttaattaattctattattccttttagaaaataatttttattttgggatgaatttatcaggacgtgacagcacggcaccctccgggcgcctgctgccggcacgcaccgccccgccccctcggggaggagatggggaaggggtaccctcctgcttcctcttcccccgggcgtcggcaaggcggctgccccccgggcccccgtcgcggggcccagaagcacgaccccctcccggggtagattgttcccccctacggctcccgcccgcgccatcgtggcctcgaggagcccgctcccccgacgccccgaccgcctgcatgtggtcaggatgttggcgcgctctgaatcgcagcagagggggaggacaccttgggggatgagggatgcctccacggagctgagattcagcacccgttggaccaccatcttgaagtcttcagggacccagtcccacttgcgcccctgatgggtcctcatgtagtcctcgggcccggtgtactgccaggcgccccgggcgcgccgctggagcggcgcgatccggcgacgaaggtagtcgccgaacaccatggcccccgtgagtccctgggatcgcagacccgccaggcggtcaaggacggcgtcgtagccgtctcccagatctaccgccgctcgccagctggaggcctgcgccgggggctggctcggaagtcggaggcgcgcttcgtcggcgaagggggtgtagaaccaatcgcttttccagtcgtcccactttttgcggaggacgcagggaatgtagcggttcagcacctgcccccgcggctggaagtagcagccaccgactaccgacggcggcgacaccggctgtacggtgaagaaccaccggaacagccggagagatgggcgcaccccgatgaacatctcgcacaggtgcgcgaagatggccaacatcattaccgcgttgggggtgaggtgcgccatctggagatcataaaactccagaatatccatgaaaaaagaagagaatggcgggaccagccctgccattgcgaaagagaggaagaagacggaccgccccaggtagtgtggcgtcgggcgtccctcgcccagcgcgaccacctcccggccggtggcagattccggcatgaatcggcgcggcagcccggcctgcctctcgctcacgatgcgggaaggcggcagcacgctaccgtcgagcggtgcggagccccgtgccatgatgccggcggaggaggagcttgagagcgagtgagtgcggcaagggtagggcacaggaaacgaagagttagagctcaagtggagaaggcaaggggaagaatggcgagaggaaggaaacgaatctcttcctcggcgtctttatacccttgccaacgctattcccggctcctcgtttcccgcgcccactacctcgccccctcgtttctcgcgcccacgcctccactaacccaactcgctcgtttgcggcgcacgaggcagatgtgcggccgtagcagttgagatgggacagatcgtgcgcgcattaaccacgctcgccaaacgcgaaaagcgccatcatcacgtctccaggcgaaacgaaccggctcgtcccgattcgcgcgctgctcgagtgatgtagcggtcttaaagaggccgctcattattgtcggtcggttttcccttgccgatgcgcgcgacttgcgaccgatgggttcctacccgcctgtagggaccggccccacctgtcaccgggcctaaggagtggcgtcacgcccgagcgcttcccacgaaggggcaatcgccctggcgtaacgccgggggctactgtcggtgacatggggccgagggtatcgtgactagaggcttgggtagccgcggtcacccacgtggcctgaccccctcgggggggtcgggcccgagggtgatgtggcctcccctccctctgtctccccgaggggtcgggcagctcccgtttcggccccgagggctggggcgccccgaccccctgtagttttggcgccacgtgtgtgggttaggtaaacacagcggcgcccacctaaccggatttatagcgggttggacgagcgcgccacgccgcatttaaaggggggcctgcgtggtctcccggtgaggggccccacgctccgtcacttcggtagcctcttttctggcatcctcaagtagaagtgccttgttgatcatatgctgaaaagtggggaagtcatgagcaagcaactggagtctcattccaactgcaattcccttcaagaacttcctgatcttcttcttgtctgtgtccacttcctcaggggcgtaccgagccaacttgttgaacatacttaggtactcattgacactgctgttgccttgcttaagtctgttgaattcttctttcttcatgtcaatagtgctttcaggcacatgagctgcacggaaagccgtagcaaactcatcccaagcaatgttagtgggttcagggtgtgcattgcagtaattttcccaccaatctgcagcaggtcctcttagctggtgagaggcgtagagtgtcttctcaacaggagtacactgtactaagttaagttttctatcaacatccttcagccaatcgtcagcctcgacgggctcgacggtctgagagaactctggcggacgagacctcagaaagtttgtcagcttggatctattgttgctcatgtgagggtggccatttccatgcgcattatgctgataaccagctacggctgcggctaatccttgcaagatttgtgtctgaactgccattaagtgctgcatgttattttccacatgaggtggggaagggaggcgttcttctccagaattgtgactggcggtgtggtgagagcggtgggactgttccatctctgcattacgggaagctgtgtgatgcgagcggttgctgcggcggggttgctcaacttctgcgttgcgggaagcagttcggtgcgaacggttgctgtggtgagactgctcattagctgactcatgatttgcttctgtcacaactctaccttcttcaaaaccgaagcgggctggcgcacgggctgcacggcgggggcggctagccatctaaactcccagaagagggcgaggtaagaatcaggtaagcacttaggagggcaaggagtaaagtaaatagcaactcagatagcacacactaggcataaactgaatttttcaaatcataaaatcacctagtacaacaggtgtggacaagtcacagagctacgccgagcttgactgtgcgcacaccacctaggagaaccagactaccaaacaacacccacaacaaacacacgcacgcactacctcgccatgactccgaaagagttggcggcggaacaaaagggcctaacacacggacagctgctgaagactgcctcctctactcctcgtcggcctggctgcctcctgtagtcggctcctcagacgaagaaacgtcaatcggctgacgcgaagggaccggcggaacctgtcgagggccgacagcagcacgggccgctggcggtgggggagctgggtaatcgaatcggaacacggtggaagaaccaacaacacgcttccgcgcggtgtggataaagcgtgggccacggtgggaggaagcaactggggtgtgtccgggggtgtaggaggggctaactgggtgtgggtagggggagtacactggtaagtacggcgcacgcgagctgggggagcgcgggccactgggagtgcgggcagagccgcgggagctgtgggaggacaggtggctggcgtggcagaggcggcctgagtcccaggagacagtgtcaactgaggtgacaccctcctcggccagacgggcctccagagcggcgtagcggcgggcaagggagcggtaagcctcaaggagtaggtcgtgctgagtggcctgagcctccgaaagctcaaccatgcgagtcagcactggctgagactcgctgtacggacaagggtacctggcgtctgcgtggccagaaggaaggcgtggaagctgccggaaggctgagcccccgagacggtggctgtagtcgtgggccaagcgacgaagcgcagtccaggagaggtcctggtacgcgatctggagagtgggcctggccacagtgaagtggtgtgggcgaaggccaactccgtgtatacctccacgagggtaaaggtacacagagagctcacagtgagggggaacacggtccacggagtaccccgtgtactcggggcacgagaagccaaggaagcgggcgaggtcacgaagctgagcgacgtggtgaccctcaccaaaaccgtgggaactgaagcaaactattgaaagagggagccatctacaattttgaaagagggagaaaagatcagtaaccattttagaaacaaactattgaaaataaggaaaccaaaagaagccttagcttttcgcaagtagttttgaacttagtatccttagggtcgtcctaaatgtcgggtttcgccctagggccaagcctgtgctcttataccatctcttgtcacgccccgaactagtaccgaccggaactagcccgtgacgctctaaattaacctgttaatcgataccagtcccaggaaacggtgctggtatcacaggaagacggattatcacagcaacagaggtctctttattatagagtagaggtacagtcatgttgggctgtggacagatcccgagctcacaactgcattacaaaagggaagcggaagccaagacatggaccaaacaacacaggcgcgacttgggaactaggccgaaaccctaaaactcatcgtagccggcttgctcctggaagaactcctcatcagcaggatccgctttatcttcttcagcaactgggggggattatttatatagagcaagggtgagtacgggagtactcagcaagccatgggaaataagtgtttaatgcaggcttcaaggaaaggctgttgtttttgcaattgattttatttgaactcttttctaaaaacgactaagtgagtgcttctcaaacgacacggatgagacagtgcatctcgtccggtcggagtatgtgcaatgcatcagtctttagaattgaaacaaggttggcacccggccaacaacttttcaacggccacccgggccaacaacttttcaaacggccacccgggcctagctgatcccatcagctacagatttttcaaacatcgaaccccttttcacaacagcaatttcacaagcagtagtcaaacaaaactacggtagaaatcacctcacatccgcccatgaccgtgggcacgactgttcgaacagtttgttaacctctgcagagggggtacactttaccctcacgacattactaacccggatcaccagcccgtggggatcagccacgtcgggagacctccaagctttcatgacaaggcatttcgaaagccgacacaggtttaccatatgccgacgagaggggtcccagaccaacaacaggtttggtcccagaccatactgtgccaggaagcccaggggtcctccccgacaccaccccggcgaatccacatgtctctcggcatcaaggctcccctgataagctagttactcagccaggggtgtcccattccacccatgtggtcgtacttgtcttatgtttggatcaaattccaaggaaacggtccttaagtgcaagagcgggaaactgtacacccggtacattccccggtccgcggttttggaaattcatttagttcgcaagcaccgacccaggtgtcgggttttccaagtcttttgtaaaacccaagttttacccaagatgtttatcatattttaagtttgaaggcgaccgtcgatactcgcacagagtgcacgaataccgaggcgcaactgggtggttacaagggaacatggtgtaacgattaacaaaggaaggatcaaatgcaacaagttaggtatgcccactaatctgcctcgcaggcggggcaaacatattacgtgcaatcctatcaatgcatgatattttgcaagcaatataattaagttcaaatataggctcaagatgttcaaaggtggcttgccttgctcgagatctggagcttgatcctcgaaatcctcgcactgcgggtcttcgggctccgaaactacacgcgaaacgggacaactcaacaaacggcgaagaataaagccctattaatgacctctaagcatgccattagatagatctcgagatttgaggaattttggaagttgaacggagtcaaacggatttacggttgggaagatattgaatttctaagattattggatttttggtctaaaggaaaaaggatttaattaaatcctttttggaaaagaaaagaaaagaaaagaaaagagggagggaatatagacttttcctcgggcggctagggcgcggcccgagagaaacggagcggtccggctgagctaaatgggccggccggcctaaggcggcccaagcgcgcgcgcgggaggggaggagagagagggccggtggaccgggctcaccacgcgtggtcccgggtgggacccgcttgtcagcggctcggctcaccgtgcggagggagcacgcggcgcggcgctagggtgggggagggacgcggtgcacgcgcgcggttcgcggtggatgcggatgcggcgggcccacgcgcagcctcacggctcgcggtggaacgcgcgcacggggaggggctgaccggggtcggctcgacccggccttggccgagctggcgctgacgtggtgcctacgtggcgcctacgtggctgccacgcgggccggcgggaggtagacgacgacgccggccggaacggacggcggacgacagcggcgagcgacggagcaaaccacggcgatacaggcgagagcgagcacaccaggtggttgcacaggacaaggggagacgagccaacggctcggattcgccggagggagtgcgtcggcggcggattgcggcggtggcaaccggcggcgagggaagggggaaacggcgacgaggtcacgaggggccaattcccggcggcgagagcatctacgtggctataggaatccattgctagcgtcggattgggcggagctatgccgagcaaggccggcgacgagcggtgcttccgagctcgggcggcgacggcggcgagcacacggcgagcgacggcaacggccagggcggcgccggctagctacggggaggctactcgtgctactacccgagtctaaggggaggagatggagcgaggagggagaacggggagatgctcta

SEQ ID NO: 7094 - DNA, 5028 bp, Oryza sativa
atcacctcctcctcgcccgaatttcgccggaacaccgtcgcccgcgccggcttctccttcctcctcggcggcatctcctccggctgcccctttcgccatgcccgtgcgtcagccggcgctgccgtcccctccctcggcacggtgacgtagccctccacctcgtccacccctcggtttcgcccggaagccgccgcacatcgccgcgaacctctccatccgcctcgccggagttgttcggccgcccgtccctcctcgcccgtgcaccggtcggccacacctccaccacctccggcatcgcagcggcaaggtcgtcctcggcatcgtttcccctccatccaaacccctccgcggtccatcagcgtcgtctccgatcgttctcgtcgtcgacgtcccatcggtcgcccggctcgtcgtctcgcggcgccgcctccgtcgtcggcatcgcagcggcgtggtccgcgccatcctcgcctccgtgcagccgctgccggcagccctcatcgcctcctcgccggccccggtcgtcgtcgtcgtcgtcgtcctctcgtcgttcccggtcgtcgtggcgttcgtccctccgtcaggccgttctcgtccgtctcgtccgcgtccgtcaagtgtgccgctgcagccccgtcatcgtcttcgtcctcggctccgcgtcgtcaagcctcgtgccggccgcgtctcgccttcgtccaaggatggctgccgaagccgtcccctcgccgttcgtctccgttgtgcccgtctgtctccgccgcgcccgttcgtcgttgtcgttcccacgcctcgtcgcgtggtggtaaggttccctctccctcgctgccccgtcctcgtcctttcggtgtcccccgtacccgttgtgcggttgtcgaccccggtacccgtgtaccggtgtcggtagtcgttcgcttgtacgtgtggtgaccgtgttagtgtgcccgctcggtagccgcgtggtttccacgtgtgcagcccgtgtggtgtctagtggagtccgtttgtcggccactcgcctcggttgacacacggggtccgcttccgtcgacccgtggaccgtctctgtgtacccggtctaccgcggtcctttaggttgacatgtggggtccgcatgtcaacggcgcagccttcctgtcttttccaggctagcgcttacacctgttttatagttgcaaaacctaattacaataatccgcaaatctccatataacagcattaaacttcggatgatcatatcttggtcatacgagctccgaatcgacccgttcaagtctcttaatgtttgttataacctaaagaactgtgtgctttctttttatgtgttgttattgcttctttttaggcttgtagctttgcttgtgtgcttcgcgtagtcttcgtcgttccggaggttcccgaagcgtggttcgcggccgtcgccgaaggttcggaaggccgttctctctgagcaaggcaagtcacatcatccttgagcatattgaatcccagtttataaaattattttgatttaaattaatgcattatcgctttatttaaattcccgcgttatcactgttttatttagccatgcctatttacctttgttaagaccttattattgctattgttattattaccttgttcaccctaggaaaacaaaaccccaactagtgggtactctattcatggttccactagtatgaatttaggtagatgcttcgctgattaattaggcaacattaggtgattttataactttagactttgggaattctcatatcatttggacactatggaatggttggcttatggtggaattggacatacccctctcttcctctttcaaagcccctaaaacctgtttttcggtggggtttgggtgcatgccagttgtgggaagtagcaccccggccactataaggattaagctcgggcctctgttgcaaagcactaccgtacttccacatgtctagtgggtaaggcttagtttgtggctcagtctggttataaacaaaagtacacggattggagatggatgaagtcgggggtcgatggacattctccagggcaaatgaaggctacacgagctgcggcccggtagtcgagatgtcatggcacagggctggtgtcctgctgctagggggctcaatcctgcctgcctgtcccgggggttccggtcgtaggtggggttgggtcggtactcttgtttatggctaggatgggttgggaactatgtcacgtcttccgtccgtataccgtggtggtatgtggcacgtggttacacgtgaggaaaatgtgtcttgtgggtaaagatgtacacctctgatcagagtaaaacctattcgaatagccgcgccctcggttatgggcaagccgagcaatgtacccaagttagtgttttaattcttaaaatttgctcaacaactaaaatgtggaatggttggcctgggttggcttgggacgagctgggacccagggtcgggttgccagttcggtctgaatcatcgtaggccttgggttaaggcaggttcgtgagggttcacggccttgattaataatattgtatagctctaggatcgtgtttacaaaatagctttgggcaactaagtgacttttaaatgttgtttactgcaaaacttaacccctattattatccccttgtacccccttgcattaatcatgcatctgccggtgtgacttgctgagtactgtggttgtactcatccttgctcaatctttcccccccttcagtaagagaagctttggagaagaagtcttaggtggagtcctggcttataccccagttgagcgcctgtgaagatggagccgtaggcccgctagtccgctgctgtttatttttgattgccaggcctgaagtgcctttgtaataatgtaaatattatcgatataataaagatgtgtcttttatatcatgtttgtgtggtgtaccccggcttttcctgggacggggattaatacactagcgttcgggaaaaggcaattttcccggtcgcgacacgtgccgacatcgcagcccgagggggagcgagagaagaaacggctccgcaagatggggggaccgagccatgccgggggaacctcatctcgcccccgaggtggtcgtttagccgacctcctcgcaggttcgtccccgagcacaccgcggccgtattcattctcccatctcccaaggcgagtttccactcacccgcttctttttgtcttctggtttttcttctgcctcagcgagatcccgtcgcgccccccccccccccccccgccattccaagtccggccggtctgaggccgaggagacggcgaccgcggaggcccggaggcgggaagctgaccgacgagaagccgcggaccgcctccgggaagccgaggaagctgcccaggaggccgtccgggttcgccaggctgaggaagccgctcgggaggaggccagactccgccgggccgaggagtccgtccgggaggcggaggcggcgcacgcacgccaggcagcctgccaagcccccgactcgactccgcccgaggcgacgacgacttccgaggccacccacgacgaggccacgggcgcaccgctcgggcccgacccctcgggcaacgctcaggacgagccagcttcgggggacgcccccgagtccggcacgtcgatcggcgggccgagccgtgcggcatcctcactgaggcggctctcccctctgccttccgctgccccaccaagcgtggagcccctcctgcaggccttggccgccgcgaacaccacggtgttggacgggttaagtgcccagatggaggtcctgcaggcagagcgggcggagctcgacgcggcgtgggcgcgcgtcgaagaggggcggcgctcggtggaggccatggtggaggcgggccgcaaggcacaccgccggcacacctcagagctcgaggcccgtcgtagggacctggcggaggtcgccagggaggtggaggaggagcgggagactgccctcatcgccaccgccgtgttcaacgcggcgcgggacgacctctgcctccaatacgggagccgggcggcggagctagagaagaagctcgacgccgcccggggagtccttgatgctgccgttgcccgggaacggcgggcggcggagatcgaggcggcgtcccggcagcgcgaagaggcccttgaggctcgcgccacggtgctggaggagcgcgcccgcgcgaaggagagggacctggcggaccgcgaggccgccgtcgccatccgggaggcaacactggcggcgcacgaggccgcctgcgctgaagaggagtccgcactccgcctccgcgaggacgcgctcaccgagcgggaacgagctctcgaggaggccgaggccgcggcgcagcggctggcggacagcctgttcctccgcgaggcagcgcgggaggagcaggcgcgccgcaatctggaaggcgcccgcgccgagagggccgcacaggatcagcgggccgctgagctcgaggcgcgggcgaaggagctggacgcgagagcgcatagcggcggggcggccgcgggcgacggcgacctagccgctcgcctcgcagccgccgaacacaccatcgccgagctgcagggcgcgctggactcgtccgccggggaggtcgaggccctccgcctggcgggcgaggtagggcccggcatgcttcgggacgccgtctcccatctagaccgcgccgggcggcaagcgggcctctgggcgggcggaccgcgaaatacgccgccaaccaggggggcctcgcccagcgcctctcagagatggccgggaccctccagcggctccccgaggagctcgaggagacgatcaagtcatcctcgagggaccttgcccgaggggcggtggagctcgtactggcaagctaccaggccaaggaccctgacttctccccgtgggcagcgctggaagagttccctccaggaaccgaggacagcgcacgcgcgcaggtccgggacgccgccgaccacatcgtccacaacttcgagggtacgtgtcacgtcctgataaattcatcccgaaataa

SEQ ID NO: 7095 - DNA, 12949 bp, Oryza sativa
gctttggtggggagggggagtggggattcatttgaggaggaggaggaagggcgtgggtggagggtggggcccgcatgtcagtggggggacacgtggcggtcaaggggagcgggccgtgccgcgaggggagcgggtgcgggcgtgtggctgggggggaggtgggttgggttcgggggggacacgtggaggggttttagtgggtgggaatggtgtttgctgtgtgtggacggtgtgggtatgataaagataggtttaggttttttttttttttgcgctctttggtgatttggggtttttgctatctctctttttttaaaaaaaagataatattgtagttctggttagctggaagtctgtttttagattttcatttagtgcaaatgtatatgtatattttttaaaaagttgttttataacactacaattataacaacttttatgttggtggagttgtaatttatgttgtgattgtcttaaaacgccattgcaatattggccataaactttatattatgtatagtaggatgttttcttcatgcgtgcttgtaatatactccatccgtttcacaatgtaaggctttctagcattgcccatatacatataggtgttaatgaatctagacacatacatgtgtctaaatgaatgtgagcaatgctagaaagtcttacattgtgaaatggaggaagtagtaaggctctcctattatttttgctccttttatcgttagattggcttatggcttcttccttgcttgttaattttccataacctcaagtagactgggttatttatttatatctaccactaagaggaggaggcagggcgaggagaaagatgtgttggccgtaaggaagagggagtaaaaggtgaagtagtctatcgtccttggaggcagtgccgtggacagcgtgatgacgataagatgaggcggtttgcagcttttttgttttcacaacaggggcgtgggagagtaggagcccaggcctatttgtgaaagaaggtttgcaacatctccataaaaatggaatggctcatgcatatttgtttcatgacgtgacacgataattttgcaagaaactttagtgattcagtgttctagataagatagctaaaactaagccaactattgttttatagcgtccgtgtaaaacaatcttctcacctctaaaatcagatatccaacacccctaagctattcaaactattcaatttaccccatgtttaaagtagctgtgtttgcctatatatcattgacgtggtgaaaaagtctaccacatcggctaacatcaatgtttggcgatgccacaaacaaagttatgagatagtaagaagtaaagaatgtcatatttgaaaacaaaaatgaaagaatatgctatatggaccgcaccataaaaacacagttctgagtttgtactcttcatatatcttttactaaaggacacaagctgacttttataacagaatttttactaggatgaatgagccaaagtggacacaagatcttgcctgccatccacatgaaaaacaaaactattcctcttcttcttcttggattaaaagatgatggatgggcccaggaaagaaacctggcctagaaagggccggccgggaccggagcatccgatctcctgtcaaaaccgacgcccatcatgatccatgaacaatgctaccctaatcaatcaacatgcatatgcaagcatggctaatggtcccacggagagatcgatcaccaacccgaccggctgaccccacatccatgcatgcaatgatgcaaatcagcatatacatgaatacatccgtccatgcggttgagctaacaaaatgatgaaacgagatgatcgccagattaatccattgtttacatgcagccaaagtacaatgacagttgacaaccttcaatctgcaggcaataatttacacttttcttttaaataaaccttttttttcctcttagaaattaaaccgaagctgtgagcaagagcacatcatggtcagttcttggaagtcttttgtttgacacacacttgaattgctcccattttttcccaaccaatttgccacctaccatgcctatctgcacgcacccgtcgcgcggtttattagcctcttttctcctgcgaatcacggcgagctgatcagcgattaggcgaagcaaacgtaccaaattataatgggtgacgcccagcggcggcagcttctcctcgtcgccctcatgctcgccgccgccgcagaccactcgctggccggcttcttcggcggcgcgccgccggcgtctggtcccgccgccgccgccgccgacaacgacgaggtacgttagagagacatagtatcgttaattactggaaaggttaaagccggcgatttcgttggtcgatcgttctggctaattctgatgttcttttcttgtttcttttggctgatcgatgatgcagaagtgcagccggacgtgcgagtcggagcactgcctgggcacgtatgcacgtacgtacgtatatatataccactctccctggccgatcgataattataatttgtcagtttctcttgctgtaatttgtgttgtgagcaagtgttaattgttgtgaaatttgcgtgttgcgtgtgcagaggcgccgttgatgcggtacggcaagtactgcggcgtgtcgtacaccgggtgccccggcgaggccccctgcgacgccctcgacgcctgctgcatgctccacgacgcatgtgtccaggccaccgacagtacgtatccacaccaggtttaatgtttggtgtgctcgtttgtatcggggtggccgaaatactgaaattttgaaaattttggttcgaaattttatgaatttttgaataaaatttgacaaattttgaacataatattatcaaattcaaaaataaaaataaaaatttcggccgaaataatatcgtatcaggggttccgatagaaccgaaattttgaaccctgaattccacaccaatctttttcacttatcattttgatcattttgaacatctacacattgggacaaattcaaatccaatataagattagagagagggagcttgtctcctcctttctccctcagcttcctattgtttctccctccctcttttcttctatcaacggtgatccaatagaatagagccggaaaactcgatcgagttctcctgcactcatgttggatccgcacctatcgacatacggtgtaggggtgaaaacggtcacggaaattcccgatcgaccgggcgccgtttccgtttaaggggtaccgtttctaaccgtatcgtttttgactattttttaattttgttttttctaatttcttttcgcatcgtattaatatcgatactaagtagtttaaatgataaatatggtcaattaccggctgatcgagcatcgtttcagaagagatgctaccgattccgaccgtttccgatcgttttcacaccctaatacggtgtacactgataacgggatgtgtctgtcgaaattaatgcatgtgtgcagatgactacctcaacatgctgtgcaaccagagcctgctggactgcgtggcggcggtgaggtcgccggcggcgaggatcaggacgttcgaggggaaccagtgcaacgtgacggacgtcgccgacgagatcacgtcgctcgtcgaggccgccgtcttcgccaagaggatcctgcataggccgtagctttaattagctagcttgtagccgccacatgtaattaattgttgtttttgctaattaagctgctactgtgcatgttgtctggcatcatagatcgatgcacattgattaattaattccagtcgtctccggatgctacaaaaatcgaagctagagagtacacgtaagtgtagttggagttggtgatctccctacacgtgtctagtttgcgtaagcaaggcttttttgttttctcttctttttttttttgtcatatcctcgatcgtcaacttgttcatgcacatcaatctcagatgtgctcgcagttagcacgtgcgtccgaatcatgattctgctcggaattcatttttgtgaaggcccatgagaacggtatttacaagctagtatattttcaaataaaccttttgtctttcgtgtttacaccaagctagcttgcgtgtaaacaagcgtagcatagcaccatgcgtacgtttgattcgaaaaagaagccaaaagtaaaaatggttaattaaatccatataattatagatttgctcgttttgaaaaaataatattactagtcatctatttgaaataatgccatatattacaatcttatatatattcaagatatatcccctcttgcgaagtgagtatacctcaactgattaggttattgtggtgaaaccagcccactcaagtttaaatcagtcgcacctaacggtgcttgtgctagatccgtcaagcccagggcaagttggtcatgctcaacagtaacaccgttgctgctagatcctcaagaacatgcctcgttggttggattattgcgtggtcgtggaatcgttgtcgattgccagcagtgggagatagagaggagagaggggcatggaagaaataagaataaggtaatttcattaaaaaaatttttgataaacacatcaaaaggataataagtagtgacatataactaataggtgtgaaatcatgacgaaatggctccaaatagataaagaataataatatattttttttaaatgtaggaaacttataatgacacttctccaatgaatgtaggaaattttatgttctccatccttggaacaatgtaatagtcaaatgtaatcaacccatgtctgaatcacaaccaagcaaacaaaaaccatctcaaatctgacatatataaatcgatggatatagtgatatggttcaacatctatgctgattaatattatagggataaagtaacatttggtagattattatgtaagttacaatctgcacatcaaactctttaaaccaaaactacatcgaatcaagcattaaattaccataattgtatattaatttattccatccactcctaaggaatactacttcctccatcccttaaaaaaccaacctaggataagatggaatgtttcccatctgaagttagcttttttttttttgacgaagtattgactagtagaaaattataacccattggactatgcaagtcaaaatcaaatcagaatccattggatttctataaatcaaagatcaaatcatacatggttacaagtattaactactgcaataacattcatatcaaaacttcactttgtagcatcaatgcgaaggcattcaaatccaagtcaaaaattaataggggtgtataaccccctgaaaacagtggtagaggtaggaggacgaccagtagcctcgtctcctccaacagttcctttttttatataatcctctaattaattagataattaacctaagcaatgatatattaagctttatctaagacttttaacaaagtattatccatcaaatccttctcaatcctagctccgcctccgcctaaaacgagaactatagcaacatctaaaaacactgtagcaagtactcgtactatagcatccttaataactgacaacgaaccctctgcaacttgcacgtctcagctctcaaccggacaacccccgatccatcaagtacaccgacgaatgcctacgtgcgcagcacggggaaacagtccggttgaacgtgcatgagtgcatcacctcgccccataggtagggcccgtttagttcctgaaaagaaaagtttttttttttgtcacatcggacgtttgaccggatgtcggaaggggttttcggacacgaataaaaaaactaatttcataactcgtatgaaaaccgtgagacgaatcttttaagcctaattaatccgtcattagcaaatgtgggttattgtagcacttatggctaatcatagactaattagactcaaaagattcgtctcacgatttcccctctaactgtgcaattagttttttaatttatctatatttaatactccatacatacgtccaaagattcgatgtgatatttttggcaaaaagtttttgggaaataaatagggccgtagtaggccgggtgaaaacagtcgtgaaaatttccgatcgaccgagagccgtttttaataggaggtaccgttctcaaccatatcatttttagctattgataaattttatgttttttaattttctttttcatcgtattaatattgatgtagattagtttaaatgatatatataatcaattaccaaccgatcaaacatcgttttcgaagagattgtaccgattccgaaccgttttcacccagccgcatcactgcatccgcagttcaccggccaaacccaaccggctgtgttcgttcagtggagttggtaacacattctctccacacgaaaaacagagcgacgtattttcttatgattaattaagtattattattttttaaaaaagataaattaatatgatttttaaagcaactaggaaggtagcccgcgcatatgcgcgggcatgtgcgtgaaatttactgtgaatgttcatgtgtgggtggtttctataaaaaatattcttttgctttatcataaactaaaaatgaacttatttaacatgctttgagcactggtagtttttaaattgtgaactaaaattactttaaaccgtgtagtttttaatttatgagtgggacatcgaaaaaattagtaattagctgttcaatatctgtgatattattttataatatcaaaaggaattggacagaaaaacaatcacaaaagtatgatttttcccctccctaccaagtctgcctcacattcacctccaacgctgccaccgcacccgcagccggtgaggtggctctctgggggcggggtatcgaggagggcccgtgcgcctaggcccatgggtccgtattgttcccaaactcgtcgccgctgcagcgcgaaggccatgccggcgccgatgctccgccacacaccgcagttaaggggagcacaacgtgggccaccgcctggttcatgttgagcagggcgccgcagagcacatgctattgcagtcggtctcgcagtggcgtgctgtgctaccgtaccctccgctgccgatgtcgtggcgtcgacggcgtcagagctatatgcgagccgcacatggcagaaaggggcaaaatcatactttcgcaattgtttctatctccttttcctttggataacaaaataatatcgtgggtatacaggcagcttattaccattttttgcagtgtcttgtggcagatatacattcttgtagtgtctcccagctaatcacacgtttttttaatgtcccgtagaaatttttgcctttattaagtggaggcctcaatatgcatgtgggtccataatgtaattttttgttagcaattaaatatagtcaatatgggtattaagttattgatttgacttaaaaaaaaaagttggctagacctaataggtggagatttgtttgtggtcttttctttgcccataaaaataattttaattttaattatcatagagataggaaaaacaaagaaaagtaaggaaaaatagagagggtttggatgttttctttattaaaaaaagagtgatctgatgacctaaaataatgtgttaatgtttaagtaaaaaaaaccgatggttggaatttttttttaatttaagtgagacaagtaacagcttagcaaaacgttcatgtactttaatgcccatagggatgagaggaagggaatatggtttgggatgatttttttttaaaaaaagatcgaataacgatgtaaaataatgtgtctattgatttaagtgaaaaccaatggatgaatgtttctctaatttaagagtgtcacacaatagtttagaaatgtttataagatgtttaaaggactttaatgcctatttgtgatttttttccataaagacaattttaattttaattgtgatagggatataaaaagagaaaggaacagaaggagcgtacaaattgatcagtatgtgcgtggtgcacgatatgcggacgtgggaggtttttgtttttaagatatatctaacgatctagatccaccgatttaaataaaaatcgaatgtaagatttttttttattttattagggttccatgtggcgacttgggattacttgtattttggggggtgtttttacgagcaatacttacgagaatgggagattaaaagaagggagttttttaaatagatataatctaccagttgaaaataacgggtatgtgaaaatcaagactacatgttttgcttttatcttagaatttataggaatttcttttatttattatagtgccacatgacggcttaatagtatttgtagaaagtttaattaacttttagtatataatagataatatatagattttatatacaagatatagtttaactgcatatatttatagagtactatattttatttttaaatagtagaaaatcctattttaaagcccatcgattttttttcaatgacactacgatgtatgctttttgtttctttactttatcgcttttatcgtataagtccgtacataggtttttcttgaacgtattattcatcgtttttcctttagatgtatgtagaacagttttttttcctaattccggcccacaggaggtgacggagcgtggggctcctcaccgggagaccgcccaggccccctttgccggttcggccgggggcgctaagtgaggttcttcaccctcgatctgtggaatgttcgcgagagagcaaatgcacaagacacgggcgatgtagacaggttcgggccgctgagaagcgtaataccctactcctgtattctggtggatctgtgtgtgaaggagttacagagagccggagagcaagagagttcaggctctagaacccctcttcctctttctctcctctatgagctcaggtattctccgagtcgtcccccctttctcttctccgtcctttacttcggtgggcaaggtcctccttttatatctcaaggggataccacatgcaccacttctacctactcttcttttgggtggggactcaccctatcttgacccaaacttggctcgcgccttcgcctggaagctaaatcacagctagtccttgagtaaggcccagtgccgtcactcgcctgacacaggggataaccctgtcattccttcattaatgggtggagatttgcaatggccgctgtccgaatgaccctccgatgggatgggtcatacctacctccactccgccggaagcagatgcaacgtgggagcacggttgtctgcctatgacgtgaccggcgtcagaccagtcacagaccggtcactcttgtccaccgcgcgtcagtttagcatgccgcacgtctgcctttcttcatacaatgacttccttgctatggttgcgatgaagcctggaacgaatctggccgggactgacataccaactccaggagttagcacgccggctccggctagggacgagtgcctggaggctctcatcaatccgacgggacggggcgaggcgtgtgacaggccgcctgttgccacctaacccgcgatctgaccggtctgtgaccggtcacacactgcgaccggtcacggaccggataagcgtgcgctacgcggcattaaatgcggcgtggcgcgctcgtccaacccgcaataaatgcggttaggtgagcccctctgtgctcacctaacccatacacgtggcgccaaaatcacagggggtcggggcgccctagccctcggggccgaaacaggggcggcccgacccctcggggagacagagggaggggtggccacatcatcctcgggcccgacccccccgagggggtcaggccacgtgggtgaccgcggctacccaaacctctagtcacgataccctcggccccatgtcaccgacaatagcccccggcgttacgccagggcgattgcccccttcgagggaagcgctcgggcgtgacgccactccttaggcccggtgacaggtggggccggtccctacaggcaggcaggaacccatcggtcgcaagtcgcgcgcatcggcaagggaaaaccgaccgacaataatgagcggcctctttaagaccgctacatcactcgagcagcgcgcgaatcgggacgagccggttcgtttcgcctggagacgtgatgatggcgcttttcgcgtttggcgagcgtggttaatgcgcgcacgatctgtcccatctcaactgctacggccgcacatctgcctcgtgcgccgcaaacgagcgagttgggttagtggaggcgtgggcgcgagaaacgagggggcgaggtagtgggcgcgggaaacgaggagccgggaatagcgttggcaagggtataaagacgccgaggaagagattcgtttccttcctctcgccattcttccccttgccttctccacttgagctctaactcttcgtttcctgtgccctacccttgccgcactcactcgctctcaagctcctcctccgccggcatcatggcacggggctccgcaccgctcgacggtagcgtgctgccgccttcccgcatcgtgagcgagaggcaggccgggctgccgcgccgattcatgccggaatctgccaccggccgggaggtggtcgcgctgggcgagggacgcccgacgccacactacctggggcggtccgtcttcttcctctctttcgcaatggcagggctggtcccgccattctcttcttttttcatggatattctggagttttatgatctccagatggcgcacctcacccccaacgcggtaatgacgttggccatcttcgcgcacctgtgcgagatgttcatcggggtgcgcccatctctctggctgttccggtggttcttcaccgtacagccggtgtcgccgccgtcggtagttggtggctgctacttccagccgcgggggcaggtgctgcaccgctacattccctgcgtcctccgcaagaagtgggacgactggaagagcgattggttctacacccccctcgccgacgaagcgcgcctccgacttccgagccagcccccggcgcaggcctccagctggcgggcgacggtagatctgggaaacggctacgacgccgttcttgaccgcctggcgggtctgcgatcccaggggcttacggggccatggtgttcggcgactaccttcgtcgccggatcgcgccgctccaacggcgcgcccggggcgcctgggagtacaccgggcccgaggactccatgaggacccaccaggggcgcacatgggactgggaccctgaggacttcaggatggtggtccaacgggtgctgaatctcagctccgtggaggcatccctcatcccccaaggagtcctccccctctgctgcgatccagagcgcgccaacatcctgaccatcatgctggcggtcggggcgtcgggggagcgggccctccgaggccacgatggcgcgggcgggagccgcaggggggaacaatctaccccgggagggggtcgtgcttctgggccccgcgacgggggcccggggggcagctgccctgccgacgcccgggggaagaggaagcaggagtgtaccccttccccatctcctccctgagggggcggggcggtgcgtgccagcagcaggcgcccggagggtgccgtgccgacgtcgcagcccgagggggagcgaaagaagaaacggctccgcaagatgggggggaccgagccatgccgggggaacctcatctcgcccccgaggtggtcgtttagccgacctcctcgcaggttcgtccctgcacccaccgcggccgtattcattctcccatctcccaaggcgagttttcactcacccgtttctttttgtcttctggttttttttttctgcctcagcgagatcccgtcgcgccccctccgccattcccagtccggccggtctgaggccgaggagacggcgaccgcagaggcccggaggcgggaagctgaccggcgagaagccgcggaccgcctccgggaagccgaggaagccgcccaggaggccgtccaggttcgccaggctgaggaagccgctcgggaggaggccagactccgccgggccgaggagtcagtccgggaggcggaggcggcgcacgcacgccaggcggcctgccaagcccccgacccgactccgcccgaggcgacgacgacttccgaggccacccacgacgaggccgcgggcgcaccgctcgggcccgacccctcgggcgacgctcaggacgagccagcttcgggggacgcccccgagtccggcacgtcgatcggcgggccgagccgtgcggcaccctcaccgaggcggccctcccctctgccttccgctaccccaccgagcgcggagcccctcctgcaggccttggccgccgcaaacaccacggtgttggacgggttaagtgcccagatggaggtcctgcaggcggagcgggcggagctcgacgcggcgtgggcacgcgtcgaagaggggcggcgctcggtggaggccatggtggaggcgggccgcaaggcacaccgccggcacgcctcagagctcgaggcccgtcgtagggacctggcggagatcgccagggaggtggaggagcgggagactgccctcatcgtcaccgccgtgctcaacgaggcgcgggacgacctccgcctccaatacggaagccgggcggcggagctagagaagaagctcgacgccgcccggggagtccttgatgctgccgctacccgggaacggcgggcggcggagatcgaggcggcctcccggcagcgcgaagaggcccttgaggctcgcgccacggtgctggaggagcgcgcccgcgcgaaggagagggacctggcggaccgcgaggccaccgtcgccatccgggaggcaacactggcggcgcacgaggccgcctgcgctgaagaggagtccgcactccgcctccgcgaggacgcgctcaccgagcgggaacgagctctcgaggaggccgaggc

SEQ ID NO: 7096 - DNA, 5723 bp, Oryza sativa
  unsure (1)..(5723): unsure at all n locations
cctcctttttccctctcgccggcgtcacctcttgtcgccgttttggccgccagccggagcgccagctcgcgccttgaccgccctaagtcggttcccaaaccgacattgccatcctttaaacccaagcctccccctttcccttcctctcccattcgcctccgcgccattgccgccgcccccgtgctctgttcgtcgtcaccgttcgtcgttgcgcgtgtcagaggagccggcacgagcaaagacgcaaaaggggactccgggcgcgccctctccttcctcttccccagcccgaggccggagagattactcccgcgccgtcggcctctcgtcactgcgcccgccagcacggtagagcatctccccgttctccctcctcgctccatctcctccccttagactcgggtagtagcacgagtagcctccccgtagctagccggcgccgccctggccgttgccgtcgctcgccgtgtgctcgccgccgtcgccgcccgagctcggaagcaccgctcgtcgccggccttgctcggcatagctccgcccaatccgacgctagcaatggattcctatagccacgtagatgctctcgccgccgggaattggcccctcgtgacctcgtcgccgtttcccccttccctcgccgccggttgccaccgccgcaatccgccgccgacgcactccctccggcgaatccgagccgttggctcgtctccccttgtcctgtgcaaccacctggtgtgctcgctctcgcctgtatcgccgtggtttgctccgtcgctcgccgctgtcgtccgccgtccgttccggccggcgtcgtcgtctacctcccgccggcccgcgtggcagccacgtaggcgccacgtaggcaccacgtcagcgccagctcggccaaggccgggtcgagccgaccccggtcagcccctccccgtgcgcgcgttccaccgcgagccgtgaggctgcgcgtgggcccgccgcatccgcatccaccgcgaaccgcgcgcgtgcaccgcgtccctcccccaccctagcgccgcgccgcgtgctccctccgcacggtgagccgagccgctgacaagcgggtcccacccgggaccacgcgtggtgagcccggtccaccggccctctctctcctcccctcccgcgcgcgcgcttgggccgccttaggccggccggcccatttagctcggccggaccgctccgtttctctcgggccgcgccctagccgcccgaggaaaagtctatattccctccctcttttcttttcttttcttttcttttccaaaaaggatttaattaaatcctttttcctttagaccaaaaatccaataatcttagaaattcaatatcttcccaaccgtaaatccgtttgactccgttcaacttccaaaattcctcgaatctcgagatctatctaatggcacgcttagaggtcattaatagggctttattattcgccgtttgttgagttgtcccgtttcgcgtgtagtttcggagcccgaagacccacagtgcgaggatttcgaggatcaagctccagatctcgagcaaggcaagccacctttgaacatcttgagcctatatttgaacttaattatattgcttgcaaaatatcatgcattgataggattgcacgtaatatgtttgccccgtctgcgaggcagattagtgggcatacctaacttgttgcatttgatccttcctttgttaatcgttacaccatgttcccttgtaaccacccagttgcgccttggtattcgtgcactctgtgcgagtatcgatggtcgccttcaaacttaaaatatgataaacatcttgggtaaaacttgggttttacaaaagacttggaaaacccgacacctgggtcggtgcttgcgaactaaatgaatttccaaaaccgcggaccggggaacgtaccgggtgtacagtttcccgctcttgcacttaaggaccgtttccttggaatttcatccaaacataagacaagtacgaccacatgggtggaatgggacacccctggctgagtaactagcttatcaggggagccttgatgccgagagacatgtggattcgccggggtggtgtcggggaggacccctgggcttcctggcacagtatggtctgggacctaacctgttgttggtctgggacccctctcgtcggcatatggtaaacctgtgtcggctttcgaaatgccttgtcatgaaagcttggaggtctcccgacgtggctgatccccacgggctggtgatccgggttagtaatgtcgtgagggtaaagtgtaccccctctgcagaggttaacaaactgttcgaacagtcgtgcccacggtcatgggcggatgtgaggtgatttctagcgtagttttgtttgactactgcttgtgaaattgctgttgtgaaaaggggttcgatgtttgaaaaatctgtagctgatgggatcagctaggcccgggtggccgtttgaaaagttgttggcccgggtggccgttgaaaagttgttggccgggtgccaaccttgtttcaattctaaagactgatgcattgcacatactccgaccggacgagatgcactgtctcatccgtgtcgtttgagaagcactcacttagtcgtttttagaaaagagttcaaataaaatcaattgcaaaaacaacagcctttccttgaagcctgcattaaacacttatttcccatggcttgctgagtactcccgtactcacccttgctctatataaataatccccccccagttgctgaagaagataaagcggatcctgctgatgaggagttcttccaggagcaagccggctacgatgagttttagggtttcggcctagttcccaagtcgcgcctgtgttgtttggtccaagtcttggcttccgcttcccttttgtaatgcagttgtgagctcgggatctgtccgcagcccaacatgactgtacctctactctataataaagagacctctgttgctgtgataatccgtcttcctgtgataccagcactgtttcctgggactggtatcgattaacaggttaatttggagcgtcacgggctagttccggtcggtactagttcgggacgtgacaataaacatactaattctagtctagaaaattaaaaaaataagcaaactaaaaattaagttgtacttaggtagtttctatattgtataagtttagtatatagctcgtgcaagattaggtgactgatgatggataagatacaaaactaggcaactgataaatagaaaagttattttgagtttgtgttgtaatagcatccacaatgtatgttttacagggattaagagttttttttttcctttcaactagcactgtacactgtgcattggtcttcaggtctccactggcactatcctgatacagcaacatgaaccccttccagtgcttaactgatcggtggtgtttagggttttagtgttatcagaagcgaattgagcgtcctctctcctctgatttcccttatatatatagcactgtggggctcgggagcttttctccaattaggattcaaaatggagttttaccgaacacaaaaccaatctatctcttattttgttttcttgttagaatcgggctgtgggatttatccttttctaacttaccggacttagccaataaatcaaccaacattctccccttaattaagactaactgacaaatatactaagtaaacatagctccccaaaacaatctatcacaacaacattaagccttattgagacgacaagatttatagtttactgtagtacttaaataaacttaactttacttaatgggtgttgattgatgcttatcctctctatttctaggatattaatcaaaggcagtgacttaatcctatgccgactacatgttatttgaataagttgggaggtaaggcccggtttagtgtccaattttttttcccaaagatatcacatcgaatctttggatacatgcatagagcattaaatatagataaaaataaaaactaattgcataattagaggggaatcgcgagataaatcttttgagcctaattagtccatgattagccataagtgctgcagtaacccacatgtgctaatgacgggtttattaggctaaaaagattcgtctcgcggtttctaggcgagttatgaaattagttttttcattcgtatccgaaaaccccttccgacatccggttaaacatccgatgtgacactcaaaaattttcttttcgcgaactaaacaaggcctaagtctttggttaatggatccacgagcattaatttagtactaatgtactcaactttattttttttatcctggactctatctttcacaacatgaaatttaatgccaatgtgtttaaccgcttcacttgacttcaacctcattattgtagtatattactaattgtttggttatgctatcaaccactcttaatttcaggataaaattcttaagccatacagcttgccctgttgcatgattgcatgacacaaattccgtttgcattgttgacgatgcaatgagcatcggttttgagcttttccatgaaataactccctccacgagagtgaaaatataacccaaagtggatttcttagtgtctaagcaccctgcaaagtcagcgtctgaataacctacgacctcaagtttatctgaccttttatatatgtgagcatgtaatgcttagttccttgcaaataacgtaatactttcataattactttctagtggtccatacctagattagatagaaatataccaagcatcccaataacaaataccaaatttgattgcgtgaagacttgtgcatacattaagccctccctgcgcagccatcgccctccggcgccacctccgtagatccggtcccctcttcctctccctctctgtcggccagatctagggagggggtggtcggggtggtgggttggcggcgacgtgcggtggctttggccaatggaggcggcaggtggcctccgcacgggcgaccttttcctctccctctccgtcggcctccaaccggtggcgcgcaaatccggtcggggtgagttggcggcggtggccaagggaggcagcggcgggcggccaagggtttccggcggcgacatcaccgataagttcgtgcacggattgttcctactcgtgtagttcttgatggattgtttattcctgatggatctatgatggattgttgttgttgacctgtgattggtctacgttgatttgtgattgttgttgaccacggaatgggttgaatgggttggctcgaaagcatcggctcgacttggagacggcttctctttttttttagcacaacaccaatgacaaattggtgccggctggaaaaccggcacaacgggatccatagctcctgcccgattttcacgaggtcagggttggagatgttgctcacggcggcgatctcctggtaggtcaccaagttatcaaactgcacggtgatagaagtcatgttgtcatttggttgaatgatgtgtaagggctggctctctagccggttggcaccggtgacgtaggagcagtggaacaggatggtgacgatgacggtgtcggtgatggccgtgtgggacggggtgctcaacggaaggccgttggcatcgaagaggtcgggaaggagctcctctaacttaaagttagaggagcnccttcccgacctcttcgatgccaacggccttccgttgagctccccgtcccacacggccatcaccg

SEQ ID NO: 7097 - DNA, 12536 bp, Oryza sativa
cagggggagatgggccgagagagattcggcccatcgaacccgggggaggcaaattagacttttgcggaggaattgatttgggaaggatttggattcgggattgaactcgacaatagatcggggatttgagatctgagatggcacggacactagacaacaagcgaagaaataaatttcgcaattagggtttttaagagatagttttcccgctaggcgccacgacggaacgggcgctacagaccaacccccctaacaagaatctcgacccccagatttagcacctaagggagcagctccgggaactcggcgcggagaagatcttctcgctcccaggttgcctcatcttcagaatggttgctccattggactttgtagaacttgatggtcttccttcgagtctgacgttctgcctcttcaagaaccttgatcagtctttccttgtaggtcagattcttttccagctcgatattacccagggaaacttgctcttctggaactcgaagacattttttcaactaagacacgtggaacacggtgtgcacatctgcgagaccttcaggtaactcaagctgataagccacttcgccacgtctggcggttatgaggtaggggccgatgtagcggggtgctaacttgccggacatcccaaacctcctcataccacggagaggtgatacccgcaggtacacatgatctccttttccgaactcaaggtcacgcctccgattgtcagcgtaattcttttggcggttctgtgctgtctttaaacgttctcggatcagcttaacttgttcttttgctgccttgagtatgtcaggaccgaataccagcgcttcgcctacctcattccagcacaagggggtgtggcactttcttccgaacattgcctcattcggcgacatctgaatactggcctggtaactgttgttgtatgagaactcagcatacggcaaacaacgatcccaagtgccttcgaaatccagggcacacgcacgtagcatgtcttctaggatttggtttactctttctgtctgaccatcggtctgcggatggtaagctgtactaaaatttagatcggttccgagagcttcatgcaactgtttccagaaccttgaggtgaactgagtgcctcggtctgacacgatcttcttgggacagccgaatctacatacgacatgggtcatgtagagttctgctagtttctttccatcaaaggtagttttcactgccacgaaatgagctgatttcgtgagtcgatccacgattacccagatggagtcgtacccgctaggggttcttggcaaaccggtgatgagatccattccgatttcttcccatttccactcgggaattggtaggggctgtagcagaccagctggcctctgatgctctgccttgactctttggcaaatgtcacacaaggctacgtattctgtgacatctcgcttcattccagcccaccagaagtatgccttgatatcttggtacatcttcgtacttcctggatgaatggagtaggcggactcatgagcttcctttaggatgagatctcttaattccttcttggccggtacacagatgcgtggaccgcaccaaactgtgccttgatcgtctatggagaaattggtgtctttcttctcctgtattctttttattaactcttttatcccttcgtcgtctttctgagcttcccggatttgcgactctagggtaggctgtactgtcaagctggcagggacacctgactgtaccacggtcagcctcaacttctccaattctctgcacaggcgatcttggtcaggccgtatttgagctacattgcaataggccttgcgacttagcgcatcagcgaccacgttggctttaccggggtgataatgaattccaagatcgtaatccttgattagttccaaccatcttctctgcctcatatttaactcagtctgagtgaagatgtacttaagacttttgtgatcggtgtatacttcacatctgttcccgattaaatagtgcctccagatcttaagagcatgaaccacggctgccaactcgagatcatgggtgggatagttgacttcatgaggcctgagctgcctggatgcataggccacaacctttcgttcttgcattaggacacatcctaagccttgtcttgatgcatcacagaagatctcaaaatcttttcggatatctggcaaggtgagaactggggcagtggtcaaccttttcttcatttcttgaaagctgccttcacatgctgcagaccattgaaatttcttttccttctttaatagctcggtcataggtctggctagcttagagaatccttcaatgaatcttcgataatatccagctaagccaaggaagctgcggatctctgacacattcttgggcgggttccaagcaagtacagccttaaccttgctgggatctacttcgacaccgttggaggagatcatgtgtccaagaaatgctactcggtctaaccagaattcgcattttgagaatttagcgagtagttgatgatccctgagcttttccattatcagcctcaggtgttcagcatgttcttcctcattcttggagtatatcaggatgtcatcgatgaacaccacgacaaattggtccaggtattccatgaagattttgttcattaagttcatgaagaatgctggagcattggtgagtccgaaggacatcactgtgaactcatatagaccataacgcgttgagaaagtggtcttcgggatatcttcagatctgatttccagttggtggtaacctaatctcaagtcaattttggagaaaactcttgctccttttagttgatcgaacaaatcgtcaatccgtggcaatgggtacttgttatttatagttacttcattcagggctctacagtcgattaccattctctcagagccatccttctttttaaccagaagcactggggctccccaaggggatgagctaggtcgcacataacctttactctccaattcttcgatttgtcttttgacctctgctaactcattagctgccatttggtagggtctttttgcaattggtgcggtgcctggtgccagttctatcgcgaactcaatctctcggtctggtggcatactcgttaattcttctgggaatacgtcgggatattcacagactacgggcaccgactccaaggaggtgacttgtaaacaggttaggatagaccgacttgcggtaggggtgttagaggtaaagcggacttgctttcctccaggtccttgcaaggtgatggacttttcggcacaatctatctgtcctttgtgcttagctaaccaatccatccctaggatgatgtccaagttttgcgagtctaggactatcggtttggctaggaagtcaacttcctcagttctaaggttaacttccgggcatatttgagttgcccttatattcctcccaggggaatgtactatcataggtacacgtaaattttgggttttccaaccatttcttttcacaaaagcttgtgatatgaaagaatgagaagctcctgaatcaaatagaactattgcgggtatggagttgacagagaacatacccatcacaatgtctggagcatcctgagcggtctcagcttgaatgtggttcactcggcctcgaccaaagctgttggaagcacgagaaccttgtccacttgcctgagagctaggacgagactgagctgccgctggagtaggagttctggcagtgctgccattagcatgcccggagttggtgttggtaggattctgagggcactctctggcatagtgacccatctggttgcaccggaaacactgaactgctgacggtccctgcggtgacttgaaagaggtaacactgtttggcgcagtagtgccactaggggcacgctgctgtggccgaggtgccggacggttcatctgaggacgaggggcgtagcctggctggcagttagcctgagtgaccgactggtggtattgcatgggttgaccgtagcgagggcgaggtgcgcctcgggaagaatttcattgatggttagacttgcgtttcttgtattcttcgtgtcggtgacatggggccgagggtatcgtgactagaggcttgggtagccgcggtcacccacgtggcctgaccccctcgggggggtcgggcccgagggtgacgtggcctcccctccctctgtctccccaaggggtcgggccgctcccgtttcggccccgagggctggggcgcctcgaccccctgtggttttggcgccacgtgtgtgggttaggtaagcacagcggcgcccacctaaccgcatttatagcgggttggacgagcgcgccacgccgcatttaatgcggcgcagcgcacgcttatccggtccgtgaccggtcgcagtgtgtgaccggtcacagaccggtcagatcgcgggttaggtggcaacaggcggcctgtcacacgcctcgccccgtcccgtcggaatgatgagagtctccaggcactcgtccctagccggagccggcgtgctaactcctggagttggtatgtcagtcccggccatattcattccaagcttcatcgcaaccatggcaaggaagtcattgtatgaagaagggcagatgtgcggcatgctaaactgacgcgtggtggacaagaatgaccggtctgtgactggtctgacgccggtcacgtcatcggcagacaaccgtgctcccacgttgcatctgcttccggcggagtggaggtaggtatgacccatcccatcggagggttattcggacagcggctattgcaaatcttcatccattaatgaaggaatgacaggggtatcccctgtgtcaggcgagtgacggcgctgggcctcactcaaggacaagctgtgatttagcttccaggcgaaggcgcgagccaagttttggtcaagatagggtgggtctccacccacaagaagagtaggtagaagtggtgcatgtggtatccccttgagatataaaaggaggaccttgcccaccgaagtaaggggactgagagaaaaaaaagaggactgggagacgactttgagaatacctgagctcgtagaggagagaaagaggaagaggggttctagagtttgaactctcttgctctccggctctctgtaactccttcacacacagatccaccagaacacaggagtagggtattacgcttctcagcggcccgaacctgtctacatcgcccgtgtcttgtgcatttgctctctcgcgaacattccacacattgagggtgaagaacctcacttagcgcccccggccgaaccggcaaagggggacctgcgcggtctcccggtgaggagccccacgctccgtcatctggcgcgccaggtagggggcgcgtgtgtctttctaagccctcgtcctctttcgtgtgcgccaagcttctcccgctcagcccaatggccgaacgggcagtggcgcacaacctctctccgagcgctagcggtgacgacggggagcagaacccgcgccgccgagctcgtactccaccgtccccctctcgccgaagtcttgggcgggaggaggcgctcgaggaggtcgaaagatccgcgacttcgccgcccgcgggtgatggagaaggacggcgagacggggaacgtcgcctcctcgtctacggcgatggcagcacgccccagggcgcgctctaggctgcgggcgcgctcctgcgtcacccgcccgtcgtccccgatccagagactccagcccaacgttggctagacgacatgaccaacttggtcatgacggcgcagcagcgcctaggtgccggcgggcggtcctccgccaccaaggcctctagcgctgctaccgccggctccgtgtcgtcgaggcggagggcgcggcgagcggcggccgttacccgccgttcgtccgccattccctcgtcaacgcctccgacccaagaagatgtgcgtggggggccggatgcccgcctcaatatcgagcgccggcgcaatggtcgtcgtgctgcccacgcaacggaggacgcttcctcgtccggagcgccacttcggtccgggcacgggggccagccccccgtgtccccggttggcggtgccggctgtcgagcctttgtggcgagccttcggaacgtccgttggcccccaaggttccggcccaccatcaccgaaaaatacgacggaagcgtcaaccccgccgagtttctccagatctacacgaccgggatcgaggccgccgggggtgacgacagggtcatggcgaatttcttccccatggccctgagaggtcaggcgcggggttggctaatgaacttgccacccgcgtcggtccactcttgggaggatttgtgccagcagttcaccatgaacttccagggcacatatccgcgcccaggtgaagaagcggacttgcatgcggtacagcgaagggacgatgagtctcttcgctcgtacattcagcggttctgtcaagtccgcaacaccataccatgcatccccgcacacgcggtgatctacgcgttcaggggggggcgtgcggcacaaccgcatgctcgagaagatcgcctccaaggagccccagaccaccgcggagctttttcagctcgcggaccgtgtggttcgcaaggaggaggcctggacctggaactcctccggttccggtgtggcagctttggccgcccccgggtctgccgctcggtcagggcggtgggacaggaggaggaagaagaggtcggcccattctgacgacgagggtcacgtcctcgccgtcgagggcggttcgcgggccacccgaaaggggaggcctgcgagcgacaaaaagaaggaggccggcgctcccagcagggagcgcccgaccggcaagtggtgttccgtgcacaacacctccctccacgacctcgcggactgccgcgcagtcaaaagtttggctgagcggacgaggaagtgggaggaggagaggaggcaggagcgccgtgagggcaaggccccggcggctcccgccggcaaccggcgaagtgaggccaagcagaaggcccccgccgatgacatcgatgatggcgacgatgacctggggttccaggagcctgaggccaccatcgccaccgtcgatgggggagcgtgcgctcacacttctcgccggagcctcaaggccatgaagcgagagcttctggccgcggcccctacccatgaggcgacgcggcgggcgcggtggtcgtaggttgccctcaccatcgaccagaccgaccacccgccgtgcattgcccggggaggacagatcgcgatggtggtttcccccaccgtttgcaatgtgaagttggggcgtgtcctcatagacgggggtgcagccctcaacatcctttcccccgcggcctttgacgccatcaaggccccggggatggtgctccggccgtcccagccgatcatcggtgtgacgccggggcacacttggccgctaggtcatatcgacctcccggtcaccttcggtggttccgccaacttccgcacggagcgggtgaacttcgatgtggcggacctcagtctgccctacaacgcggtcctggggaggcccgcgttggtgaagttcatggcggcggtccactacgcctatctccagatgaagatgtcgggccccggtggccccatcaccgtccatggcgacctcaaagtcgcgcttgcttgtatggagcagcgcgcggaccacctcgccgcggcgtccaagtccgcgggtggcgacgagaggctcagcacctccgtcccagccgccccgaggcagcggatgatcacgtgcgacgaggtcccggtcaaggaggtcgccctgggcgacggcccgtccatgaccacacgaatcggtggtcttctggacgacaaataggaagacgcgctcgtctccttcctgcgggcaaacgccgacgtcttcgcctggagaccggcggacatgcccggggtccccagggaggtgattgagcaccgtctcgccgtgcggccgggcgcaaggccggtccggcagaaagtgcggcggcaggccccggaacgtcaagccttcatccgcgaggaggtggcgcgacttctggaggccggattcatccgtgaggtcatccatccggagtggctggcaaacccggtcgtcgttcccaaggcgaacggcaagcttcagatgtgcatcgactacaccgaccttaacaaggcatgtcctaaggacccttaccccctgccacgcatagatcagattgtcgactccaccgcggggtgcgaccttttgtgttttctagatgcatactctggttatcatcagattcgcatggctagggaggatgaggaaaaaactgcattcattacccccatatgaacttattgttatacgacaatgcctttcgggttaaagaatgcaggtcctacttttcaacgtactactcgaatttctttgggtagccaaataggacgtaatgttgaggcctatgttgacgacttggttgtgaagacgcgcaaccaagagaccttactctcggatctagcggaaactttcgaaagtctccgctccgcccgcataaagctgaaccccgacaagtgcgtgttcggcgtgcctgcgggcaagcttctcgggttcttggtctctgcccgaggcatcgaggccaaccccgagaagatacgagctatagagcggatgcgcccccccagcaagcttagggatgtgcaatgcgtcactggctgcatggccgccctaagtcggttcatatcgaggctgggagagaaggcgctacccctatttaagctcctcaaacgctccgggccgtttacctggacggaggaggctgagcgggccttcattcaattgaaggcgtacctcagttctcccccagtcctggtcgccccggagccagatgagccgttgctactctacctggcggcaaccccgcaggtggtcagctcggcgttggtcgtggagcgcgatgaggacaaccctcactccgcgcatccccaccctgtgtcgactcgacccgggagagagcagggaggagaggcccccgaaccgaacggtggcccaaggcccccgacggccggagctggccctccgcctgcttgtccgacggtgccaggcgcccccgacccccaggatggccccggggccactgcgggaaggccgcgcctgtcgccctctgaccccgaggttgtcggcgcagaagccgagggcgccccgcgtggcctctcggatgaagagcgccctggagatgcggcccctggcggagaggatcggccccgccgaaaggtgcagcggcccatctactttgttagcgaggccctccgggacgccaagacccgaaaccctcaggcccagaagatgctttacgctattctgatggcttcgaggaagttgcgccattatttccaggcgcatcgggtcacggtggttacgtcttaccccctcggccaatcttgcataaccgagagggtactggacgggtggtgaaatgggcaatcgaactctctgagttcgatttgcactttgaaccacgccacgcgatcaagagccaggccctcgccgactttgtggcagagtggaccccagctcccgagcccgtctccgtccccgaggccagctcgggcccctcgcagctgcctcacaccgcctattgggtgatgcagttcgacggctccctgtctcttcagggcgccggtgcgggggtcacgttgacctcgccgagcggagacgtcctcagatacctggttcgcctcgactttcgggcgaccaataatatggcggagtacgagggactccttgcgggactcagggtggcagctggactggggatccgccgcctcctggtgttaggcgtctcctagctggtcgttaaccaggtctgtaaggagtaccggtgctctgacccgcagatggacgcttacgtgcgccaggtgcggcgtatggagcgccatttcgacgggatagagcttcggcacgtgcctagacgggataacgcggtcgccgacgaactctcaaggctcgcttcctcgcgagcccagatcccaccgggcgcctttgaagaaaggcttgcccagccgtcggcgcgacccgaccccctaggggagacggacgcgcctgaacggcctccgaggcccgtcggagtccaggcctcgggacccgaggggagcgctcccagctcccctagattgattgcttggatcactgagatccaggcgtacctcgcagataagactctacccgaggaccgcgaagggagtgaacgcgtccagcgcatctccaagcgctacgtgctggtggaagggaccctctatcggcgcgcggctaacggagtcctcctgaagtgcattcctcgggaacaaggcgtcgagcttctcgccgatgtccatgaaggcgagtgcggagcccactccgcctcacgcaccttggttggcaaggcctttcgccagggtttctattggccaacggctctcaacgatgcggtcgacctggtctggcggtgcagggcgtgccagttccacgccaggcaaacccatcaaccggcccaggccttgcagaccatacctctttcgtggccgtttgctgtctgggggctcgatatcctgggtccgtttaggcgggccccgggcgggttcgagtatctgtatgtcgctgtcgacaagttcactaagtggcccgaggcttatccggtcatcaagatcgataagcactccgcgcttaaattcatcaggggcatcactgctcggtttggggtgcctaaccgtatcattacggataacggcacccagttcactagtgagctcttcggtgactactgcgaagacatgggcatcaagctctgcttcgcctcccccgcccaccccagaagcaatggccaagtggagcgcgccaacgcggaaatcctcaagggcctcaaaacgaagaccttcaacatcctcaagaagcacggcgactcgtggatcgaggagctgccagcggtgctctgggcgaaccgaaccatgctaagccgagcaaccggggaaacgcctttcttcctcgtctacggcgcggaggcggtcctcccatctgagctcaccctgaggtcccctcgggccaccatgtattgcgaggctgatcaagatcagcttcgcagagacgacctcgactacttggaagagcgaaggcggcgcgtggccctccgagcagtgcgctaccagcagagcctgcggcgctaccatcagcgccacgtccgggcccgatcactctgcgtcgacgacctcgtcctacgccgcgtccaaacgcgtgctggactgagcaagctctcaccaatgtgggagggtccgtatcgagtgatcggcgtcccccggccgggctccgttcggctggccacgggcgacggcacagagctgcctaacccgtggaacatcgaacaccttcgtcgcttctacccctagtgggggtcgggtgtcaggtctcgggctcgggccaaccccgcaccaccccccgggcgtgcagggttggccgggggctaccacatgcatatacttatcttttttctcttccgtatttcaataaaagcattttcgatttcctaaggactgtgtctgtgccattgtttccttttgaagaatcttggcttgaattagcacgctcgtgctcgatcctgccctcggtggcccgggccggctaaaatcgccaaaaggggcccagaaccgagccgtgccccggggcgtagtgaactccgggggggaatcggcaaaggcccacaatcgggtcatccataaccctcggtcaccacgctcccggcctggccagtctcgacacgtggatctccccaggcactagccccgacccgcgccatttgaggctgagacctgggcacgagcccttgttcaagccaagacacagaaggaccgcggcacagaccatcctcgtctcatgcacacaacaaacagaattgacgcagaaatttcctctttatttgattgcagattaaattagtctatacaagaagggggcccgaaggcctcggaagaagaaggaaaagctattaagattggagggggcctgggggctcactccgacgcgcccgggtcgccagcctcgtcgtcgttgtcgtccgcaccgtcgtcaccgccctcctcgtcggagtcgagggcgaacgcgagccgaggggccgtaccctcgaagctgtggacgatgtggtcggcggcgtcccggacctgcgcgcgcgcgccgtcctcggttccgggagggaactcgtccagcgctgcccacggggagaagtcagggtccctggcctggtagcttgccagtacgagctccaccgcccctcgggcaaggtccctcgaggatgacttgatcgtctcctcgagctcctcggggagccgctggagggtcccggccatctctgagaggcgctgggcgaggcccccctggttggcggcgtatttcgcggtccgcccgccccagaggcccgcctgccgcccggcgcggtctagacgggagagggcgtcccgaagcatgccgggccctacctcgcccgccaagcgaagggcctcgacctccccggcggacgagtccagcgcgccctgcagctcg

SEQ ID NO: 7098 - DNA, 30632 bp, Oryza sativa
ctccgcggctatcctcctcttgttctcctcgcgtcgttcgcatcagccactaacttcacctacatcgggccggccacgtgccaatccgccatcctctgcacacccccccccccgccgccaccgcctacatcgagcccctcaccagcttcgagaacaccaccctccacgacctcttcggatggggctcctctaactttaagttagaggagcctcatccgaagaggtcgtggagggtggtgttctcgaagctggtgaggggctcgatgtaggcggtggcggcgggggggggggtgtgcagaggatggcggattggcacgtggccggcccgatgtaggtgaagttagtggctgatgcgaacgacgcgaggaagaacaagaggaggatagccgcggaggagaatgatggcaccatgataacaatagctataggctatagatagccacgttgtgtttgagaggtgaggttgggaactcacctcacgcgcacgtaaaacgaagtatttacttatgattaattaagtatttacttttataaaaatgattaatatgattttttaaagtaactttcgtatattttttttcaaaaacatatcatttagaagtttgaaaagtgtgtatatgaaaaaggaaaactcacctccgtgcacgtaaaacggagtgacgtattttcttatgattaattaagtttttttaaaaaaatagattaatatgattttttaaagtaacttttatatttttgcaaaaaaaaaggtatcgtttatcagtttaaaagcgtgcacgtgaaaaacgagaggtgtttcgagaacacgctgaaaaaagaacacagcagaagtgtttgagatggccggagctagcgtacgtacgaacgtgtgcagaggtgagctagcacttcatgagagatgtttggttcttcaccggggacaccgcaacacgtcaaagtactactcctatagcgcaactgtacatgcgagtggggtggttgcggatggccagcaatagtgacgtgacggtgtcaaacaacacgtacgagtgctcagcggttgcacgatctgagctcagcctcagaagtcagaaaaatcgaggaaatttgtgatttgtacgatttttccgtcctctggtcgagtccactctgcgaagtctccgtccactagaggataatccttcgacctgacggatttccgaaaaattgtttcccagagtcactggtcaaactagctagtgtagcatggcaggaaattgaactgcctaggtgtgtttatagttatttgggtgtaaaatttttgaagtaaacatatacatatttaaagtattaaatatagactaataacaaaacaaattacagattccgtctgtaaactgtgagacaaatttattaagtctaattaatccattattagcaaatatttaatgtagtatcacattgtcaaatcatagcgtaattagtctcaaaagattcgtctcgcaatttacatgcaaactgtataattggtttttctttcaatatttaatgccccatacatgtgtctaaatatttgatataatatttttggctaaatttttttggaatctaaacaaggcttacaatatccattcatatgttggctagctattagttcactttggactctttttgagttgggtctatctatctgtcaagtggctgcagagcatcaccgcaaaggtgacgtactaccactgaaaatctagaaaattttaatgcaatgctgtgtattctagtgttttgaagtgagatttcaatgccacataagctcataatatctttcagatagcgtactttttttttctcgatcaggtccaactccaaattagaatgtcttctattatctttagtacatatggccataaggcccgaggcccgacgacccgacccatgcttggcacagtacgactggtttcgggcacgtgccggcctagcccgatagttgggtcgtgctaggccaatgccttggcacggtgagtcggcctcgcacgccatgatcaaaggaaaatagttgagggacccaaaatagacttgaatcggctatataaggcacggctcaaagagaacagggaagcaaaatagatttactccagccatatatgacatagcacaaagagatgagggaggataagtagacttattctatggagaagaacaaggaatatgtttactttagatccctcaatttgtcgtccaatctgaaattcgtccctgaaccacaataccagatatgatatatctctcaacttctaaaaccagcgcaaataaggtcccaagacggtttgggcagtagtttcggctgacgtggcgcctacgtgacattgacatagcacttaaagtcccgaaaaaggaataattaattatttttcattcttacgagtggtgctaaatgatttaccattggacccacacgtcatagacacatgagagcccatatatcataggcagcaagtggcaaataattaattgccacatcttaaaagtggctaaaagttaaatgtcctaaagaaaaaccatgaaaaccatatgtcagtgagtatccgattaaaataaaaaatacgcagtgggtcccacattctttccttctctttttctttctctttgctgcttcttctctttcccggcatccagcggccggccgccgccaggctagcgtccttctccgtgccaatgagccatggggtggtggagaggaggggaccttggtccgacgggagacgccgctgccgggaccttggccgctgatgctagggacctcggcggcgcagcagggttcactatatcgatttagggcttttgatcggaggtcaccgaaatcccgaaatttcgaaaatttcggtctaaaattttgaacaaaatttagttgaatttgaacaaatattaccaaatttatgaaaagattgaaaaattgaaaaattttgacagaagtaatatcatatcggaggggaccgaaatttccgaaattcctgcggcgcagtagctaccgtcgacggagacggactagctggcagtggacgcagtggtgccgggtgcgggcgtcgctgtcctgcgaggaccgcccggacatcgcccggacatttgctgcgcttcagctccacgcgcgccgggccgagatcaccacgctctttggccacgcctggagcgtgctcctcatcatcgccgacgagcagcagcgcaacgtacgacgacgtccaggcctcgtccatgccatcttcttcgctggatgcatgattggtcagtgctgtaattctcgtgcaaaataccttcgtttcctacagaaaattccatcgtgttaactcagacaaagtgacaaactaccgcaatgccatgatagtaggattatgataacaaccatgccttaggccttgtttctttcagcttgggattattataattagtttattataatctggagtccaacatattataatctgataagctcatttaggtaagctttttccagattattggatgaaaaattacccaccatgccaccccactccttttttagacatgcaaacccaataatctaggctctaataatctagaaaagaaacaactaaccacttattctaatacagattataacaatctagtttatagtaatctgactcaataatctgaattataataatcccaagctgaaagaaacagggccttaattatggcatcgacatgtagaattcggacctgagagagatagaggggggcagtacgtagtacgagactaatctctgtaacaaaatactccctccttccttaaatgtttgacaccgttgattttttaaaacatgtttgaccgttcgtcttattcaaaaactttagtgaaatatgtaaaattatatgcatacataaaagtatatttaacaataaatcaaatgataggaaaaaaattaataattacttaaattttttaaataagacataaggtcaaagatttttaaaaaaaagtcaacggcgttaaatattttgggatagagggagtagcattttcatattagatggacgatgcattgagaccggtgcgtcgaggttctactacgacagcagccggaagcgcctgaggccggcgcgccagaggcggcgagaggaagagaaggagaggatgaagaagatgataaatgcctctagcaaccacgccgaggagaccagcacaaagcgcccgcagctgccaccgcccgaacttcccacgcgtgccatgcactcgtgcctccgccctccggtgagacgtcacgcactcaccattgttgtagttgtcatcttgtcgatgcttttgcctgacggcggcgatgcccgatgcatcccatgaagaagatggcttggacgtcgtcttcgtgctgctgcttgtcggcggtgatgaggatcatgctccggatgcggcggccgatcgagcatggtgatctcggcccgacgcgcgcgaagccagagcgcggcgagcgctcgggcgatgtcctctcatccgggcggtcctcgcagcacagcgatgcccgcacaagagcatcccttccgcatccaccgccgtgtctactgccagttgtccgcctccatcggcagcagctgctacgcagccgaggtcccggcagtggcggctcccgtcggaccgaggtcccctcccctcccccaccccgtggctcgtcggacaccggcctagcggctggccgccggatgcctagaaggaggagaagcaaaaaagagaaggaaagaaggaaggtgggacccactacatattttttatttttaacttgataccgacttacatttgggtcccacagtttttccttgaatataagtaccacgtagatgttacgttagcttaaaccatcatccaaatcattttgggaccttatttatactggttttagaagtggttttagaagttgagggacgcatcatatgaaattttacactttacgacaatttgagggacttggagtgaacttattcctttttcgtgtggccttgttctgtcgaccagttggttgggttttaagcccactacatgaagctgacaaaagtttatttaacaacgccacgtcacaagcctcaaacctgaggccattgttttccaatttccaagacgcgagatcgagtgatcaaccgactggtctgtgcgctttttcatttttttttaattacacagtagacccacacctatacataatatcatactcataaacatgtcccataaaacatgctataagagataaaaaccaactgtaaatctctaatctcactaaaattatattgagagtttgtatatgcgtaatatttgtggacaccaaaattcatacacctaagaccactggttgttttgctttgcaccttttttttttgcgttagtaacaaaaatcagtgtgtatatgtatcgtatcttgcttctttctttgctgactatgtttggctacttttttcaatgtgctttcaggcacccacccattgttgcgcaagttcttgtcaaataaatttggaggctaaatattgttgttttgattttcaatgcaaccttctcagagttttgagtctctggaatcaagataggcaagtttttggggtttgagtactttttctttttcataatttaacgacaattctcaatgccgcaggaaaacgcatacagtaaagttatcgagggttctttgtaacatatgattcttaaaacataaaaatagtaaagttgtagggtttagggtaacccctgttaaaacgcaagaatcctagacctgctaaaccaaggaatgtaacccctgttttaatcattaataaagctctctctttcatgtaaaaaaaaaagaatgtctgaatcctaatgaacgaaaaatagtaggaaaaccgtttgaatggagtaatttcaaagaatcaaagggatctaatccttcgatccaaataatctcatatattcttttttattcttatgcgatctaaatccttagggcattcacaatgcgtcccaattttattctgtttctcgtgtgccacgtagacaaagaacctcataagcttctcaccacagtgcaagttaccttgtaatgggtctcactagtacctactttatcactttagcattttctttcctttcctctccctcctcttttcctttccccaacgcagagaaatcgccggagatggcgatggcgctgggccgagcggcgaaatctccggcggagcagcggcggggtgccggcgctcgccagcgcagcatcggcgaggtcggcggtgcgggagcggcggacgggcggcgacggcggtagggcggccagatccgcctccttcgagctccccccaagcggcgccggcgtcagcggtgtaggagcggcagacgggcggcgatgaccatgggacggccagatccaccctctccttcgagcggcggggcggcccgacggcgatggcggcgggcggcagggcgccacaaacgccgacggagctgggcagggggcgcgccacgagcaccgacggcagcaagcgacagggcggcggtgctgcccgacggcgacggcctctggcggcgggagcgagggagtgcgagctcggcggtcggcgcggaagcgggggacggcgggcggcgcggatcgacctgccccgtgacggctggttctctccccgcgtcggtggctctcgcctctcccttctccggcgcctcctctctccgacagcgttgggtggaggaagccggcgagattctccagccccatcgctttccccatcgacccgacgagcgtccggcagccctcctcccctggcggtccgacggcgacggcctctcggcggcgtggagcgcatagatggtcaagtgtggtctctctcctccctctccatgatagcgccgagcaggagtatgggccctggcgcctgcaaacttgacgaggaacgcgtagctcaaattggctccgcggacctgaggttgttgcgcggattgaggacgtgtcgtcgaatattcgttttctgggagcgaggctgaatgccacgtcctcccactgtgaatgcccttaaaagttctccggtttttctaccaaaggggcctgatcggcgaacggcgagcgcgagtgatgacgtggcgacgccgcagatcttttctcgcgcgccgcaagcccgcaactgaacagcgcgtgtgcgcgtggaggaggacggcagcggcgcacgatattattgttccccgtcacagcgcgtggactgatttgcccctgggttaggcgtcttatttacggacccctgccatcctggatattttgctgcctaaccagtacccactggcctttggaaggttctggtcactcgtccttctctttttctttttttttctttttttttcttttttttttttgcgtttcaggggtttggtgttgggcagcagacagctgcagccacgtgagatgccttttattagcaaaggttggcaggttgatggtacatgataataggaatagtttttgataattgatactttatgtgatgcttttcaaaagctacgtgaagaaattgttaggaattactatggatacattttggttccgtgtgatgtctaacatgtgttttttttgctatttttcttactataagatttgccgcggcgtgaaacttcgatatagttggaagtggtaaccagccaaatgttgtgttaatatctgttacattgccggaaaagttgttttatcaagcagccgcagaacagacggccgaacaggcccaatctagcaaagaatgaaatcttatacctagctttgggataattaactaggtgcataacctagcaaaagggagaaaattgtgaataaattttgatttgagcaggtgacaagctatgttgatatggagataccatgttttgctatgagctactactattctacaagactacaataaaggacaataaaagactatgaaagtgacgtagaatacattcttattagattagttgttaccgagagacaaatcacattgtactaggaagatattagatttatattcatgacgtgtgatatagcatataggtttatcatgtttgctaaggttttttaatattttgaattgcttacgacattgacttattaattaattttgttcatgttacttattttccttattatcagattatgacaagactctgcacctaacttgtatgttaagcatttttatatgatgcttgatatttatattactcaattgacaaacaacattacagtctaattataatacactgtattacctttaataactttacgcgatatatagtgatcacaacgacaacaacaaaaaaaaactttttaattaaaatttaaggtagccatccacatgtacataagatctggggtttggctgacctctcgttaggcgtttaggtgcacaagtggacgccacagaatgaatgatatataaatgatttctcccaacagtgactccgatgtagacttggaaatctaattgggaaaaaagagagagaggatattttggttgctgacaagactagcgctattggtacatgatattttccaaagtttggatgagtagctttcagattggatggctgagatattctgcattagttctggctggaatgcgtacagatgtatctgcatggaatcaggatcaaaatgttccatcttaaaagaaacatccacacaataaacttatattcgatgaatcaaactacgaaaataagtgtgcatgttataaacttaatatttaggtattgtgttgtattttcgatgctgaattagtcgtgtccaataaacgtcaatgagaatacttcttttatcacattttctctgcatgtgtaaaaaacataattgagattcaatcaagtggcatataaccgctagctacttctggaatctttggcttaaaccgttcaaattttcacttagattctaaaaatttgtagatattaaatcataagctaataaatctattttttaattctaactattagttatccaccatttgcttcgaaattgcttcccagaatttcgagcttcccaaacaaaccctaagtcttttatttagcgtacgcaattattagattctactatttttttgaggggtaattaaatgctctatgcagtactctagtacaagaagaaaccaaattttcactaatccctctagagcaagttcaatagtagactataaaccaactatatacttatgtaaaggagagagaacaagggaaacgatgagtcccagctcttatgcaagagataactatacacattctcgtaaacaaataaattaattacatatagagaggagaagaacataagatacaacctggtaactaacggtcccgtcatcgtttggcttttccactaataagccaaaacagtttattagagaataaaaataaatctgtagacaaaatttttatatatatgttttttctgacttaaaagccaatgctgaaaaagaaactacattgaaaatatctcaaaattaaatttaaaaatttaaattttgactttttcttgactaattaggccatccgatgggagcctaatatattatatatatgttaactcttagattaatttatagatagtggtttgctctacttttaggctccgttcggtagtataagttcccaactcctcctcgttttccacccgcacgcttttcaaactgctaaacggtgtatttttttgtagaaagtttttatacaaaagttgcttaaaaatcatattaatctatttttttaaaaaaaatagctaaaacttaattaatcacgcactaaaacgctgcttcgttcccaaccctcgcttccgatcagagcctaaacttgctcttagatttttacacccctaatatctggtcttttcctataaaaaaaagagagaggtggagagggaaagaacaaaaaaaataattacgctagtgaagctgacaatctgaagatactctcccttccactccacgtctccacctctctcacgagtggaaaaagcaaaacaaggtgcgccgttggatgcttccccctcccccccaagtggcccccatccgtgcgccgtccttttgccgcccgcgcgggccccacccccaccaccaccccccgcgagatattttggtggcagatcacgtaattaacccccaactccctgccccttctcccccacccaccccgcgcggatataaaccccgccgcgaaaatatctcccccaccgtctcatcccagctcagctcagctctgcctccgccatttcgaagcacatcgaggagagagaaagttctagagagagaggagagaggagagatgtttgatgcgggggatcgcggcggagccggcggggtggtggcggtgaagaggatgaaactgtgcgaggaggaggaggaggaggaggaggggatggaggtggatgaggaggaggaggaggtggggtgggtgtggaggccgccgggggggctagcgggggaggatgaggcggcggcgtgggaggggagggcggcggcgatcgtggtgtcggacgcggtggaggtggatttcccggtcatctacgtcaacgccgccttcgaggccgccacggggtaccgcgccgacgaggtcctcggccgcaactggtgagccctcgtgcgcgccctgctcttagctgttccccgatcgatgccgctctgctctgatctggtgtggttggatggggatggcgaaatgctgcttgttttttttttttggtgctctcgattcgattccagctcgatatgttggcgagattgatggtggttgtggatggctgtgttgttgaatttaatgagcttttgccgtgcagtcaaaccttgagattttaatgcgcatttgttagaattagggggttcctgtacaggcgtacggtgcagagtgcgcaccactctgtctctgccttaatgcttgcaattgcggcgatgatgcgtgattcctgactagttgctgtaaattttagcattttatcctcacttttgattggttgttttttttttttttgaaatttatagatgggtatcatgccagtatgagatttagccagaatttgaagtgtactgtttctgttagaccatctgtattttagagccaatctctgagtaatggtgacattgttgatttttaatctacacattaagcacagcacgagcaagccaacaatcgaagtaaattgtagataatgttgttcaagtacagtaaaagcctgaaaggtgcttacgcgatctagtttggatatattcatgttattgctaaatttatgaaatggcttttgaaacaaattttgtgtatggaagttctatatcgcatatttgcattggaccttagaggcgaacaacgaaatgttcatatattctttctggctctgggtcatttttgttttctggtgggaagaggctgggcaagcaagggtgatggctacccgttagatattttcccctgatatatcttctcttctcttgctctactaaagtagccacttgcacatagaaaaagggatgatggaagaataaactgtagcatatattgtgaatataaaatgagatgggtaggccattaattggaatatagcacagttgtctgtagcatgtgggtacaaaaatttacaacagggagcatcacggttttagccaggcctttttattttttaccaccgggctaccaattaatacttagtaactttagtcttccattggcatatatcatatttagtggtcgcctgctagtgctctaggaggatatattatactggattagtaagactttttcctcctctcttggatggtactggaaaataattaactatgaatgtattcacatgacaaattaacattgaatttggacaccaactgtgaaatttgatccgtattaacaatatggaaagctattattggtgacaaccttataagtgtactacagtactacacctgcaagggttttcagttgacaagtagctgattatggtcagtttcagaattcggaactcaattttgagcataaatggaagttctggatgtaatatgaagataaactttgagaaatttgacttgggttgtaaatgtttgaacttgattttcgtgctgtactgcttaaggctgtcttcaggaggcaaggtttacctcctgacacggaaaacaatgtaagcgattagagcgagattagttaagtactagcctaaaaaaaattaaaaaatggattaatatgattttttttaaagcaactttcctataggaaaattttgcaaagaacacaccgtttagcagtttgaaaagcgtgcgcgcagaaaacgagagatgtgagttgggaaagaaggggaaagtcttttagggactcattccgtaaatgtcgttttaccattttgtggtgatttgctctaatcgtccacgtcgaatggtaaatattcttgtgtgcagtctgcacaattagcctctcttttgtcagattatgaaaattcttgaaaaacaatttattgaattgcttacatgatgcaagaacttgtctcttatattacattttgacatatcatgccatcacaaacaattccaaacatattaattttatttccaaaagattcattggatgagtttagttaaacctgtgttccatcataagtactccctccttccctaaatgtttgacacggttgacttttttaaacatgtttgaccgttcgtcttattcaaaaacttttgtgaaatgtgtaaaactatatgtatacataaaagtatatttaacaataaatcaaatgataggaaaagaattaataattacttaaattttttgaataagacgaacggtcaaacatttttaaaaaagtcaacggcgtcaaacattttgggatggagggagtagtttggacattcagcaatcagcataagctctaggcattggctaacataattaagtattcaatgtagggttttttttttttttttgcatttcgactaaagtccaacaaagcataaaaaaaatagctggactagtttctgcctaatgtttagcaatgttagcaattagcactaggttaacagaatacatttgaaaccaaacaaaaagccacattcttcttcgttgtctgcgacaaagctaatagacaaatgcatgttctctatgcttgaattgctgttattctactatcatttttcatttatacgagttgttcaactgtatcatatttgcatcaagctaacagtgacataacttgacagagggcctagagaagcttctcacattactctgttgactcaaacttgtttcagccgattcttacaattccgggatccacgtgcccaaagacgacatccgcttgttgatcccatggttgtttcagagatccggcgatgcttgaatgagggaattgagttccaaggtgagctattgaattttcggaaggacggtgctccactgtacaacaggctaaggctcattccaatgcatggggatgatggttttgtgactcacgtcattggaatccagttgttctctgaagctaacattgatcttagcaatgtatcatatccagtgtataaacaacagtccaaccacagacccaacattcaagagatcaaccctgcttctcatgaacatattcctaagattcaaagttccgagtactgctgcatcctccagctctcagatgaagttctggcgcacaacatattgtctcgcttatcgccaagagatgttgcatccatcggatcagtctgcactagaatgcatgagttgaccaagaatgatcacctgagaaagatggtatgtcaaaacgcgtggggaagagacgtcactgtgaggcttgagatgagcaccaagatgttaggatggggtcgtcttgcaagagagcttacaacccttgaggcagcttcatggaggaagtttacagttggaggtcgtgttgagccttcccgttgcaacttcagtgcctgtgctgttggtaatcgccttgtcctgtttggaggtgaaggagtcaacatgcagccaatggatgatacctttgtgctcaacctggaatctgcaaagcctgaatggcgccgtgtcaaagtttcagcttctccacccggccggtgggggcacactctctcatggctgaatggctcatggctagtggtctttggaggctgtggacagcaaggtttgctcaatgatgtctttgtccttgaccttgatgccaagcagcccacctggagggaggttgcaagcgagggcccaccattgccgaggtcatggcacagttcatgtaccctggatggatcaaagcttgttgtctcaggggggtgcactgaatccggtgtgctcctcagtgacacattcctgcttgacctcaccaaggaaaaaccagcatggaaggagatcccaacatcctggtcaccaccatcccgcctcggccacaccttgtccgtctttggtaagaccaaactcttcatgtttggtgggttggcaaagagcggctctctccggctacgctcctgtgatgcctacactatggacgctggtgaagacagcccacaatggaggcaactggcgacaaccgggttcccgagcatcggtccacctccgaggctcgatcatgtcgcggtcagcctcccctgtggacggataatcatattcggtggctccatcgctgggctgcactcgccctcacagctgttcctcctcgacccagcggaggagaagccgacatggaggattttgaacgtccctggccagccacccaagttcgcctggggtcatagcacatgcgtggttggcggcaccagggttcttgtcctgggtggccacactggggaggagtggattctcaatgagctccatgagctgtgcctcgcgagcaggcccgacgaagatgagtgattcccaactccattgcttgttcttatttatttagatcctatgattattactgatatctgttgttgtcacaaccctatgtaatagtagtaaaaaagaaacaaaaagaggattactggtagttttcatccttagaagttaggaaaaagatctgaaaaaaaagttatgaaataaaggtttgttctagtttttttttttgttttcttcagtttgcgcatatctctgctccatatgttctgatgcaatttgtgtcaatgcatgtactacccattagtacatgttccattgttccaaagcacacatattcttggacggttatagataaaaataatctctcttcaagtacaagttagcgaggacttttgtaggacaaaacctgcttggagatatgccacacgtgtggtaatcttgttcttataaatcttaaggtttgtgtacactctgtgctgctacctgtagtaattaaacatctataccagcatctctgggcgcttgtcgaggcggcccgaaaagcaggtaccaaaggagaaggcagaggtatgaggtatccgatgtgcagattatatatttgcggcgtttgctatctcggtctccgattcaaatgcagcgaatcacggacaccagcgtgcggcgagcgaggtgccgcccccagattgtgggcatcagattctactgctaaacagaaggctgcatatgtgtgctgctttcaatggagagggacatctttttttgaccacaccccaccgacgtccagcttcatcagatcctgtgattctctctgagcaagaagaaaagaggagaaaatcagatcatgttatctcaagtctctgaaagaagaaaaagaagagagaatcggtgattcggtgcacaacgcgccccgagctttcctccgggtcatgatgctctttggtgttcaagggcttaacgatttgtaaatgttgttagggacaaaatcgaaagaattaactactataatttataaagttgataatcagatttaaaacagtatttaaaaatattatatataaagttcacgaaacgtgtcaacctgttcatccgttcatcagaaagctggcagacagcccagaactgggatcaccaccagaattcagaaagagtaggaaagattttgctacaaacaattccaggcttgtcaccatcgaaacaagctggcagatagcccactggtcaaattaacagaagcagcaatgtcatgagattacggtgaactcaagcatgtcaccatacagacaatatttttttgttctctaaaacgagttaagcaagccaggtgaataatgtcttggaccaaagaccctgagacaggttcaaccaaacacttccaagacggtcatacaaacatactgaaaatgtcttgtcaaacatggttaatataacagcattctaacagtgcagaatagtagggtttttcctgtggctggcatcgtggaacaagaaaaccaggatccagccatcatttatcaactgaacaaaagcgtgacccagaactacttaagtaatttaagaacatcatcgtctcctccgcgatggtgcgacgacagttcgtgtactagaagatagctactgaaagccgaagacatcaatgtccattgccccaacaacaacagatggtgcatcagactggcgtccgaattcatctcactgatccccaggctcttttggagctgcggcttccttgatttcgtcaccaccatcatcctgcagaaaagagaaaacaaaaaaactgatatcagaaccacgaagataggacagaaacgatcaaatggctcaggaaactcacattggcatctgaagtccacagagtcaagttgtcacgcaggagctgcatgatcaaagtgctgtccttgtaggattcttcaccaaggctgtccagttctgatatggcctcatcaaacgcctacaagaaacatggattcattcaaatcatatgttccgtgttctgatttttaagtgaatgtcaaataaaatatgatcacactattacttaagaacagaaacaaccttcgcatcttatatagctaattctacttatttgaagcaactagaaatgtatcagcacttagaacgagttagtcacaagaattctatcagcacacagaaatggcataattctcacttctttaccgttccaagctccaaaacaaaggtacactactttaaccatttggtttaagattgtgaaggttcaacatgatgcaaagtctaaatggaacatgcgaaatttctgtcaaaattataacatgggtatatggcaaatgaaaattatatagacacaaattacaagaaggaacatcaggagaatcaagaaaataaaaatatcaaccatttgatcaacatcaccttgaaagtttacagtcaaaatgtaacatataagttatacatcattcataaactgtatctcgtcatgaaaatcagccaaaaaatgcatccaacaggtgccaagggatttgaatagtacgttttgggatttcagctacagaaacaacctgattgcagcttaagtttctagtataaattaatttatcattcatgcactcacaaagtagcatatatcttcagaatgagcaacatggatgccttttcgataaaaagaaatgcaagtacaacttccactagaaaaagtcagctttcatgcttatcaaaagcaaagaaaaaaagctccattcatccaccatgatatctccagtataaccagtattccagtagaaagcaggtccttaatggtacaaaatcaatagtggataaatacttggcatgaaaatatatcatacaaagaaatgtacattgaagatgcatgatgcaactaacagaatagaaaattaaaggggaaaatggaagtggatgtagaagtagagtaagcagacctgcttcgcgaggttgcaggcacggtcaggggagttcaagatctcatagtagaacactgaaaagttgagtgcaagcccaagccttatggggtgggtcggagccaaatctgcgagagcaatgtcctgccaacacacgcaaaacaaaaaactaaattcaaaccacaagactaaccaattaaccattgcatccacatgtacaaaaaaaaaacatattatcacaaatccaacctgagcagccttgtatgcattcatggtgctctccgcagcctgcttcctctcgtcgccagacttaaactccgcaaggtaccttcacaaatcgtcaccaagagaaatcatacatccatcaagatgaaaaattttcacacctttaatcggtaccaaactcctaggcagcgccaagatccccaagaatatgaagaaaactagcattcaaccgctccattaacagacatcacatctaattctgactttttcaccgccaagaggaaatgttaacatcatatataaagaccacgacttaaacatagacctgtacagtaacaagggatctcatacacctatcaacccataaaaaaaactaccattagatcttaaatttggacctgcacaactcaaatcaaatcctaccgtacaaccttaattaacccagagaccaatcatataataaacaaaggaaaaaagaatatcctagaagttaatcacacccccaataactccctacatgttaccttcaccgacctaacaaatcctcctatctcgaattcttggtcgattcgccgcgcgcacatactagatcaaggccatcgaatcttacctgtggtagtcgcccttcatcttgaggtagaagaccttggactcggcggcgccggcggaggggacgaggtgggagtcgagcagggccaggatgccgtcgcagatgcgggcgagctcggcctcgatcttgcccctgtaggagcggatggtggcggcgtgggcgtccttcccgcggccctcctccttctgctcgacggacgagatgatccgccacgacgcgcggcgggcgccgatgacgttcttgtacgccacggacagcaggttccgctcctccaccgtgagctcctccccgccggaggcgccccccgccgcgcgcgccacgcgctccatgtactccaccatctcctcgtaccgctccgcctgctccgccagcttcgccttgtacacgctctcctccctcgtcggctcgccggcgacatggctaactgcctacctacctacctccctctcgccttccctctcctcctctcctcgtcggcgtcggcggcggcggctgcggctgcggcggcggatgcgaacgcggctttggtggggagggggaggtggggattcatttgaggaggaggaggaagggcgtgggtggagggtggggcccgcatgtcagtggggggacacgtggcggtcaaggggagcgggccgtgcgcgaggggagcgggtgcgggcgtgtggctgggggggaggtgggttgggttcgggggggacacgtggaggggttttagtgggtgggaatggtgtttgctgtgtgtggacggtgtgggtatgataaagataggtttaggttttttttttttttgcgctctttggtgatttggggtttttgctatctctctttttttaaaaaaaagataatattgtagttctggttagctggaagtctgtttttagattttcatttagtgcaaatgtatatgtatttttttaaaaagttgttttataacactacaattataacaacttttatgttggtggagttgtaatttatgttgtgattgtcttaaaacgccattgcaatattggccataaactttatattatgtatagtaggatgttttcttcatgcgtgcttgtaatatactccatccgtttcacaatgtaaggctttctagcattgcccatatacatataggtgttaatgaatctagacacatacatgtgtctaaatgaatgtgagcaatgctagaaagtcttacattgtgaaatggaggaagtagtaaggctctcctattatttttgctccttttatcgttagattggcttatggcttcttccttgcttgttaattttccataacctcaagtagactgggttatttatttatatctaccactaagaggaggaggcagggcgaggagaaagatgtgttggccgtaaggaagagggagtaaaaggtgaagtagtctatcgtccttggaggcagtgccgtggacagcgtgatgacgataagatgaggcggtttgcagcttttttgttttcacaacaggggcgtgggagagtaggagcccaggcctatttgtgaaagaaggtttgcaacatctccataaaaatggaatggctcatgcatatttgtttcatgacgtgacacgataattttgcaagaaactttagtgattcagtgttctagataagatagctaaaactaagccaactattgttttatagcgtccgtgtaaaacaatcttctcacctctaaaatcagatatccaacacccctaagctattcaaactattcaatttaccccatgtttaaagtagctgtgtttgcctatatatcattgacgtggtgaaaaagtctaccacatcggctaacatcaatgtttggcgatgccacaaacaaagttatgagatagtaagaagtaaagaatgtcatatttgaaaacaaaaatgaaagaatatgctatatggaccgcaccataaaaacacagttctgagtttgtactcttcatatatcttttactaaaggacacaagctgacttttataacagaatttttactaggatgaatgagccaaagtggacacaagatcttgcctgccatccacatgaaaaacaaaactattcctcttcttcttcttggattaaaagatgatggatgggcccaggaaagaaacctggcctagaaagggccggccgggaccggagcatccgatctcctgtcaaaaccgacgcccatcatgatccatgaacaatgctaccctaatcaatcaacatgcatatgcaagcatggctaatggtcccacggagagatcgatcaccaacccgaccggctgaccccacatccatgcatgcaatgatgcaaatcagcatatacatgaatacatccgtccatgcggttgagctaacaaaatgatgaaacgagatgatcgccagattaatccattgtttacatgcagccaaagtacaatgacagttgacaaccttcaatctgcaggcaataatttacacttttcttttaaataaaccttttttttcctcttagaaattaaaccgaagctgtgagcaagagcacatcatggtcagttcttggaagtcttttgtttgacacacacttgaattgctcccattttttcccaaccaatttgccacctaccatgcctatctgcacgcacccgtcgcgcggtttattagcctcttttctcctgcgaatcacggcgagctgatcagcgattaggcgaagcaaacgtaccaaattataatgggtgacgcccagcggcggcagcttctcctcgtcgccctcatgctcgccgccgccgcagaccactcgctggccggcttcttcggcggcgcgccgccggcgtctggtcccgccgccgccgccgccgacaacgacgaggtacgttagagagacatagtatcgttaattactggaaaggttaaagccggcgatttcgttggtcgatcgttctggctaattctgatgttcttttcttgtttcttttggctgatcgatgatgcagaagtgcagccggacgtgcgagtcggagcactgcctgggcacgtatgcacgtacgtacgtatatatataccactctccctggccgatcgataattataatttgtcagtttctcttgctgtaatttgtgttgtgagcaagtgttaattgttgtgaaatttgcgtgttgcgtgtgcagaggcgccgttgatgcggtacggcaagtactgcggcgtgtcgtacaccgggtgccccggcgaggccccctgcgacgccctcgacgcctgctgcatgctccacgacgcatgtgtccaggccaccgacagtacgtatccacaccaggtttaatgtttggtgtgctcgtttgtatcggggtggccgaaatactgaaattttgaaaattttggttcgaaattttatgaatttttgaataaaatttgacaaattttgaacataatattatcaaattcaaaaataaaaataaaaatttcggccgaaataatatcgtatcaggggttccgatagaaccgaaattttgaaccctgaattccacaccaatctttttcacttatcattttgatcattttgaacatctacacattgggacaaattcaaatccaatataagattagagagagggagcttgtctcctcctttctccctcagcttcctattgtttctccctccctcttttcttctatcaacggtgatccaatagaatagagccggaaaactcgatcgagttctcctgcactcatgttggatccgcacctatcgacatacggtgtaggggtgaaaacggtcacggaaattcccgatcgaccgggcgccgtttccgtttaaggggtaccgtttctaaccgtatcgtttttgactattttttaattttgttttttctaatttcttttcgcatcgtattaatatcgatactaagtagtttaaatgataaatatggtcaattaccggctgatcgagcatcgtttcagaagagatgctaccgattccgaccgtttccgatcgttttcacaccctaatacggtgtacactgataacgggatgtgtctgtcgaaattaatgcatgtgtgcagatgactacctcaacatgctgtgcaaccagagcctgctggactgcgtggcggcggtgaggtcgccggcggcgaggatcaggacgttcgaggggaaccagtgcaacgtgacggacgtcgccgacgagatcacgtcgctcgtcgaggccgccgtcttcgccaagaggatcctgcataggccgtagctttaattagctagcttgtagccgccacatgtaattaattgttgtttttgctaattaagctgctactgtgcatgttgtctggcatcatagatcgatgcacattgattaattaattccagtcgtctccggatgctacaaaaatcgaagctagagagtacagtaagtgtagttggagttggtgatctccctacacgtgtctagtttgcgtaagcaaggcttttttgttttctcttctttttttttttgtcatatcctcgatcgtcaacttgttcatgcacatcaatctcagatgtgctcgcagttagcacgtgcgtccgaatcatgattctgctcggaattcatttttgtgaaggcccatgagaacggtatttacaagctagtatattttcaaataaacctttgtctttcgtgtttacaccaagctagcttgcgtgtaaacaagcgtagcatagcaccatgcgtacgtttgattcgaaaaagaagccaaaagtaaaaatggttaattaaatccatataattatagatttgctcgttttgaaaaaataatattactagtcatctatttgaaataatgccatatattacaatcttatatatattcaagatatatcccctcttgcgaagtgagtatacctcaactgattaggttattgtggtgaaaccagcccactcaagtttaaatcagtcgcacctaacggtgcttgtgctagatccgtcaagcccagggcaagttggtcatgctcaacagtaacaccgttgctgctagatcctcaagaacatgcctcgttggttggattattgcgtggtcgtggaatcgttgtcgattgccagcagtgggagatagagaggagagaggggcatggaagaaataagaataaggtaatttcattaaaaaaatttttgataaacacatcaaaaggataataagtagtgacatataactaataggtgtgaaatcatgacgaaatggctccaaatagataaagaataataatatattttttttaaatgtaggaaacttataatgacacttctccaatgaatgtaggaaattttatgttctccatccttggaacaatgtaatagtcaaatgtaatcaacccatgtctgaatcacaaccaagcaaacaaaaaccatctcaaatctgacatatataaatcgatggatatagtgatatggttcaacatctatgctgattaatattatagggataaagtaacatttggtagattattatgtaagttacaatctgcacatcaaactctttaaaccaaaactacatcgaatcaagcattaaattaccataattgtatattaatttattccatccactcctaaggaatactacttcctccatcccttaaaaaaccaacctaggataagatggaatgtttcccatctgaagttagcttttttttttttgacgaagtattgactagtagaaaattataacccattggactatgcaagtcaaaatcaaatcagaatccattggatttctataaatcaaagatcaaatcatacatggttacaagtattaactactgcaataacattcatatcaaaacttcactttgtagcatcaatgcgaaggcattcaaatccaagtcaaaaattaataggggtgtataaccccctgaaaacagtggtagaggtaggaggacgaccagtagcctcgtctcctccaacagttcctttttttatataatcctctaattaattagataattaacctaagcaatgatatattaagctttatctaagacttttaacaaagtattatccatcaaatccttctcaatcctagctccgcctccgcctaaaacgagaactatagcaacatctaaaaacactgtagcaagtactcgtactatagcatccttaataactgacaacgaaccctctgcaacttgcacgtctcagctctcaaccggacaacccccgatccatcaagtacaccgacgaatgcctacgtgcgcagcacggggaaacagtccggttgaacgtgcatgagtgcatcacctcgccccataggtagggcccgtttagttcctgaaaagaaaagtttttttttttgtcacatcggacgtttgaccggatgtcggaaggggttttcggacacgaataaaaaaactaatttcataactcgtatgaaaaccgtgagacgaatcttttaagcctaattaatccgtcattagcaaatgtgggttattgtagcacttatggctaatcatagactaattagactcaaaagattcgtctcacgatttcccctctaactgtgcaattagttttttaatttatctatatttaatactccatacatacgtccaaagattcgatgtgatatttttggcaaaaagtttttgggaaataaatagggccgtagtaggccgggtgaaaacagtcgtgaaaatttccgatcgaccgagagccgtttttaataggaggtaccgttctcaaccatatcatttttagctattgataaattttatgttttttaattttctttttcatcgtattaatattgatgtagattagtttaaatgatatatataatcaattaccaaccgatcaaacatcgttttcgaagagattgtaccgattccgaaccgttttcacccagccgcatcactgcatccgcagttcaccggccaaacccaaccggctgtgttcgttcagtggagttggtaacacattctctccacacgaaaaacagagcgacgtattttcttatgattaattaagtattattattttttaaaaaagataaattaatatgatttttaaagcaactaggaaggtagcccgcgcatatgcgcgggcatgtgcgtgaaatttactgtgaatgttcatgtgtgggtggtttctataaaaaatattcttttgctttatcataaactaaaaatgaacttatttaacatgctttgagcactggtagtttttaaattgtgaactaaaattactttaaaccgtgtagtttttaatttatgagtgggacatcgaaaaaattagtaattagctgttcaatatctgtgatattattttataatatcaaaaggaattggacagaaaaacaatcacaaaagtatgatttttcccctccctaccaagtctgcctcacattcacctccaacgctgccaccgcacccgcagccggtgaggtggctctctgggggcggggtatcgaggagggcccgtgcgcctaggcccatgggtccgtattgttcccaaactcgtcgccgctgcagcgcgaaggccatgccggcgccgatgctccgccacacaccgcagttaaggggagcacaacgtgggccaccgcctggttcatgttgagcagggcgccgcagagcacatgctattgcagtcggtctcgcagtggcgtgctgtgctaccgtaccctccgctgccgatgtcgtggcgtcgacggcgtcagagctatatgcgagccgcacatggcagaaaggggcaaaatcatactttcgcaattgtttctatctccttttcctttggataacaaaataatatcgtgggtatacaggcagcttattaccattttttgcagtgtcttgtggcagatatacattcttgtagtgtctcccagctaatcacacgtttttttaatgtcccgtagaaatttttgcctttattaagtggaggcctcaatatgcatgtgggtccataatgtaattttttgttagcaattaaatatagtcaatatgggtattaagttattgatttgacttaaaaaaaaaagttggctagacctaataggtggagatttgtttgtggtcttttctttgcccataaaaataattttaattttaattatcatagagataggaaaaacaaagaaaagtaaggaaaaatagagagggtttggatgttttctttattaaaaaaagagtgatctgatgacctaaaataatgtgttaatgtttaagtaaaaaaaaccgatggttggaatttttttttaatttaagtgagacaagtaacagcttagcaaaacgttcatgtactttaatgcccatagggatgagaggaagggaatatggtttgggatgatttttttttaaaaaaagatcgaataacgatgtaaaataatgtgtctattgatttaagtgaaaaccaatggatgaatgtttctctaatttaagagtgtcacacaatagtttagaaatgtttataagatgtttaaaggactttaatgcctatttgtgatttttttccataaagacaattttaattttaattgtgatagggatataaaaagagaaaggaacagaaggagcgtacaaattgatcagtatgtgcgtggtgcacgatatgcggacgtgggaggtttttgtttttaagatatatctaacgatctagatccaccgatttaaataaaaatcgaatgtaagatttttttttattttattagggttccatgtggcgacttgggattacttgtattttggggggtgtttttacgagcaatacttacgagaatgggagattaaaagaagggagttttttaaatagatataatctaccagttgaaaataacgggtatgtgaaaatcaagactacatgttttgcttttatcttagaatttataggaatttcttttatttattatagtgccacatgacggcttaatagtatttgtagaaagtttaattaacttttagtatataatagataatatatagattttatatacaagatatagtttaactgcatatatttatagagtactatattttatttttaaatagtagaaaatcctattttaaagcccatcgattttttttcaatgacactacgatgtatgctttttgtttctttactttatcgcttttatcgtataagtccgtacataggtttttcttgaacgtattattcatcgtttttcctttagatgtatgtagaacagttttttttcctaattccggcccacaggaggtgacggagcgtggggctcctcaccgggagaccgcccaggccccctttgccggttcggccgggggcgctaagtgaggttcttcaccctcaatgtgtggaatgttcgcgagagagcaaatgcacaagacacgggcgatgtagacaggttcgggccgctgagaagcgtaataccctactcctgtgttctggtggatctgtgtgtgaaggagttacagagagccggagagcaagagagttcaaactctagaacccctcttcctctttctctcctctacgagctcaggtattctcaaagtcgtctcccagtcctcttttttttctctcagtccccttacttcggtgggcaaggtcctccttttatatctcaaggggataccacatgcaccacttctacctactcttcttgtgggtggagacccaccctatcttgaccaaaacttggctcgcgccttcgcctggaagctaaatcacagcttgtccttgagtgaggcccagcgccgtcactcgcctgacacaggggatacccctgtcattccttcattaatggatgaagatttgcaatagccgctgtccgaataaccctccgatgggatgggtcatacctacctccactccgccggaagcagatgcaacgtgggagcacggttgtctgccgatgacgtgaccggcgtcagaccagtcacagaccggtcattcttgtccaccacgcgtcagtttagcatgccgcacatctgcccttcttcatacaatgacttccttgccatggttgcgatgaagcttggaatgaatatggccgggactgacataccaactccaggagttagcacgccggctccggctagggacgagtgcctggagactctcatcattccgacgggacggggcgaggcgtgtgacaggccgcctgttgccacctaacccgcgatctgaccggtctgtgaccggtcacacactgcgaccggtcacggaccggataagcgtgcgctgcgccgcattaaatgcggcgtggcgcgctcgtccaacccgctataaatgcggttaggtgggcgccgctgtgcttacctaacccacacacgtggcgccaaaaccacagggggtcgaggcgccccagccctcggggccgaaacgggagcggcccgaccccttggggagacagagggaggggaggccacgtcaccctcgggcccgacccccccgagggggtcaggccacgtgggtgaccgcggctacccaagcctctagtcacgataccctcggccccatgtcaccgacacgaagaatacaagaaacgcaagtctaaccatcaatgaaattcttcccgaggcgcacctcgccctcgctacggtcaacccatgcaataccaccagtcggtcactcaggctaactgccagccaggctacgcccctcgtcctcagatgaaccgtccggcacctcggccacagcagcgtgcccctagtggcactactgcgccaaacagtgttacctctttcaagtcaccgcagggaccgtcagcagttcagtgtttccggtgcaaccagatgggtcactatgccagagagtgccctcagaatcctaccaacaccaactccgggcatgctaatggcagcactgccagaactcctactccagcggcagctcagtctcgtcctagctctcaggcaagtggacaaggttctcgtgcttccaacagctttggtcgaggccgagtgaaccacattcaagctgagaccgctcaggatgctccagacattgtgatgggtatgttctctgtcaactccatacccgcaatagttctatttgattcaggagcttctcattctttcatatcacaagcttttgtgaaaagaaatggttggaaaacccaaaatttacgtgtacctatgatagtacattcccctgggaggaatataagggcaactcaaatatgcccggaagttaaccttagaactgaggaagttgacttcctagccaaaccgatagtcctagactcgcaaaacttggacatcatcctagggatggattggttagctaagcacaaaggacagatagattgtgccgaaaagtccatcaccttgcaaggacctggaggaaagcaagtccgctttacctctaacacccctaccgcaagtcggtctatcctaacctgtttacaagtcacctccttggagtcggtgcccgtagtctgtgaatatcccgacgtattcccagaagaattaacgagtatgccaccagaccgagagattgagttcgcgatagaactggcaccaggcaccgcaccaattgcaaaaagaccctaccaaatggcagctaatgagttagcagaggtcaaaagacaaatcgaagaattggagagtaaaggttatgtgcgacctagctcatccccttggggagccccagtgcttctggttaaaaagaaggatggctctgagagaatggtaatcgactgtagagccctgaatgaagtaactataaataacaagtacccattgccacggattgacgatttgttcgatcaactaaaaggagcaagagttttctccaaaattgacttgagattaggttaccaccaactggaaatcagatctgaagatatcccgaagaccactttctcaacgcgttatggtctatatgagttcacagtgatgtccttcggactcaccaatgctccagcattcttcatgaacttaatgaacaaaatcttcatggaatacctggaccaatttgtcgtggtgttcatcgatgacatcctgatatactccaagaatgaggaagaacatgctgaacacctgaggctgataatggaaaagctcagggatcatcaactactcgctaaattctcaaaatgcgaattctggttagaccgagtagcatttcttggacacatgatctcctccaacggtgtcgaagtagatcccagcaaggttaaggctgtacttgcttggaacccgcccaagaatgtgtcagagatccgcagcttccttggcttagctggatattatcga

SEQ ID NO: 7099 - DNA, 42249 bp, Oryza sativa
ttgctagatgacattggagttagatatttgtattgttgtatgttttacttaagcatagaatgactcaagaaataattatttttcctgtgggcctactgtcatggggtagatcataagaggagggagataaatcaatctgaaatttgtaacactgattagacaatggtcttgaatttggagacttgtagtgctacagatctcagtcgcggtgtgcttttctcataaaataacaatcaaagaatatgtcttgtattatttacttttgtttgcacttttgaagcctctgaataatggctatgaacaatccaattgatgatccacctaacatatccgtagtactttcatgtggctaagcactgagagatcccctcataatttccccaaagcgtaaccatgtgtgaataaattttgagctagtagggttgcagccacgagtaagtcttcccttgttattgtgtagccagaatgccgcaaaacttccatgcctaagcgaactgttgagagtacgtttcgatttctgactgtgttagcctggaagtgcttgtcccaaccttgtttctgagcatgaacgcccgcaagccaacatgttagttgaagcatcagggcgattagcagcatgatatcaaaacgctctgagctgctcgttcggctatggcgtaggcctagtccgtaggcaggacttttcaagtctcggaaggtttcttcaatctgcattcgcttcgaatagatattaacaagttgtttgggtgttcgaatttcaacaggtaagttagttgctagaacccatggctcctttgccgacgctgagtagattttaggtgacgggtggtgacaatgagtccgtgtcgagcgctgattttttcggcctttagagcgagatttatacaatagaatttggcatgagattggattgcttttagtcagcctcttatagcctaaagtctttgagtgactagatgacatatcatgtaagttgctgataggtttccagttttccgctcctaggtctgcatattgtacttttcctcttactcgacttaaccagtaccaacccagcttctcaacggatttataccatggcactttaaagccagcatcactgacaatgagcggtgtggtgttactcggtagaatgctcgcaaggtcggctagaaattggtcatgagctttctttgaacattgctctgaaagcgggaacgctttctcataaagagtaacagaacgaccgtgtagtgcgactgaagctcgcaataccataagtcgtttttgctcacgaatatcagaccagtcaacaagtacaatgggcatcgtattgcccgaacagataaagctagcatgccaacggtatacagcgagtcgctctttgtggaggtgacgattacctaacaatcggtcgattcgtttgatgttatgttttgttctcgctttggttggcaggttacggccaagttcggtaagagtgagagttttacagtcaagtaatgcgtggcaagccaacgttaagctgttgagtcgttttaagtgtaattcggggcagaattggtaaagagagtcgtgtaaaatatcgagttcgcacatcttgttgtctgattattgatttttcgcgaaaccatttgatcatatgacaagatgtgtatccaccttaacttaatgatttttaccaaaatcattaggggattcatcagggctaagcacctaaatgctgtattgcctatataaatattgacttgattgtcagcttattgatacttgcaatgtggtatatgttcagcctgcagatatctatctgattgatgaaccaagtgcctatcttgattcggagcagcgcattgttgcttcgaaggttatcaaaagattcatccttcatgcaaagaaaactgcatttattgtggagcatgatttcatcatggctacctacttagctgacaaggtcattgtttatgaggggcggccttctatcgactgtactgccaatgcaccacagtctttggtatctgggatgaataagttcttatcggtaagttctgaatattaaatattgagaagagatccacaagtttgttgtaataccatctcgcatccttgtctttggttcagttgtaggcaacttcctcaaaagattaatttttcagtagagtttgacattctatatctgtttttagttgtcgaaagatgtcccacttctgtttatttttcagagtatttcatttatgttttcacatgctaatgctttctattgtttttccttttgtgcatgatagcatcttgacattacttttagaagagacccaaccaactataggccaagaataaacaaactggactccacaaaagacagggaacaaaagtctgcaggatcctactactaccttgatgactaatttgaaggcgtacaggttcctacagctctcatttatgctggagtagtttcatatcattttttaattcttattttcacttattaagtaatttcgtttttcttttgccttgctgtgcagaatcttcttgtggagcttcccgcccataatttgcccaggccttcgatgtcctacgcattacttgttcagaaggttactttgaagctaccacagcttgaagcatgctaaataacttggctgcaggagtgaagtggtatcatcatcagttataaggctgagcatgtgatgctgacacttgagttcttttgctggtttgatatatatgatgatgggaaagagagatgttactgttaaactgagcaactttgtcaggatcggaagattgtgaatttttgtgtatttttgcattattgtatcgtggatttaccaactggcacccttaaatcgttggttttataggcataaagtttttgagctgttactcatgttaccaatgttatcaaagttctctgagttattactgttaattcactttatcgagataataacgtagtttgtctttttttttattcagatttttaaaaatctgtagtagacaaaaccgaggtttttctttgttttgatcggatgccagattcatttgcttgtgtttagttttgttgtgtcaacgagaatgattgagttgcgttacatgcagattcatgttgtttgtttctccacaacttacagtcgtggaaaatttaaggttgcaatgtaagtgaaacttaataaatctattatttgcaagaagccaatattagaaaacaaactatgataagaaacctcaaaattaacgctaaaattaagttttggaatttaaattttgtttgtgaccattcttccaagtagaaaacgatagctccatcaaacaccataaaagttattgctcatttaatttcttgtcaaaattaaccttaccaaaattgatattaccaaattaattttggtattaataaaatttgggagcttttgttgcatttggtttgaccccttactaaaaattggaaaagtttttttggataggaaacttttagaattaccaatatttggtatggtagcaaatgataaagttacatttagtttgttaacatattaaaatttgataatgtcaaaacttgataaggttaaaaatggtactctatccgtcccaaaatacaagagattttggtaggatatgacatatcacagtattttaaatccatagtgataggaatgtgtttcatccaaccaaaatcacgtctattttaatatacttaaatggtaggatacgatatatcacagtcttttaaatccatagtaataggaatatgttctatccaaccaaaatctcgtatattttaatatacttaaaatgaacatgctctcggtgcataatacaaaggccttgttccagaggtgaaatgttttggcgtgtcacatcggatatatggacacatatttgaagtattaaacgtagtctaataacaaaacaaattatagattccgcctgtaaactgcgagatgaatttattaagcctaattaatccgtcattagtaaatgtttactgtagtaccgtattgtcaaatcatggtgcaattaggcttaaaagattcgtctcgcaatttatacgcaatatgtgtaattagtttttttttctatatttaatacctcatgcatgtgtcgaaacattcgatgtgagtaggatggacaggaagcttgtggcttgttagctcacttggctcggcggcaaggcccaagcccaagacaacagctgaacaacaaaaccctaggcacacgcaccgcatctctctttgtctcgcgaatcctcgtctcctcgatccccttcggcccttccgttattcgcatgttccgtatccgcagtgcgccgtcgctagccgctagggccgccgccgccatcgccggacttcccctcctcggctcctcctctaccagctacaaacctgcgtttacgatggaggaagaacgagaggtgcaagagcaagtgcctcaggttgcaagcgtggaatcccagagcaaacacatgagcgtgtcttgttggtttggctcgcgaatctaatgagctagctctagctttcaaacgagccgagccgagctgggtttctagctcgttaggataacgagttgagccgagccagctcgttatcctaacgagctagaccgagccgagctgagctggctcgctatccacccctagatgtgacagggttaaaagtttttgcgtgggaactaaaccgggccaaaatcttctcatggtcatgtaagttgggtacgtacgtattccacttttaaaacaacaaggtggctgggacaacatgatattactagtacgagtaattttctttcaacgtatatatttttataaccagttgattagaccaaaagatatcttgagatgagcttcctttcgctctctacttcacacttgttcaatacggtacggacagattttaaccaccggctgcctgcaagtagtaccggtgtgtccgtgtctgctcgactgctctccctctcctccccgtcttcctccctctcccggtctccccttcggttgccgcgtcaccaccaccaccaccgggtcactgccacgtgggccccacacccccacctccgcgacctcgcggccggtgagccgcactgcgcctcccctccgctgggtacaaaccgagtgaccgatctaccacctccacccaccgcaatcccccccaatcccccccacacgccgcgagatctcccgcctcctcctccacccgccatggatctcctccgcgaccgccgcctcggcgcgctgctggtggtggtgctggtgctggtgagcggcgcggcggtggaggcgtcgatccacacctacgacagggagccgttccgggaggtggggaacgcgttcctcctctccgggggcagcgagggcgtcgtcgccgacggggccgacctcgccgcccccgcctcctccttcatcaagtaaagtttcccatcccccccgcaccacacctccgcgtctcggtggttggaaactagtatagtagtaggttctcgaagccgctgccaagggtgagaggcatgtgctgctggctgctcggtcttgaatcgcctggggattaggcgtcgccggcgctgggaatgggaaatggggggcgaggcgtcaccgctggaggatcccgcccgcgcgcacggttttgctgagtgcttgcttgattagtggcaatttaacttttgggatttttcattttggcaagacattagtgctcagtttgtgatttatgaccaaatttataattgtgttgccgatgaagtaaaattcgggttgcttagatacacctaacattgaaaatgataaaatctgcaagttgtgacccacacattgaactcggtgctcaccatgtagttgtttgcagtgttttgtgtcaatattgttcactgcagttcattttagttttatagacttttagttcagctttgaacttcttgtgctgataagcagggctgtgctaccgccgtattaaaccgatgcaggttccactatgatcattttgagtaacatttgccatggattaggagaattacatagctagttagctactgccaatgtgaattacggagcatgttgacaagctgatatgtgggctcagaaaatcatttggttgatgctgtccttgtgcttactagctgtttctatctgttttattgcgtccatcaggctttattttttgtaggaatatgtatgggtttaatcttttctgggatctgtatgtgttagtttaccgatggaaagaactatgctccattcataacaattgtataatttagtattaaccagatgctgggttttcttactgtcaggttcacgaatgttactttctggagaactccggaatcagctgaatcacatgcaaaaatggcacacagtacaggtctggtacaggccattttatttgaagcagctgacagggataacattgggggatctgcctatggtggacagaggtccatatgttgtacccctgaccttgctaaactagagggctgcaaacaaggggaagtaatcaggagaccatcctctgatgatcctgattggccttatgtgctagatacacacttcagtggtagtcacctttctgtgaagttagaagatgaggtagttcgcattaccaagacaggcatgtacaacttgttcttcatttcctgtgatccaaaactgagaggccttagtatgagtgggaagacagtctggaggaatcctggcggctacctaccagggcggatggcacctttgatgaaattttacgtttttatgtcactggcttatctattggtcatggttgtctggtcgagtcagtatataagattctggagggacatcatgccaatccagaattggatcacactaattattgcacttggcctttttgagatgacactatggtactttgaatacttaaacttcaacagtagtggtgtacggccaattggaatcacaacttgggtggttactgttggagccatcagaaaaacgatttctcgcctattgatcctttctatctcaatgggatatggtgttgtccgcccaaccctgggaggactgacctctaaggtgttgctccttgggctgacatatttcctggcttctgaattgctggatattgcagaaaacgttggaacaattaatgacatttctgggaaagcaaggcttttcctagttcttcctgatgcctttttggatgctttcctcatactttggattttcacttctctctcccgcacacttgagaagttacaggtaagctatatttgatgtaatttttcttgtctgcttttataatgatgattactccctccgtcccaaaatataacaacttctacaccaacattctcttctcaaccaatcacaaccctccaccattcaattttctcacctacctccacttctcatccaatcacaacccaaacctatttaattctatctactttcttagtaactgtatccaactctaaaaatgcttatattctgggatggagggagtagcattttatccatgttttctcttttcaataaagtcataacatctgatgttttggtggtggaggaaataagtgcttgcaattcttttctgatgcgtaactaactgtgatctggtggagttactagtgtatgaagaacctatgatagtgatgttaatatcaaaattctaatggtgttatgtgtgctcacaaagaggacaagtgctttaaacagtgtttataatttcataaccaagtctgttgaaccatgccaaaatagaagtatgtattgtgttgcttcttaatcatcacctttttttattgctcatcaggctaggaggagctcagtaaagctggatatatacagaaaatttactaatgcattggcggtatctgtaatagcttcagttgcctggattggttatgaggtatgcaaatttgactttgttaatcaatagtgcatattggctcactgacctatgttcctggattggttaatcagtaatgtggtgcgtattagtctcttaagttcctgtaagctttatgaacatccaagtacgtcattatcacatggcattccaaaattgtgccctctgaaaacaacaaagtcttctttataatcaaaatttatctgctatttttagaggacacctctatcagaatgtcttctttgcactttagtgcttcactatttttatgatgtcctgataaagcacccatggaaaatttggatgattcattttttttcataatacttgggttctaagcctgatcataaacttcttctctgcatgagtgtgaaaaagaatcatggaagacattactcacttcatgttctgcaattttcttcatgctgatatgagagatggtttcattcatctgcagattttttttcagggaatcatctgttttatagcattatagctgtgataaataacctgctctgctcaacaagggcttcattttgcaggtctatttaaagcgacagatccctttagtgagaggtggcagagcgcatggatcataactgcattctgggacgttcttgcatttgttttgcttcttgtgatttgttatctatgggcgccatcccagagctcacaaaggttaaatctttgcctcttcaatgactggaaatgccatagtgaaagtagtagtgtagcttgaaatgacttgaaagtatctgtgttgctacttgtaataaccagcttatctactcaaaatgccgatagctcgcctggctgcctgccatcactagaaagtagtaatgtgtttttatacggcacaagaaggttatctttgaaagcgctctaaaattgacatgtcaaaccttgtccagatacgcatattcaggcgaagctgccgacgacgatgatgaagaatctcaatctctgacgaaggggaccgacggtgatgtagggatggtaaaggttgacaaggacagaagtggtggtgtcagtagtgctttcagcttggaagacgaggctgaggaggacaaaagagagtgacctgctggagcaagaatgctccaaggttcctgagctttcttcttctttttggtggtgatttgatcttctcttttgtaccttctcagttacacaggtcatgtagaagcgcaccattttatccattcctgcgaggatagtatgttcgtggtgttccatgtggagtttcacataggccaggatggtgcacattatttaaatgactacacattcacaacagtgtacatatctgtttttgttaccggttgtgcattgcctgatgtatcatggtatcatgtatgaaactggtgaacgcagtgtttgacagatctgtttgcctaattgactggaagttgcagatgaaaaatagccaaagtttttaatccaaaactccagttctcctgcactagcactaaccatccaattacttcaatgcttttggttccaagacctggcatcaaggtatttaagccataacagttcaatctttctattgttaaagcatcagcagattctcgtgagaagatttttcaatagcggattctatgcacgggatagataaaatcgtaataaaacactgttcgttgtcgtgagaagattttttgatagctggattgtatacatgagataggtaaaggcaatccagatcctctgcaggcagtattgctcactgacatgtggatcctacatatccttaggcccacatgttagtgaagagtactgcactgcagaggaccttgagggcctgtttgggggagctttagattctgagaagcagctgtttggtagccagcttctgaaaatctagaaaagctctgaaactcagcttctccagcttctgacttcttagttcatttttcagaatatgtaactacagattctcagaagctatggactgtttgggacagcttctagcacccaaaagctgcacctgggacaagcttgtttgagtcactcaggtaagagaaacaatccattttttttcagattttaagaaattgtagttataaattcagaaaataaactagaaaccagaagctagaaaatctagcttctaccgtatcctcaaaatgtagctaccaaccagttatttctcggaatcttaagctctccgaacaagccctttatcataataaaacactgttgtactctctagctgaagctgtgcgtgcagccttgagtccttgacagctgacgttaaacattccaacggcagatggcatcatggcaaacaggcaaagagccaaagatgcaggctgagcatataaaacccttgctggtcaagccgcggcatgactgacaattgcacaaacatgcgtcaaagaagtacaaggccaaggaaagatgattacaagtcactggttaactcgagaattgatggctgtgacaccgttcttgatctaggcacaagattcttcacttcagccaagcaattttctcatcaagaacgaaagagtacaaggatggcatgacaaactctggattcttacagagtaaaggctttgtctgattcttcctccctctgtagaacggtttgttctatgttgtgagttatgacatgctttcataaactcctccctatttacacaaatgaaatcaggtgagctccccttctaacttgggttcaaaatgagaacactgtaagcggtttgaacaacacaactaggcatctacaagccttaccttctgcaattctgaactagagtctagaggtcatgagttgacatgcttgtctaggaaagcgtttgccagatttctgaagctggtattagcatctccagccacggcatactctcttactgccttaagtacttctggtttcagaatatctttctttgtcgaagggttacacagataatataaagccccaagtgcatagttcacctgtgaaatcattggaatggaattattcgtataggagaaactacagaaaagtgaggaatcaataagaaaatctattttttcaaaagaacaaaacattcatttcagtaattggatagtgttgaagttatggtttcagaaatactaaccgtattcttcactgggctagataagcattgtatgaccaacggaattccaccgcaatgagtaatgactgaagcatttgctggatctgcatgtatacaaatagaccaataagattttaaaaaaaatctatgtttgctggaaacacaattaaaaagtgggaacattaaaagggaaaattgggagcttgaagtattgcattgctcaccggcacaagagttacagattccaccgatgccaaattcgataagcctttcgtttggctccgtaatgcagtccaagaacaattctaggatatttagctgagaaagcaaaacagatagacaagttactgaacatgatcgctaattcaagtcaatccttatagcacatgaaatctgcacaaactgttcctaaagaacaagtgtgcgagataacaacctggcgcataaaggtgtagttataaggatcatatgcgaaattcgccaaatttgcaacaattctctccttggactctgcgataacaaaaataaaatagaatcaatgaacaatgtttaataagcatccaatgccatgtaaactctggcgtccatgaaccgatgaacttattctactcgacagtataatcccgaattatattttcatttttaaaaaatgaactagcttatgctggcttttatcaataggagaaaaatgcagaaacaattcggctgctatggacaacctaacgacggacggtcatctcatcatgaattgggtttgcaagacgagaaatggaactagctgaccttcatccgtggcctcctggaactgggtgacgagatcctgacgaggcggacgcaaatcaaacggagaaaaaaaaatcagctgatcagcgcgaggattttgcaggataaaccagtcgaatcttttccatgagccaaaaagcaaagcaaaagtgagccaacctggaggtgctggtctctcggggtgccgtggcgtccggtccgctcgacctgccgctgcgcgttcgtgaacatcgatccccctccgacccggcagagagagagagagagagagagagagagagagagagagagagagattcccgatctgctcaccgcgccgccgtggttgggggggagaaacgctgctggtggtggtggcggagccgatgcccgcgggaattgggggcggtggtctcgacgagctccccacgcacggagagcctcggctcgcccagcggaagcgagggggcacctctcgccggagtgatgccgccgccgccgtgtttcgtcgagaggggtctcgccggaggggggatttgccgccgccgtgtttcgtggaggagagagagaggggagagcggggaacagctcaatccgggccgtacgacatcgatctaacggtttcggatggggacacgtcatgcattgaaacacagtttcgggctcttttttggaacgaaggattttcatgggaaatttatagggtttatactgctatatacgtactgtacagctcatatacggttagatatatacaaccataccatagatcaatataagagaagagcatgttcatatgtattgcagctgtttaccaccattgatcaaattcagttatacgtgagtcggatagttgggtcatatgcatagtaattttcgatgtaactatggaattattttatatttttccaatgaagctctttggttgaaagatctggctacaaaatttttattggaatcctttctttcctccaccttttaacttttttaggatttcaaacaggagctcaaacctcttggttttgatttcctttgaaaagtccaattcaccgtgtctcttcatctctcttctcaactctatcttaataatacgagtatctaaattccccatgaatttcttatgaagtatctaaatttccttcgaattccctgtgaagtatctaaacaaccgttagatatattcatgtgtcataggtagtgggccgaggggtcgaggccctagggataaggatagagtcggttggataggattagattggatcctccctccatctatataaggatggtttgtatcgttattctagtcaagcaatgaatcaagattagtctctcccaacctaagtccccttctcatccctagcagccgtcgccgcccggctatcctcccggcggtgtttacccccctatgaatcctaatccataacatcatgtgttttcaattcccgactttctatttctgcgtttttactatttatgtgtttttttcaatttctgcgttccaaaggagccctagcagcttagcaactctgatctttccaacgttgaagtatcagtgcatcttgtaatggattttgctcttcctttttttttactaacttcttacaaaatctactcttccttgcaatggaggacaaaacaatatttactgcaaaatcaaggcaacgagtagcatagtaaagctctcgtgtggttgcagcagtcacactttacaaaccattgtagtattgaactggtaacctagagctggcaaaatttgggaaaagaaatacagctgatgcagttgtacgtgagagacttctgagcacagctggggcaaacagattcagatgttagcttttgagcaaaccaaatactgttaggttcaagaactcagggtcttcttgttggtgtcttctcaatctgtgacgcggagtggctgttcattcttcacaatcaactcaacttgattctggtcagcccatacagctgcatccagatacccaagctcatataatttgtctagaacctcgtcttcggcgggttccagagcccagttaaacagctgtaattgatttgagaattgagacagtgtcaaagtgaatcaaggtgagtggtaaaaattgtgcatttcgaaagtgactgacctgtcgggggctagctctgttctccggattgcagtctggactaataccaatcccttgcaatcctagtcgactggctgggaaagcacaaattcgaacctgcaattgtaggcatagtgtcaagaataagcattgcaaaacaggcagcatggcacattgtcctgttgtatgcatcaaagatgtgtacacaaagtagtacaacgcaactggttctgctaatggatatcgtggggggcctccctcactgtttccggtaaaaaaaaaactcagagtagaatatttttggagacagagaagccctcaactcacaagtgtgatgcatcctgcatgagacaggccaacttgcacacgcccattcagaagaagcggtttcagaattgcacattcaaatttcagtacagttttttaaaacagattgctcagttatggaaaaggaaaagaaagaagataccccaaattcaggttatacagttatcttcactgtaaagtataaagagagcaacagaaaatgtattaaatttgagaagaaaaacacattattatgtactcagcttatgatcattttagtacatgaacacatcacagtgcttgcacctactacagaacaaaacatgtctgaggtgtccctatgttgcattgttcaaaatcatagtctaaccaagacagacatgtcatacggttttcaattgtaaaatcaacaatcagtgggggaaatgcttttcatacatgtgcagaaaactcaatagttctagtgatcagaataattttgcagaaccaaaagaagttatgacatactgtttcggaagcagaagttggtggcataaacaacgtaaggcccccatcaatgcacagcctgttccggaagaaagttgcaggcctgggagctaaatatctgaaacaagcacacccaattattcttaaacttagaacacaaaatatagaagatacatacagtacgagtgaggaaaagttaacatgaatcttacccaggaataaaagaggatgtaataactgcactgattacatcatcttttgagtcaaattggtcaaccagtaagcccctaggcctccaggacagctgagtaatagcaactgatgagaagaagttaagtgttcttaattattaaatccagttacttgtcagaaaataatgtagcagaaaatacacacagcaaatatgaataagcaatggttgaacagtatgaagcttaccacggatccttccgttgcacctaatgtgcacatcatctgggagaaacctgtctagaacatccttgagtacagcctgctcaagtgcacaagattacaaggttaaaaacatatcattcaatcagccagcacatgaactatttagtgacttgagtgccatatatgtctgtcgccttcagcgtattttttaaaggatacaccaggttactcatcacagttttctcgaattattacagtctaaacaccaaggtattgcaaagttgaaacatagttggcaaattggtcataaataaaccaatgatctatcacacatatagttgggtataatttacacaggaagcaaactcacatgttggccgcaagtataattaaaagtaaacaataaatggaaacagaaaacttaccccaaggcgaaaggctgtcccattgctccgacagttatcagctagatccttggtcacttgcaaagcatctcgcatcgtgttcccagatgcaatcactgcacagattatggcaccagctgatgaaccagctaacggagttctttcctaatgtaagtcccagataaagaaaccactataagaaaacttgctaaaaaaaaaagcagcagcatacatacaaaatgtatcacacgtaagtcctaaaatcacaagcataggaatgcagaatttccatgcataaaaatagcaggcaatgttaccacctagacagtacagtagcataaaaattgagagctctagccagccatggcaccaacaagctactcctactactcctactaagctaaagagaccaacacggaaattcgactgttgttagccacaatttcatctcgaaagtaacccgctcattggctaaagagaccaatgtgaattggattgttgttagccataatttcatctcaaagaaacaagccccaatagctaagcagacaaacgtaaattggattgttgttggccacaatttcatctcgagagagaaacaatctccactatcgtaggcacacggatctcacaattcatctgagcagaagctcctgtctcctactgcaaaaatcaagtacgcgttcgcgtagaagaggtaagagagatggggggtggacgcgcaccgtgaggtagcccctgtcgatgaggcactgcgcgacgccgatgtggtaggggaagagcagcccggcggcggagaagctgaacccggggccggtcagctcccgccgccgccgctccgcctccacgtcctcgggccgctgctcccacaccaccccgtccttcgcctccacctcctccaccgccgcccccccgcccctccccgcgcgcaccagcagcgccgccagccccaggaacacctcccccgtcctcaccgcgagcgacctcttctcggtcccctcgggcagcggcggcggctccgggtcgcggcccgcggcggcgcgggcgagcatgaagcgacggaagccccgcggccgcgcggaggcggaggagggaggggtggaggaaggtggctgcggcttgggagggaggccggaggcggcggaggagaggagggaggaggccatgggggctcgccggcggccgccgacgacgacacgtgtgcacgcgcggcgaagcatctgctacgtcgttaattcgtttaggtgcgtggaaaaaataattaaaaaatcgatgtagttttcttgtttctgtccttttgttttcgattttattttccgtgggcaaacgaaacgacacgtgtcgctgcccaagtcgatgtacgtcgtagctttggatagtagaactccgtatgcaggaatttttcgtgtcgtggcattggtatggctctgatcggaagtagtatttagtttcggtatcacctatatatttttcgacaaattttctcctaaatatttgacagatataattatagtataatcgtaatataatcggcacaggtgataaccagaggagacgtggtgcgcgttcaagaagctggatcgatttgtgtcgcgactccgtccaaatcgttgtttatcataaccttttgaaagatcgggaaccctagtgcacatcacaccctaattcgatgatgaagctgttgccctccacgctcaagctgtcattgtcctcaacgtcaaagggctggtgcggtctcttcctcgtcgtcttcggcaagtacgcgctcacggatcacgtcctcgctgacaactctcacctcaaccacgtggattgggcacagatggactgcgtcgtcctcggctagctataaggcacgatctccgccgacttgcttcaggaagtcatgttggccacggctacggctcgctctgtttggtgtgatctcgcccatcaattcctcggcaaccaagaatgttgcaccatcaatgtcaacgccgagttccgcaacttctctcaaggcgagctctccgtcaccgactactgtcgttgcctcaagtccatggctgacacgcttagcgacctcggcaaacccgtctccgatggtgcactcgttctccagctaatcaccgggcttagtccccgttttggcaacatgcattcacttttgtccatgtagaaaccattcccatcgttcatggatgcacgctctcagctcccgcttgaagatatcatgaagggctctcaaccggcagaaactgcttccgtgttcgtcgcagacaccgtcagcggcgcctctcgtcccgctagcagcaacaacggttctggtggcgttccccagaactcgaccaacggctccgtctccggcaaaaacaactcgcgaaaccacggctgtggccacagcaactccgatggctccggcggaaacaacggaggtggctagggcaacaccacctacgcaaacaaccaaggccggcccaccacctcccccatgaagcaggccgctgttccggcccagcaccaggcccagtggccgtccccttacaattcctaggccgggacaattcagatgtggcctgccctggtcggtgaggactttgatctgtgctctttgtctagctcttgttgatcttctcataaaaagggtaaaagatgaccaataaactaaatagtgaactttcgatccaccgccgcaggacgcctgacatgatgaaattgacggaattgctcgatagggcaacggaaagagattttagatgctaataaagtgaatgatgaactttcaatgctataaagccaaaaacgaaaacttttgttactataaatacaattttgccttaaaactttattgtacgtactttctatatctaaagtaatgaaagaaacaatctttctcgaaagcacattgggccacgtagtgttaaaaataatggccatcgaatgaatgcatcgagaatggatggccatccgatcattaacgacatacatgcggtagaaaaaaaaaacatgccgtatgcacttccctcccgagccttatagtgtctcctggcaagaataaaaagaccactgtatgtgaaagacaataagttatactagtttatgatgactataaccatcctgttattaatggtgtggatgaaatcttatctataatgtttagaatttgagtattagtttgtgcaaaaaatagaaatgctaatcaataacagaaaattttaaacagtttgctattgtaagatatacttgcaaggatgattttgtaggcagtggcatagtagaaccctttgtgtcattgaaatgaccatatgtgttattttgagcaaaggcatgatttaatgttgtcattgttcttacttttctttttaattcctacaatatgcatgtgtacagccctctggaaattctgcaacccaaaagccagaaccatgtcaaatgctccctcctgtgctcactcagacgatcttttaatccttgagttgcatgatcttcatgataacaactgaagttaacttacttttatgaagtaatttgttaatgtatataatattgtacgacttagtattataaattgcattttatcttattttttgttaaataaaaacacattatatgaaattacattcttgatgagtgcttttttttttcttctagcagctgaacttccagccgaaggcacgtgaaccttcttgattcatcctttttttttttcttttcatgcaaccattcctcccttcactttcaatcctatgtgccactgtgccagcttcattcaccatatcaatccaacagtttatatatttttcatgatgtggctcattctggagcgacaatacattttcattcgctagcggcctgccaacgacataaagattgctatgtacacgatccaatcgtccaacacgcatatgactaagtttaatcaatggttaccatgatttgaacctctaccctttgattaatttatggttatacggcttcagtcagtcttatgtggatagcacaacttgatcgaatgcatagtgagactctcgatacaaacacacgaagaagcaaaagatttttctttgtgaaagatcaccaatcttaatttggagccctcttggtcgacttgtgtaaactcattcagcatttggtattcgttcaagaaaaaatttaattcgttcaccatttggccaccatcccagaggtctcactttggagaccaatccccatcgggatcgtcgccaaattgctacaggtcccaagtcaattctctctcgaggattggcctggatccgatcaagattaggcttcctatgacagcgtttctccagcttccaggtaaataaatggacgtgcctcattcccctaggacgtcaacttgatcagccactgttgtcggttcagtgcccttaaaacttaaaaaaagaaccgatcatttcattagattaaaccctccatcaacattggttaactaatgcaagtactagtattagtatacaataatatctctcacattttgtcggcaagaaaattgcaactggagaattggagggttttgttcctctaactacaggattgtcagtgtcaggacactaaacacacggtcgtggccttttctggaaaaccggaatttcgctggattttggtagtacggattttacgccaaacagcgcaatttgttcctaaaaaaatgttaatttcatttcttgaagtcactcgtcagtacagcatgttgtcttaggcagtacagcatgctgtcagttcagagctccaaaccttaaaacacactagtatttctttaagcaccttgtcagtacagcactgcactacaacatcttctcagttcagccacatactccgtaaagcctaaactgactggctgttttaagtttaaaaaccattgcaatatttgaaataaatgttaagcatctcgagatctgcaattcgattgatctttaatcttttgtcagcagagcaatttgtggcttgatccgggatcgggtgttttgtagtaattcttctcgaagctggaggtgttttgtagtaattcttctggaagctcccgtgatccgaagctggaggcattagaaacagtttagccctgtttagttcacaaaacaaaaatttttacactatcatattaaatgtttggacggaatattaaatatagaaaaaaactaattacacatgattgcgtgtaaattgcgagacgaatcttttaagcctaattgcatcataatttaacaatgtggtgctacagtaaacatttactaatgatggattaattaggcttaaaaaatttgtctcgtaattttttgacgaaatctgtaatttgttttgttattagactatatttaatattgtaaatgtgtgaccgtatatccgaaaaatttcccctgctaaacaatgccttattttctaatgagcaccgactcaccgacaattctgatcaaacaagtctctgaaatgagatcagaatcaaaagcattggcaatgcaacagtcatgtttcccactctcaataacaagaagcaactgaagtttatttatttttatttgtttttgctttgaactgaagatttcattcgaatccaactatagttttgatgatcatatatacttcacaaaaagaagtaaacaaaggtacaaaagcaagatcaaaagcagggtagatttgacttgaaaagatgcaaatttgggccgaatttatctgtccctgctattaccagcactgataatttcattttcttttcttttttactgtaacgaacgagagagaacgaaagagctaggcgcgcgtccaggccaaggccggcggcggcggcgccgccgccgccgcgtcaccgggcggctgggtagtcgaacggcagcggccgcacctcgtcggagagcgggtccttgtggcggtacccgtagttccggagcacctggtcgtcggcgaagttgagcgcgcggttcatcccgtcggcgcagctcttcttggagtagatcttgttcggctcgccgccgcacggctggcacccggtgaagtgcgtcacgaacggccgccgccacccgctctgcccgccgccggcggggcccgggacggcgcccctcaccgccgcgttcctcgccgccgcgtaccgctcgtgctcccgctccgcgtgccgccggcggagatgcgccgccgccgccgagggccgccgctccgccgcctcgtacctcgccgcgatgtcgtcgagccggtcgacgacctccacccagtacccctggaagaagtagcccttctcgaggtaggtcttggccccccatttctcctcgtgctcggagaggaggtagacgagcgccgactggtcgtcggactccttgtcggacttcccccggagcgtgtcgtggagcacgctcccccacctggcgtactccggcgaggcggggcccatgcgcgcccacgcgtccatgaagtcgagcgaccactggcagttgcggatgaggaacacgccggcgttgagcccgacccacgagcgctcgccgtacacctccttgttccagccatagacgacgaggttgtgatccttgtacttgtggagcgggagggagaagtccatgtcggtgaagacggcgtcggcgtcgacccaccagacccactcggcgtcggggtgggcgagcatggcggcgcgcacggcggggatcttggcccagtaggcgagcatcctgggctggagcagcgcgttgttgtagaggagctcgacgccgtggaggcggcagtagtcgaccttgttcttgaggaaccggaagaggaggtggtcgccgccctcgccgcggcagggcggcgcctgcgagccggacaccatcaccacccgctccctccccgccgccgtcgcgttgagcccgcgcgggtaccgcagtcgcatccacgccgcccgcctcgcgtcccacccggtgatccccccacgccgcccgacctccacggcgtacgacaccctcgagtcgtcgtagaacgtcctccccgccgcgcccggcccgccgcgtacgccgacatcggcgtcgatcgccgcggaggcggcggacgtggaggcgaccgacaccgggagggagcggaacgcgacgaggttcgtgacgggcatgggcgacaggaacgacgccgtggccagcagcacgagcaccgccgccaccgcgcccgccgcgaagacgagcgcgtcgtgcacccgccccgccaccgccagttgcccgtgctgcgccctcgcccccgccaccccgccgccgcccttggatgccgccgagacgccgaacggcgcggtctccgatgccgccatggccggtctcgcctcgccgaaccgaactcccactctactcgcgagcggcgcgctcgcggtgtgtgtgtcactgtgtggtgttttaaagcggaaaaggccaaaggcgtctctctcttttgtagtatagcggaggcagcggaaagcggaagcggttgtggacttgtgctgctgcgcggggtgcggggttggttgttgttttgggtgtttttgctggggtttttgggcgttttcgcggtgattgcgtgcgggtgaggacgcggctcgcggaggcacggcggcgaggcgatggatctggctgtgtgtgtcggccgtggccgcgcgcgtgggcacgtgacggtgtcgcggggtgtgccgtgcgcctctaaccccccggccgagtcacctcactcgttttttcgcacacacgctttttcaaactgctaaacggtgtattttttaaaaaatatttatatacaaatatcttctatctattatatactaaaagtccattaaacttcttataaacgctctcaagccgccacgtggtctcctataaacgcttctaagtcgtcatatggcgttctaataaattagagaaattcctagaaattctaagaaaaaagcaaaacatctgtccatccgttttcacttaaattggtggacccattatttcaagccgtcagattagtttaaaaaaaatctttccacatccacctccctcctcccacacgtaaccctctctccccttttgtacatactctgtcacgtaccatgtcaaaaaaaaatctaaaatcttcagatacgtacgtgcagcccacatatatctccttttctctcaacaccctattggcctattttatagctagcaattcaacataaacatggtgagttaaatggtcacaatttaatttagattgggagtaactgataacttaagatcaataaaaatccaaaatattctgaaaaaaataaaagttaaacattgaaccattgatttacgcatatacaggtgaactattattttcaatcattagattagatcatactaaagtaattaatttctctctcctaatctcatgcgtatttgcaagagagaaaaataaatatatactattctcccggagaaaatatacgtatgtttatatgcatgtacaggagactattatttgcaaaaaaaaaacatgaatatgtacgtacataaaaaaaatattaaccatgtccttctaacccttaaattagaaagtttatacatgatcagtctaccctctgctgtggctcctttcgatctctccagtttatttcctagggtcgttgttgactaggctatatcttatatcttatatttgtgacagttaatttattattaggagccaacgtatctgagatcgttgatatgcttacccagtccaaaatgaaaatattggttaaagggtagtctaaaataaaacattcataataaaatatggcccaaagtaaaatttgtgacatatatatagcaaattctgattaaaaagttatcatatggaacaatattctagccaatttttatatctttcttatccaaataatctcaacaattactccatgttttttaataactgattgtggatattatattcatttacaacccactttttctatagaaaaattataaatatgttaactatcttttgaatgaaaaatattacatggaaccacattctatcacttttcatattattatacatagcattaacaattagcacaaataaacttgataacatatattgttccatcatatattaccccacgaacatgcatagatgaattagatcaataatacgaagaaaagaaaaatatcaaaactcatattacctcgtatgttcatgaattattactactcaagcagatatttttccacgtgtttctcaccattgaagctattagattatttgaagtagtatcgaatgatcaactctgcttattttcagaagagaaaattatatctgtaccactaaaatttagtagaccaattaacaccataaacaaatgtcaactctattccataaatggactcaaaacttttaaaaaaaatgtatcactttcatcttatctatgtgtcattccctgaagggcaccaagcattgataacatagtttgctacactactatacgtatggtgggggtatgcatatgactaagttgaggtgacccagtgagaggctactattcgcaataaagttcaaatggcttacttaccgatgtgattctttaactgatagtgaattaggtattaaaattgtgctccacactaatcttgaggagaacaactatgtcgatacgggacacatgtttcaaagtataagagaagaaagccttcgtggctacagtcgacttcacccattagaggggcatttagatcaaatttaatggttttatcccatgaattggtaggagtaatatttcaaaatatttatgcatatatttaaacacaagcgagacatgaacaatttggtatgaagtagagatgatctttttgttgtgtctagacatttatttttatataattataggtgatctatggtccttataattaattaatatggtgagataggatttctttagcattatttttataaataataaataaacgtttcttataattaatatggtgaagtatgacttcttttagcaatcttttataaataagttggccgcgcatttgcgcgggcttccttcctagttatatactaaaagtccattaaccttcctacaaacgctcttaagccgccacttggcgctcctataaatactcctagatcgccatggcactgtttaatctcaccgtcgattttcacttaaattggtgaacccggtattttagaccattagattagatgtattattttaaaagtaatacttttcctcctgtcggtgacatggggccgagggtatcgtgactagaggtttgggtagccgcggtcacccacgtggcctgaccccctcgggggggtcgggcccgaggatgatgtggccacccctccctctgtctccccgaggggtcgggccacccctgtttcggccccgagggctagggcgccccgaccccctgtgattttggcgccacatgtatgggttaggtgagcacagaggggctcacctaaccgcatttattgcgggttggacgagcgcgccacgccgcatttaatgccgcgtagcgcacgcttatccggtccgtgaccggtcgcagtgtgtgaccggtcacagaccggtcagatcgcgggttaggtggcaacaggcggcctgtcacacgcctcgccccgtcccgtcggattgatgagagcctccaggcactcgtccctagccggagccggcatgctaactcctggagttggtatgtcagtcccggccagattcgttccaggcttcatcgcaaccatagcaaggaagtcattgtatgaagaaaggcagacgtgcggcatgctaaactgacgcgcggtggacaagagtgaccggtctgtgactggtctgacgccggtcacgtcataggcagacaaccgtgctcccacgttgcatctgcttccggcggagtggaggtaggtatgacccatcccatcggagggtcattcggacagcggccattgcaaatctccacccattaatgaaggaatgacagggttatcccctgtgtcaggcgagtgacggcactgggcctcactcaaggacaagctgtgatttagcttccaggcgaaggtgcgagccaagtttgggtcaagatagggtgagtccccacccaaaagaagagtaggtagaagtggtgcatgtggtatccccttgagatataaaaggaggaccttgcccaccgaagtaaaggacggagaagagaaaggggggacgactcggagaatacctgagctcatagaggagagaaagaggaagaggggttctagagcctgaactctcttgctctccggctctctgtaactccttcacacacagatccaccagaacacaggagtagggtattacgcttctcagcggcccgaacctgtctacatcgcccgtgtcttgtgcatttgctctctcgcgaacattccacagatcgagggtgaagaacctcacttagcgcccccggccgaaccggcaaagggggacctgcgcggtctcccggtgaggagccccacgctccgtcatctggcgcgccaggtagggggcgcgtgtgtctttctaagccctcgtcctctttcgtgtgcgccaagcttctcccgctcagcccaatggccgaacgggcagtggcgcacaacctctctccgagcgctagcggtgacgacggggagcagaacccgcgccgccgagctcgtactccaccgtccccctctcgccgaagtcttgggcgggaggaggcgctcgaggaggtcgaaagatccgcgacttcgccgcccgcgggtgatggagaaggacggcgagacggggaacgtcgcctcctcgtctacggcgatggcagcacgccccagggcgcgctctaggctgcgggcgcgctcctgcgtcacccgcccgtcgtccccgatccagagactccagcccaacgttggctagacgacatgaccaacttggtcatgacggcgcagcagcgcctaggtgccggcgggcggtcctccgccaccaaggcctctagcgctgctaccgccggctccgtgtcgtcgaggcggagggcgcggcgagcggcggccgttacccgccgttcgtccgccattccctcgtcaacgcctccgacccaagaagatgtgcgtggggggccggatgcccgcctcaatatcgagcgccggcgcaatggtcgtcgtgctgcccacgcaacggaggacgcttcctcgtccggagcgccacttcggtccgggcacgggggccagcccccccgtgtccccggttggcggtgccggctgtcgagcctttgtggcgagccttcggaacgtccgttggcccccaaggttccggcccaccatcaccgaaaaatacgatggaagcgtcaaccccgccgagtttctccagatctacacgaccgggatcgaggccgctgggggtgacgacaggatcatggcgaatttcttccccatggccctgaaaggtcaggcgcggggttggctaatgaacttgccacccgcgtcggtccactcttgggaggatttgtgccagcagttcaccatgaacttccagggcacatatccgcgcccaggtgaagaagcggacttgcatgcggtacagcgaagggacgatgagtctcttcgctcgtacattcagcggttctgtcaagtccgcaacaccataccatgcatccccgcacacgcggtgatctacgcgttcaggggggggcgtgcggcacaaccgcatgctcgagaagatcgcctccaaggagccccagaccaccgcggagctttttcagctcgcggaccgtgtggctcgcaaggaggaggcctggacctggaactcctccggtaccggtgtggcagctccggccgcccccgggtctgccgctcggtcagggcggtgggacaggaggaggaagaagaggtcggcccattctgacgacgagggtcacgtcctcgctgtcgagggcgcttcgcgggccacccgaaaggggaggcctgcgagcgacaaaaagaaggaggctggcgctcccagcagggagcgcccgaccggcaagtggtgttccgtgcacaacacctccctccacgacctcgcggactgccgtgcagtcaaaagtttggctgagcggacgaggaagtgggaggaggagaggaggcaggagcgccgtgagggcaaggccccggcggctcccgccggcaaccggcgaagtgaggccaagcagaaggcccccgccgatgacatcgatgatggcgacgatgacctggggttccaggagcctgaggccaccatcgccaccgtcgatgggggagcgtgcgctcacacttctcgccggagcctcaaggccatgaagcgagagcttctggccgcggcccctacccatgaggcgacgcggcgggcgcggtggtcgtaggttgccctcaccatcgaccagaccgaccacccgccgtgcattgcccggggaggacagatcgcgatggtggtttcccccaccgtttgcaatgtgaagttggggcgtgtcctcatagacgggggtgcagccctcaacatcctttcccccgcggcctttgacgccatcaaggccccggggatggtgctccggccgtcccagccgattatcggtgtgacgccggggcacacttggccgctaggtcatatcgacctcccagtcaccttcggtggttccgccaacttccgcacggagcgggtgaacttcgatgtggcggacctcagtctgccctacaacgcggtcctggggaggcccgcgttggtgaagttcatggcggcggtccactacgcctatctccagatgacgatgccgggccccggtggccccatcaccatccatggcgacctcaaagtcgcgcttgcttgtatggagcagcgcgcggaccacctcgccgcggcgtccaagcccgcgggtggtgacgagaggctcagcacctccgtccctgccgccccgaggcagcggatgatcacgtgcgacgaggtcccggtcaaggaggttgccctgggcgacggcccgtccaagaccacacgaatcggtggtcttctggacgacaaataggaagacgcgctcgtctccttcctgcgggcaaacgccgacgtcttcgcctggagaccggcagacatgcccggggtccccagggaggtgattgagcaccgtctcgccgtgcggccgggcgcaaggccggtccagcagaaagtgcggcggcaggccccggaacgtcaagccttcatccgcgaggaggtggcgcgacttctggaggccggattcatccgtgaggacatccatccggagtggctggcaaacccggtcatcgttcccaaggcgaacggcaagcttcagatgtgcatcgactacaccgaccttaataaggcatgtcctaaggacccttaccccctgccacgcatagatcagattgtcgactccaccgcggggtgcgaccttttgtgttttctagatgcatactctggttatcatcagattcgcatggctagggaggatgaggaaaaaactgcattcattacccccataggaacttattgttatacgacaatgcctttcgggttaaagaatgcaggtcctacttttcaacgtactactcgaatttctttgggtagccaaataggacgtaatgttgaggcctatgttgatgacttggttgtgaagacgcgcaaccaagagaccttactctcggatctagcggaaactttcgaaagtctccgctccgcccgcataaagctgaaccccgacaagtgcgtgttcggcgtgcctgcgggcaagcttctcgggttcttggtctctgcccgaggcatcgaggccaaccccgagaagatacgagctatagagcggatgcgcccccccagcaagcttagggatgtgcaatgcgtcaccggctgcatggccgccctaagtcggttcatatcgaggctgggagagaaggcgctacccctatttaagctcctcaaacgctccgggccgtttacctggacggaggaggctgagcgggccttcactcagttgaaggcgtacctcagttctcccccagtcctggtcgccccagagccagatgagccgttgctactctacctggcggcaaccccgcaggtggtcagcgcggcgttggtcgtggagcgcgacgaggacaaccctcactccgcgcatccccaccctgtgtcgactcgacccgggagagagcagggaggagaggcccccgagccgaacggcggcccaaggcccccgacggtcagagctggccctctgcccgcttgtccgacggtgccaggcgcccccgacccccaggatggccccggggccactgcgggaaggccgcgcctgtcgccctctgaccccgaggttgtcggcgcagaagtcgagggcgccccgcgtggcctctcggatgaagagcgccctggagatgcggcccctggcgaagaggatcggccccgccgaaaggtgcagcggcccgtctacttcgttagtgaggccctccgggacgccaagacccgataccctcaggcccagaagatgctttacgctattctgatggcttcgaggaagttgcgccattatttcctggcgcatcgggtctcggtggttacgtcttaccccctcggccaaatcttgcataaccgagagggtactggacaggtggtgaaatgggcaatcaaactctctgagttcgatttgcactttgaaccacgccacgcgatcaagagccaggccctcgccgactttgtggcagagtggaccccagctcccgagcccgtctccgtcctcgaggccagctcgggcccctcgcagctgcctcacaccgcctactgggtgatgcagttcgacggctccctatctcttcagggcgccggtgcgggggtcacgttgacctcgctgaacggagacgtcctcagatacctggttcgcctcgactttcgggcgaccaataatatggcggagtacgagggactccttgcgggactcagggtggcagctggactggggatccgccgcctgctggtgttaggcgactcccagctggtcgttaaccaggtctgtaaggagtaccggtgctctgacccgcagatggacacttacgtgcgccaagtgcggcgtatggagcgccatttcgacaggataaagcttcggcacgtgcccagacgggataacacggtcgccgacgaactctcaaggctcgcttcctcgcgagcccagatcccaccgggcgcctttgaagaaaggcttgcccagccgtcggcgcgacccgaccccctaggggagacggacgcgcctgaacggcctccgaggcccgtcggagtccaggcctcgggacccgaggggagcgctcccagctcccctagattgattgcttggatcactgagatccaggcgtacctcgcagataagactctacccgaggaccgcgaagggagtgaacgcgtccagcgcatctccaagcgctacgtgctggtggaagggaccctctatcggcgcgcggctaacggagtcctcctgaagtgcattcctcgggaacaaggcgtcgagcttctcgccgatatccatgaaggcgagtgcggagcccactccgcctcacgcaccttggttggcaaggcctttcgccagtgtttctattggccgacggctctcaacgatgcggtcgacctggttcggcggtgcagggcgtgccagttccacgccaggcaaacccattagccggcccaggccttgcagaccatacctctttcgtggctgtttgctgtctgggggctcgatatcctgggtccgtttaggcgggccccgggcgggttcgagtatctgtatgtcgctgtcgacaagttcactaagtggcccgaggcttatccggtcatcaagatcgataagcactccgcgcttaaattcatcaggggcatcactgctcggtttggggtgcctaaccgtatcattacggataacggcacccagttcactagtgagctcttcggtgactactgcgaagacatgggcatcaagctctgcttcgcctcccccgcccaccccagaagcaatggccaagtggagcgcgccaacgcggaaatcctcaagggcctcaaaaccaagaccttcaacatcctcaagaagcacggcgactcatggatcgaggagctgccagcggtgctctgggcgaaccgaaccacgccaagccgagcaaccggggaaacgcctttcttcctcgtctacggcgcggaggcggttctcccatctgagctcaccctgaggtcccctcgggccaccatgtattgcgaggctgatcaagatcagcttcgcagagacgacctcgactacttggaagagcgaaggcggcgcgcggccctccgagccgcgcgctaccagcagagcctgcggcgctaccatcagcgccacgtccgggcccgatcactctgcgtcgacgacctcgtcctacgccgcgtccaaacgcgtgctggactgagcaagctctcaccaatgtgggagggtccgtatcgagtgatcggcgtcccccggccgggctccgttcggctggccacgggcgacggcacagagctgcctaacccgtggaacatcgaacaccttcgtcgcttctacccctagtgggggtcgggtgtcaggtctcgggctcgggccaaccccgcaccccccccgggcgtgcagggttggccgggggctaccacatgcatatacttatcttttttctcttccgtatttcaataaaagcattttcgatttcctaaggactgcgtctgtgccattgtttccttttgaataatcttggcttgaattagcacgctcgtgctcgatcctgcccttggtggcccgggccggctaaaatcgccaaaaggggcccagaaccgagccgtgccccggggcgtggtgaactccgggggggaatcggcaaaggcccacaatcgggttatccataaccctcggtcaccacgctcccggcctggccagtctcgacacgtggatctccccagtctaaagttataaaaaaccacctaatgttgcactattaatcagcgaagcatctacctatattcatactagtggaaccatgaatagagtacccaccagttggggttttgtttattctagggtgaacaaggtaataatatcaatagcaataataatgtcttaacaaaggtaaataggcatggctaaataaaacagtgataacgcgggaatgtaaataaagcggtaatgcattaatttaaatcaaaataattttataaacagggattcaatatgctcaaggatgatgtgacttgccttgctcgctttcccaaacgtcggcttcaacttccacgaagggcggatcttccgatgctgcagcgtctacacgaccaacaaaaaagaaaaggcttttactctaataaactccatataacaagcagaaacaaagcacaaaaatgggttcttgacttcttaaggaaaaattagagacttgaacggtctaattccgagttcaaatggccaagttatggccatttgaagtttatatgctctttaaatgaatatttgcgaatttcttcatttaaattttaatttaaaaagggtttattgcgtcagccgaggggagggggcgcgcggaccgggtccatgggagtggggcccacgcggcagcctcacggtccacggtggaccgggtgcacctggctcacactggccggcgccgtgggtcccacgcgtcagccgcacccgagggcgcgggcggctgacggccgggccccacacggcagctgctaggcgcgcccggaggcggccacgccggcgtagcggcgggaggcggcgcgcccgcgcccctatggtcgtcggcggcggccataggcacggcggagcggaggccgagagaggggaaggaaagggggaaacgaagcggcggtccacggctcaccccgggttgacggcgacgacggaaacggcgaccggagcggaggaaggcggcggcgcggctcgggtggacggggtcgacggcgttccggcggtcggcgagcgaaacggaggggtggacgaggtcggcgaggatgcggcgaagccgaaggaggcggcgccgaggtgggaggtggtccggggcgacgacggcggcggaccggagctcgacggcgacggcggagagagagagcgacggcgcgagctatattccagcggggagagagggcggtgagtggcggaaacggtggtcgggagctcagggagggtttatatagggttgggagtgagagagggcggccggaggagggggaagtgggcgcgggagacccggccgccattaatgccgccggcgaggttaggggaggggtttccaaacgaatccgagggagagagagagggaaaaatggggggaaagggggaggggatcccggggaataattccccccactttattgcgcgcggggacggcgggaggcggcgggattcgcggcggcggcggcgctagggcgcgggcgaggcggcgggagcggcgggaggaaggggatgacgggtgggccccacccgtcagcgagggtggcgggcgggcccgcccgtcagcggcgcgcgcgcggggagaggccggatgggccgcgggggagaggagagagggggagggagatgggccgagccggcccaagagggagagggagggaaaggggactttttagagtttttctttttataaaatcattttaactttgtttatttcttaacaattattatatgtgctctgaaaattccactaaaatttgagggctccttttagaccaaggagaatttaacaaaaattctccgggccacatttgaatttttcttgtacgtattttaatgtttgccaaattcttttcgaattttaattaattctattattccttttagaaaatgatttttatttcgggatgaatttatcaggacgtgacaaatccacccccttacaagaatctcgtccccgagattcgaggaggctagcaagaagataggttgggtggtcttctcttcttgcctgacttcttccgctccgtcttctataacaaacttgcctagcacaacttctccactctggaccgcttggctcgatctcctgttgcagatggaatcttctcttcacctgacttttccctggttgcacctctagctgacttcgactgggctgcggcattgaaggatggggcttcagttccagaacttcttataactcatatctttggagtcaacctcatacaagttaccaattcatgtcatgcgtcaacactagcttgtcattactaggataccatgtttgtcatttacttctaacttgccaccaactgcctcatattagctttcctggtctccgggtgctagctacttctgctatttgatgcaagggtcgataactttgcctttgaattatgtttctcaacagaaccaacttatcccacttgacgtgctttgacgtcttcccaaatggctttactgttggactagttatggtctgatcgtgatcctgccaaatctgaagcttcgttgttagatgtgattttaatctaacatctgtagattatcttcgaacatatcacttggttcataactgggaatagctctcacgaacaaacaactcggattcactttctttatgttcagtttactttccactattctcttcatgttgtcatcttttagcattcaacgtcttcctttacaccttcgaccttgatgagttccttcccattggatcatcttccaagacatggcattgcctggtaaccggtgcctgcacttttcactccgtgtagcatctgataccgagttgaagatttcactccttgctttcatagaaacacttttacctaggtcatcttgcttactcataaattttttttttcctcaatgtcaaggtgactgttgcagggtgatcagaggtcttcctcgagcgatgcaaagcatgtttctatttatcctttatcaatcacctttcggcctacttcttttcctgctagagaacatctttgccaatctctttgatcaatcatctttcgggctatctctaacaggtggtactctttaaggtgggtagcggacacttctggtggcgatgaggtcctttggcctactgcctttcggtgaaaccttgaagtagttcgtcaaaagctgtgctgactgtcgttgcctttgatccgaataagacacatctgaaactcctagtccaaacaaatgtctctttggttaatcgcttgattttcttttccatcatcaggttggttattaactcaaggttagaatatagttcctctgaaatgagaccctatttctcctttgtcagtaaacaattacacacataatcccatatccacatcttccaaaagaatcctaataggacttgtctgtattacacatttctcccttattacatgaatacaaggcactaccttaaacaaaaagggaagatgcttaacatcggtacattgtttctactatgggttatgattgacacgaggcctcagaggtatggcgtttgctccagtgaccacaggcgagtgacttgtcttcttcttgcataatggccagagtgatgacgcaggttacgcttcggctgtggacaatctctggagaaatgacctagttctttgcagttgtaacaaatcaatgtcttctttactgagttgtccatctaggaacgatcattctgacttggagttggaattggtggttggaaatccttgctaatattggcatcagtggtaccatagttgctatcaccattggagtctttctcagtgtcaaaattgctagggttgtcattctgggtgccttcattgatactatcgtcgatatcttggtgaatgctgttgacattgcacgcttgatctaagtggtcatgaatggggcaagaaccatggttgttggtggtatcatcagcattagtattgctaatgttgttgtctgcaatgtgtccatcttcttggggtaggaactcttgatgcgcaacagaagctccggtgatctgaagtggctcagtgcgctgtctttggttaccacatggaaatactgggacgttggcaatccttctcttgcagttcgtcatccgattatgctcactttcgagttgcatggctttgtccacaagtttctcaaaatcttcataatcctctaggagtagttgcactgcaagctcatcttttaacccctggagaaacttctcttgtttgtcttcatccgtttccacatcttctggtgcatagtgagccaaacgatagaactcgtgcaggtactctgtgacggtcaaatctccttgcttcaggtagcgaaactctcgttttcttagtgtgatcattcctacgggaacatgtgatctcttgaatacagatgaaaactcgtcccaggtgatggtatgtccttctggccgtgatgcttcgtagctatcccaccactctgaagccggtccaaccaactgatgagttgcgaagccaacccgctcctggtcggtgcactgaatcaaccctagcttcttctcgactgtgcgcaaccaatcactggcttccataggatcgacggcaatggcaaaggttggaggctcagttttgagaaattctgataacttgcattgttgctggactgtaggtacttgaacgttggttgcccctgctgggttgttccaattctgtaatagttgaaaggctgttgccaacatgttggtttggttaaccacaatttggattagcactgatgaggtttcgttgatgcttttctcattcccattggcttgggttcttgagtcatcggatccatcattcccatagcctttgttaccagtgttatccatctgtcacaaggtagaggttgagagggggagcatataaggaaagaatagaccagaactaggggcaagaccttaaaggaactaactctttttgttgatgtgttgtttgttttgcttattctgcaagttgattaagcaaacaacctagcacggttacatcacaacccactgatgcaaaccacgcgctacacacacaagcaaggaaacacacaactaacgactctaccctagagggtggcttaggttctgcgacgggttctccaagatcttcactgcttcctccacttcgctagcagatcctgcagtcttccggagcttcggcaaacaattggcgacatcttcttcttcgcaaaactaaccatctagtactagttgaaatttgaagaaggaaggagtaaatattttgcaaatagcacaggggaaaggaggaaaaaggggctttcgcaaatagtttcatttataaaatatgtccttaggttttatccacttggcttatcctacagtcgagatggctctgataccagcttgtcgcgaccgagaaaaatacattttcccgaacgctagtgtattaatccccgtcccaggaaaagccggggtacaccacacaaatatggtacaaaaggcacatctttattatatcgataatatttacattattacaaaggcacttaaggcctgacaataaaaaataaacagcagcggactaacgggcctacggctctatcttcacaggcgctcaactggggtataagccaggactccacctaagacttcttctccaaagcttctcttactgaagggggggaaagattgagcaagaatgagtacaaccacagtactcagcaagccacaccggcagatgcatgattaatgcaagggggtacaaggggtaataatataggggttaagttttgcagaaaacagcatttaaaagtcacttagttgcccaaagccattttataaagacgatcctagagttacacagtgttattaatcaaggccgtgaaccctcacgaacctgccttaacccaaggcctacgatgattcagaccgaactggcaacccgaccctgggtcccagctcgtcccaagccaacccaggccaaccattccacattttagttggtaagcaaattttaaggattaaaacactaacttgggtacattgctcggcgtgcccataaccgagggcgcggctattcgaatagattatactctgatcagaggtgtacatctttacccacaagacacatcttcctcacgtgtaaccacgtgccacatatcaccatggtatacgaacggaagacgtgacatagttcccaacccatcctagccataaacaagagtaccgacccaaccccacctacggccggaacccccgggacaggtaggcaggactgagcccccagcagcaggacaccggccctgtgccatgacatctcgactaccgggccgcagctcgtgtagccttcatttgccctagagatgtccatcgacccccgacttcgtccatctccatccgtgtacttttgtttataaccagactgagccacaaactaagccttacccactagacatgtggaagtacggtagtgctttccaacagaggcccgagcttaatccttatattggccggggtgctacttcccacaactggcatgcacccaaaccccaccgaaaaacaggttttaggggctttgaaagaggaagagaggggtatgtccaattccaacataagccaaccattccatagtgtccagatgatatgaatattcccaaagtctaaagttataaaaaaccacctaatgttgccctattaatcagcgaagcatctacctatattcatactagtggaaccatgaatagagtacccaccagttggggttttgtttattctagggtgaacaaggtaataataacaatagcaataataatgtcttaacaaaggtaaataggcatggctaaataaaacagtgataacgcgggaatttaaataaagcggtaatgcattaatttaaatcaaaataattttataaactgggattcaatatgctcaaggatgatgtgacttgccttgctcgctttcccaaacgtcggcttcaacttccacgaagggcggatcttccgaagctgcagcgtctacacgaccaacgaaaaagaaaaggcttttaccctaataaactccatataacaagcagaaacaaagcacaaaaatgggttcttgacttcttaaggaaaaattagagacttgaacggtccaattccgagttcaaatggccaagttatggccatttgaagtttatatgctctttaaatgaatatttgcgaatttcttcatttaaattttaatttaaaaagggtttattgcgtcagccgaggggagggggcgcgcggaccgggtccatgggagtggggcccacgcggcagtctcacggtccacggtggaccgggtgcacccggctcacaccggccggcgccgtgggtcccacgcgtcagccgcacccgagggcgcgggcggctgacggccgggccccacacggcagctgctaggcacgcccggaggcggccacgccggcgtagcggcgggaggcggcgcgcccgcgcccctatggtcgccggcggcggccataggcacggcggagcggaggccgagagaggggaaggaaagggggaaaggaagcggcggtccacggctcacctcgggtcgacggcgacgacggaaacggcgaccggagcggaggaaggcggcggcgcggctcgggtggacggggtcgacggcgttccggcggtcggcgagcgaaacggaggggtggacgaggtcggcgaggatgcggcgaagccgaaggaggcggcgccgaggtgggaggtggtccggggcgacgacggcggcggaccggagctcgacggcgacggcggagagagagagcgacggcgcgagctatattccagcggggagagagggcggtgagtggcggaaacggtggtcgggagctcggggagggtttatatagggttgggagtgagagagggcggccggaggagggagaagtgggcgcgggagacccggccgccattaatgccgccggcgaggttaggggaggggtttccaaacgaatccgagggagagagagaggaaaaaatggggggaaagggggaggggatcccggggaataattcccccctctttattgcgcgcggggacggcgggaggcggcgggattcgcggcggcggcggcgatagggcgcgggcgagtcggcgggatcggcgggagaaaggggatgacgggtgggccccacccgtcagcgagggtggcgggcgggcccgcccgtcagcggcgcgcgcgcggggagaggccggatgggccgcgggggagaggagagagggggagggagatgggccgagccggcccaagagggagagggagggaaaggggactttttagagtttttctttttataaaatcattttaactttgtttatttcttaacaattattatttgtgctctgaaaattccactaaaatttgagggctccttttagaccaaggagaatttaacaaaaattctccgggtcacatttgaatttttcttgtacgtattttaatgtttgccaaattcttttcgaattttaattaattctattattccttttagaaaatgatttttatttcgggatgaatttatcaggacgtgacacgtaccctcgaagttgtggacgatgtggtcggcggcgtcccggacctgcgcgcgtgcgctgtcctcggttcctggagggaactcttccagcgctgcccacggggagaagtcagggtccttggcctggtagcttgccagtacgagctccaccgcccctcgggcaaggtccctcgaggatgacttgatcgtctcctcgagctcctcggggagccgctggagggtcccggccatctctgagaggcgctgggcgaggcccccctggttggcggcgtatttcgcggtccgcccgcccagaggcccgcttgccgcccggcgcggtctagatgggagacggcgtcccgaagcatgccgggccctacctcgcccgccaggcggagggcctcgacctccccggcggacgagtccagcgcgccctgcagcttggcgatggtgtgttcggcggctgcgaggcgggcggctaggtcgccgtcgcccgcggcccccccgccgctatgcgctctcgcgtccagcttcttcgcccgcgcctcgagctcagcggcccgctg

SEQ ID NO: 7100 - DNA, 2048 bp, Oryza sativa
ccagtagaaatgacgcatatgaagtccacatgctctggtagaaacagctatatgtgtccgaaaccgttaatcgtaaaaaaaccataaattatttgccatgaaggtaacctcctaaagtaaaattgtgtggttcaggatcacacaaacattttctcatgattaacatttttcttttgactttcatgatgggtttgtgagttttgttaatgttgcatacaaatacaatgtatagttgtgaaatattaaattcaaattgtacaacattcataatgtatatttgtgtgcgggtatgtacgaatatacatatgcaaagccctttaattagagcaactatatataaatatccaatttgtaaattgcaatacaaagcaaaagagacaattgaacatatcagtaggtcttatctagccatatggctcgaccaacaatgctctgatccaatgtgaccaagtcattagcatgagaaagactacatgaaaaaacccggcaattacattagtttaaataataaaagcattacattagggatatatcgtgatgctacttggtgcatcaggtggtagttgcggtagcatgttccatcttcgttgatggatggatcagatgaggtgttgcttgctcaagtgattggagcagcggctgctttaaatgtttcatccattaccctaagcttgtcagcgggcgcggctgcgtcaaccgcatcagcagcaatcatgtagacgatggaaaccgcggcaacttttttcttttctcctgtagccttggccatgttgagagtagaggcagcaaccgtagcctgcttggacgtggcctccaaagtttccgccttatttgctggtagtgcaacagcaacaacaccatcgagggcctttcggatgtaggagcatgtattacttatgcatgtgtcaacattggcggtgcaatcctccgttggcactcacatggccactttaaagatatcaatcattgtcgtaaagttgtaagcggatgccgaaatagggatgataccagcaatcttgttggcgcattccacgggtgaggctaacatggttgacattgtaataaccacaagcataagtgcaatgaccttggccatcatgaagtatatatcctaataatttgatgagggatgattcaatgcaacaagaactagctaccctagatcgatgagttgcttgctattatgaaagtgggacgtgatttctttaaatagtctgtaaggcgtagaagctttgtggtcataaattggttggttgaatgcatatgtgccatgtctatgggtcaccgcgcatttctcccaataacatgtcgttagcgagcagctaggtgtttggtggatggccatggtaacaggttatccccttttagataatggaaggttctattaaacttgttctattacatcaaagtcatacaactacgctaagaacactctcgacgtctctataacaaggatgcgcttagccaaaacacatgcgaaccaatttaaaagaagggaggtccaagaagcattaaggaccatcagtaccaagagtaaatcgccaccaatttacctaggtaagactctcattcgccatctcctgcaagtgtagacacgcaacagtaaccaactcccgtgagctcgactttttagtataaccttggtgcgtaaccaatgtatagttaaaaataggaccagcatgggagaagaaacaacttggctgcttcttctaaagcggattagagtgcgacgaccaaagctacggatcagcctctaccgctttccatgcgaagaaccctagcctggcctaaatggaccacaatttggaaggtgtgcctcctgtagattcctcggtcctgtggtgtggtggttgtgcccatttggtgttatttcactggatttataagcccatcaacctataagtctacctctcaatggagttcaattgattgttcggttgatttccatcgattctcctccaattacgtaattttctcttcaaacaaataaaatttcaagtactagtggagatagattattcttaaacaaaatatgcatgcaagcatag

SEQ ID NO: 7101 - DNA, 1938 bp, Oryza sativa
cttttatgtttaggaaagtttctttcttgtccgacaaggacttgtatcaacccatgggtataaatatctacacccgaggtctatgtgatctatctctacgatcaatacaattcagcgcatcgccaccctttttacttctacttttgttttttacgttccggcggaacttggcacccgacgcggggctgcatcgtcttcgatcttcggcgaagggataagtccaatgttccgtaggcctaggcaattctatcgtttacgtcggcgtcgttcaaggctgcatcagtacattcgacctcttggattgctctggtttggatgatatttttgtctacctatttatcatatgtctatgttaatctagtcttagcaaatcaatttatctctatcggctgcttctcgttttagggtttctgccggtataggctaaatcgtgttgttagattagattagcttagacatctaccaccctaaaaatcagtcaacgacttgattgtctagatattatgtttcttttcatacttagtgctgcatcagttaagtttgatctactaagccgtgcttaaaaccataatctctagcatgcttcttgattgccaataagggtttcatcggggtttcagccggtgaattatctggacgttgcatcggctcataaggattgcacatacatataagttggatttcgccgatgacaacaaaggtttcactgtttaatctaatcttgtggatttcttgacatcggacctccagccgatgtgtgctttaaccttcggatcgatgcttatttatcatatcattgctagccgattggtttatactggattatattgcaatattatattatcatcagccgattgcctttatatcatcatctacattggacatatagccgatttatcgaaatcctatcgctattggctggtattggcatcggctattatcgatatcggctgagattgctccatcggcttatcagccgatcgactactttgatctactatctgcatatcttgtaagttgcaggatcaaactgacttgcacgcccacatctcatcaacctttggacctgcacaggagctaagcagatctcccaggccagtgtgttcgatttttttgtcaacacttgtgggtaaagatgtacacctctgatcagagtataatctattcgaatagccgctccctcggttatgggcaagcctagcaatgtacccaagttagtggtttacttcttaaaacttgcttaacaactaaaacgtggaatggttggcctgggttggcttgggacgaactgggacccaggtagggttgccagttcggtcggaatcatcataggccttgggttatggcaggttcgtatgggttcacggccttgagtaataatattgtgtagctctaggattatatttacaaaataactttgggcaactaagtgacttttaaatgctatttactgcaaaacctaaccctatattattaccccttgtacccccttgcattaatcatgcatctccctgtgtgacttgctgaatactgtggttgtactcattcttgctctatctctctctctttcagtaggagaagctttggagaagaagtctgttgacggtcgttatcgatcagtttcgaccgttcatactaccaaaataaaggagaactagtgatgcttgcaatggcataaatctgttagaacaataatattccactagtattaggtttactaacttttttacagagaatgatcataaagtggaggagaatcgacattaactcagacgataaatcaatcggacgatgtcgggaaccagacatatgaatagatgggccaagaactcagaactgacacgatgaattgggccaaaattcagaagtctgcgaagtggagcaatagaggaggccaccagccgaaattaggctggattggaccagccctaggttcgg

SEQ ID NO: 7102 - DNA, 10723 bp, Oryza sativa
tatttctgtaaatattaaaaaaaaaaatctaaaaacaaaaaaaactcccggaggatgaaggagctcccgacaggtggggcccacctgtcggtctccacaggagagaagagcgggcggcgtcggctgggccgattgggccggctcggccgcgcgggagagagaggatgttgggccgaaatcggcccaacgacttagggaaggattttcaaaactttttcaattaaaataatcacttaaatgatctttcaattgttaaaaatacttccaatgctcaaataattccaagaaaaatcctgaaaatacttggacactaaaagtacttaacaaaattataattagaccatttaatgattaatttaatatttaaataattgctgaactgctctttgtatgattaaaattaagaattgagctccgaaaaatccaagaaaatttcagagagtataattaaccatggagaatttaataaaaattaaatccacccatgctttatatttaggaaattttatttcccacatttaacttcacttgtaaattaatgaacatttaatataaattctaataataatttattaaataatttataaatcctgaaacaaaaatcaggatgtgacaccgagcccagcccaaagtgtgtcctccctccctctcttttcctcccctctctctcccgggcctccacttcctcctctcctcctcccggcctgcctcggcccaagccaggccgagccgagtcagccgcgtgcgcacgagcgctaaccgcgcgaccgcgtggggcccaggcatcggtcgtctccttcctcccgccggctcctctctctcccccgtgcaaccctagctcctttcttccctcaaatccgcgcgaatcaattcccttctttccaaattgattggggggaattaataccctttccttcctcttcaattccccctaatttcccccttgcttcgtgctctcaaccgcccggaacagccgcgccattcccggccaccttccatggccgtcggccccaaatcccgccgccgttccccgcctctcccatggccggatcgctcccttccactataaaatggagcctcctccttccgttctctcgtttttgcctcttcccgagctcccccgtggccacaccacctctccccgccgcccttctttctctctcccgtgccgccggccgcctctagccgcctgtgccgcctcgcctgtgcaccggccgacgtcgccaccaccttcctcggctctgcgacgccaccccctctgccggcctcaccgtcccctcgccctaagctcgccggaacggtgtcctcgttgacgtccagtggcgttaccgccactgtgccgcctccagccgctctggttgccgcgccagagcgccggccgacgtcgttgtctcctcctccggcgtcgaagcgtcgacctccaccccggcctgccctcggtttcgtccggagaccaccgtgccgcgtcggcttctccatcctccatatcgacgtctgtcacgccctgaagttcccctcccttgctctaaattcataaaataaatcgtccgaagaaattgtttaatttaacctagagatgaatccctaattaataaatgcaaataataatcggaatcgacatgtggaatttttcttggattctacatgtcaaaatattctaacaggatttttagttgaattttcagagccttggaaataattttaaccaattaaaataagcaaagtgcaatattaaatccctgggaaaatcctttttcctttttatcttttctttccctcctttttcctttttcttgggcccggcccatttcctcccgcgccggctcgctcctccctcctactcccgaagttcacccggcctccttctccctctcgggcgctgacaggtggggcccacctgtcagccctttccctaacctccggcagcccacgcctgcgccaaccgccgccgaaaccaccacccatcgccgcccccctcccccgccttccgcgccccactccgcgccctgcgcccacgtcgccgcccaccatccccactcctcccactcgcgcgtgcaccccgcaacggagggattcaaattcgaatctctctctctctctctctctccattccccacgtcggcgagaaatccggccgcctcccggcctcgtccgtctctctcgagccccaataaagcttccccgcactcccctccacctttttcctctttccgccgctctctcccctgccctccatcactcccgcaccgctacacccgccgccgccgccttttccactcctccggtcgcagctcgccgccgctggagccaccgccgagccaatctgctgccgccattagcttcgccgccgccaaagctaccccggccgccgcatccccatccaatcccgccgtcggggcccgcttctccccgcgcgccggtgagtaccaccattgccgccgccttcggccatggtttccgcccgccgtagaccacccctctccctctaatccttcccattttgttccctaggaggtcccggagatcgttcgcccgtcgccgtcgtcctcccgtcgctcgtcgtcgtcgttcgccgtcgtctccactcgcgccggccaacctcggtgaaaaaactccccctcctccctctttccctctctcccgtgtgcgtcgccgtcctccgcgcgcgcaccgtcgtcttcggccgccgccgccacttttcgcgccgtctgccgttgccgtccgcgccgccggttgccgtcgccggcgaccgcgcgtgccgccgtcgctcgccatgcttggcctgccggctttgaagccgagccgagccaccagtcgcgcccctcccgccttgtgccactgccagtggggcccacgtgccggcgcccctccctctctctcttgagccgccgctcggtggggcccgcttgccagccgcccctctctctccttgagtcactgacccgcgggtcccgcgtgtcggcgccacccctccttatgctgacgtcagccctgggatgaattattgcgcaataaattgattaagggtttttcttttatagtaaaaacacagataatcttctaaaaatcataactaattcatccgagctccgattaagtccattcaagtctcagtaaattcataaaaatgtatagaatccattaaaaatggttttgtttcctgtttcagtagtcttatagcatgtcttgcttgtgtgctttgtttgtcgcgtagatttcgcccgtttcgtcgattcgtggtttctcgaagacgttgctgtggttccatcagtgcgagagcaaggcaagtcatacattgcaattgatcatattgtacgcaatttacaaatgtcccgcatttctattaaatattgcattgttttaaaatatcatgtgggatgggtcctattactcagctatatgttgtttcccttacgccattgataacttgggtattaaaatcactagacgttggtttaggagattgtcacatcctgatttttgttttagggtttataaattatttaataaattattaatagaatttatattaaatgatctttaatttacaagtgaagttaaatgtgggaaacaaaatttccttaatataaagcatggatggatttaatttttattaaattctccatgattaagtcaactctctgaaattttctcggatttttcagagctcaattcctaaatgatacaaagaacagttcagtaattatttgatcaataatgatctaattataattgttaagtgcttttcttgtttaaaatccttaaattataaattgttgtttaaaaggaattattagaaatgattttaaaagcttaaaagagaagatctaattttaatttgttaaatctcaatataaaattgggctagataaaattttgttaaatactttgcttaattctataattcctagatttttctgggatttatttgagctaagggagtatttttaataaatggaattgcatttcatgaataatttaaattgaaaaaggtttttaaaagtcttcttttggctttgggccgaaagtcggcccaaaacctctcttctctctctccctcggcccagttcggcccagtccgccgagccgccgctctctctctctctcccgctgacaggtgggtcccacctgtctggcctgtcttcctccttcggccgccgccgcccgaaaccctagccgttgcagccgccgtctccttccaaaattccgtcgctcctttccatctccggccgaattgatagaggggaaatgatcctcttgatctcctcttccttttctcctttggaaacatcggctaaatcggtttggaaaccgttggattcgagttggattcggattcgtttttcccgaagtttccttcgccgtcgccggccgccgtgggccttcgccgccgcctcttagcccctttaaaaggacccccgagctctcctctacccgccgcccccttcgccttcgcctctcgtcgtcggtttcgccctagcgccgtgtgccctagcgccgccgtcgccgccgtcgctccagccatgcgccgccgccgttccagacgtcgccgtcgctcgggaagaccgccgtcatggtcgccaagtcgtcgccgtcctcgtccgccccttcgccgtcgccgaagatcaccggagcaccgtcgccgccgtcaagccgaagaccgccgccgcttcaacctcgtcgccgttgtcgtccgttgttcttccgccgccgttttggtcaccggtgagttcgccgcgtcgtcctctacgtgctggtgcccttcgtttgcgtcctcgcactgtcgttcgccggcgagcgtgcgccgtccgagccgccgagccgccgccgccggtggtgacgtcatcgctgacgtcatcgtccccgtccgtcgtgagccggtcgtggaccgatcgatctcggccgtacgttttggatcaagtcgatctcggccgtccgttcgcgtgaaccgccgccgtgcgcccggtccaccgaaaccctagcccgctgacgcaataatcctccttttccttttcaaaaataattcattattgcgtcataattcaattaaaatcaatttaagtgttttaatccgattaaatcttcaaaaattcataactaattcatcttagctccgatttagttggttcaagtctctaaatttttctaaaattgagatatacatgttaaaaatatccacatatactgttcatgcttgtttatgtgctgttttggtgtttttgcttctttttgcttagattccgtcgtttccggagagtccgttttcgccggagaagaatttgaagagttccaaggccagcaaggcaagtcacacagatcccaaacaaccctttgagcatgttgatcctatttaaagctactgtttttattcaactattgcatttattttcgaatgtcattgggtggaaataacctattgtttgttacaacccttttgttcttgattactttattccttgataccttgggttattataacttgactagttgagctttatatattggttcaactagatattagatataattgcttagccctgcttagaaacattagctcactattgggttaacttatgactcactgttatttaatgatggctgaatgatagttcacgatggtcaatcgtgattagttaattaattaatgtgccaactaaaacctggtaatggtgggttgtgagcacatggttttgatggtcgtgctcatgacaattaaggaccggttcacgagtttcggttgtgaaacattaaccgtgccaaccacaagccagcatgggcaacggctttatcttttgtgtagcatggttcattgcggggcaccagactgagaagtggcggagataagcccacgggggtcgctggggagtccataccttgtttataagggggtgattatgatccaggaaaggtgcgccgtagtggattgtgttatgcaaggggtattgtcacaactcctttccgaggtaccgtggtggtattgaggcacatggtgacatgatgtggggttgtgtcttgtgggtacagtggtacacctctgatcagagtaaaactattcgaatagccgtgcccgcggttatgggcgggtctaacaatgtctttcgtgattagtctcacccttctcaccatagtaaatgatgcttcaattggtaataatttgattagctcctggtttggaatggtatattcctggtttggagatagaactgtgcagccgggatggttgttcagaatggttgggcctatgcaacagggtatgttgtatagcgttggattaatattgtttaattacttaactgttttatcaaattctcaaatgtttgctaaatgctgcttttgcaaatgaaccctactatgccatcctttgttatcctgtgcacttgcatatttgctgcgtggcttgctgagtatgtcatatactcaccttgcaatcattcatcagaggaagagttctacagtgaagctgatggtgtggaggattaggtgtagccctggtcaagctgcctgtggagtggagccgtctgcgccgtttatcttattttccgctgcttagatctttattgattgagaggaactatctacctctgtaatgacattttatacgcttaatcattagagtaataattgtactctattatcaatttgttcttgtgtgcctcggctgattcctggacgagggttcacacacatgtaagcgtttggaattttggatagaaattccgggcgtgacagagatgcttagccatgcttagttcaactagtgcacaaaagggggtcacattaaagtataggctttgattattagcaatagctttggattagtgccactgcaatggtgttggttaattaaaatacactacatggtgggctgtgggtgcatggttttgctagacgtgcccatggcgattaaggaccggttcgcgggatgccctggaagaacttatcgtacttaccacaagccagcgtgggcaacggctgggcttgtagtgtagcttttctctagctgacgtacccaggcgagggtgggcatgatggagttgggtcggccggggtgtccggttgatcggcttccggattcaccgtggcacgaaaggggggttgcccgttgcctgctggggacgggggcgaaccctaaggtgtggtgcgatcggttagagagggttatgcgaacggtcctgtcacggcctctttccggtatgtcgtggtggcatgtcggcgcacgggaacgtgtcgtggggctgtgtcttgtgggtacagttgtacacctctgataagagttaaactattcgaatagccgtgcccgcggttatgggcggtcgaccagattcaccgtgattagtctcacccctagtttagcttaatgaactggtgtagtccaggtggttggttgggcctgttgcaacgtggcgtagcgttggatagtgactggttaacattgcttaattactacaactgtttttactgttttcaactactggttttaaatgcctgctttatgcaaatgaaccccgtagcctcctttggttatatcttgcatcatacctcctcttccggtatgacttgctgagtacagtgggtagtactcagtcttgctctcttttcccccacaccagagttgaagtccttctcagttgaagatgtctcgaagaggttggtttcgtcgctgccgtcaaggatgcctgtggaatggagtcgcccgctgcaggagtcaagccttcaggcttagctcgcttttatctttttccgctgcatttgtaatcttttgtatttttgtaagacgtggatctgtatgtcaacaattgtcgtttgtgtaccctggctggttctggacaggggtttaatgcacattcagcttagaaattctggttcgtgaatttttgggcgtgacaacgtccccttcggtcggtcgttcctctccgtcggctcgtcatcccgttgtgccgcctccgtcgtcggcatcgcagcggcatgctccatgccgtacttgcctccgtgcagctgctgccggctgccatcttcgcctcctcgccggccccggtcgtcgtcgtcgtcctctcgtcgttaccggtcgtcgtgctgttcgttcctccatcaagccgtgctcgttcgttgcccgcgtttcgtcagagtgtgctgcagccccgtcgtcgtcttcgtcctcggctccgcgtcgtcaagccctgcactggccgcgtctcgccttcgtccaaagaccgccgccgaagtcgtcctctcgtcgttcgcctccgtcgtccctgagccgtctccgccgcgcccgttcgtcatcgtcgttccacgccccgtctcgttgtggtgaggaccactctactggctgccccgtcctcgccctttcggtgtcgccccgtgcctgttgtgcggttgtcgaccccggtactcgtgtaccagtgtcggtagtcgttcgtgtgtgcgtgtggtgaccgtgttagtgtgcccgctcggtagccgcgtggtttccacgtgtgtagcccgcgtggtatctagtggagtccatttgtcggccactggcctcggttgacacacagggtccgcttccgtcaacccgtggaccgtctctgtgtacccggtccaccgtggtcccttaggttgacatgtggggtccgcatgtcaacagcgcagccttcttgtcttttccaggctagcgcttacacatgttttatagttgtaaagcttaattataataatccacaaatctccgtataacagcattaaacttcggatgaccacgtcctggtcatacgaactccgaatcgacctgttcaagtctcttaatgtttattataacctaaagaaccatgtgcctttctttttatgtattgttattgcttctttgtaggcttgtagcttagcttgtgtgtttcgcgtagcttccgttgttccagaggttcccgaagtgtggttcgtggttgtcgccgaaggttcgaaaggccgttctctctaagcaaggcaagtcgcataatccttgagcatattgaatcccagtttataaaattattttgatttaaattattgcattaacgctttatttaagtttttgcgttattattgttttatttagcactccctattaatccttgttatagccttatcattgctattgtttattatcaccttgttcaccctaggaaaataaaaccccaactagtgggtaatctatgcatggttcctctagtatgaacttaggtagatgcttcgctgattaattaggcaacattaggtggttttataactttagactttgggagttctcatatcatttggacacacacctccccctctattcaaaacccccaaaatggttttaggttgggctcgaggtgcatggttttgatagtagcacctcggccatcataaggaccggtcttcgggcctctattgcaaagcactaccgtactaaccacttgtctaatgagtaaggcttaactcggtgtttagtctagtcctgaacaaaacgacacggatagagatggatgaagtcgttatgatgaatatctctgaggcaaatgtaggctacacgggctgcggttcggcagtcgagatatgtaggcaaatgaaggctacacgggccggtgtccgttagccgagatgccatggcactggactagcacgcgggtggtctcacctctatgtgtgtggtgcacccggtctaggtcctattgctaggggctcaatcctggcctgcctgtcccgggataccggtcgtaggcagggttgggtcggtgcttttgttcacggctaggatgggtgaagggttatgtcacgttttttatgatgggttccacttgcaagggaatgcagagtaaaggcgtgtcttgttgttaacagtgaaatttggtaagcccggagtagtcatcggcttagagttagcatcggcttggaagtcctgagattagccgatgagagttgtcaagtcgtcagttgtcggattcttgctatattcggttaagaaaattgatctactaaaggaagcttatccagaagagaccgagttcaaagagaatgcggcatggcaagttatctattaattaggaatagtttgttagtttccttttatctctaggaaagtgtgtttagtgtcctataaggactttattttttttcttttatctttaggaaagtttctttcttgtccgacaaggacttgtatcaacccatgggtataaatatctacacccgaggtctatgtgatctatctctacgatcaatacaattcagcgcatcgccaccctttttacttctacttttgttttttacgttccggcggaacttggcacccgacgcggggctgcatcgtcttcgatcttcggcgaagggataagtccaatgttccgtaggcctaggcaattctatcgtttacgtcggcgtcgttcaaggctgcatcagtacattcgacctcttggattgctctggtttggatgatatttttgtctacctatttatcatatgtctatgttaatctagtcttagcaaatcaatttatctctatcggctgcttctcgttttagggtttctgccggtataggctaaatcgtgttgttagattagattagcttagacatctaccaccctaaaaatcagtcaacgacttgattgtctagatattatgtttcttttcatacttagtgctgcatcagttaagtttgatctactaagccgtgcttaaaaccataatctctagcatgcttcttgattgccaataagggtttca

SEQ ID NO: 7103 - DNA, 20352 bp, Oryza sativa
gttttttcttctcaagtaaattgcattgtctctaccttgactttacttgcactggtggagaaaccatcttctgtcggttggtaaagatggtcggccaaaatacacaatagtcccggttgcaataaagatatctttaatcccagttcaaaaggttagagtagtttttttatctttagtcccggttagtattaccaaccggaacaaaatatctatttctagtcccggttggtaacaccaaccggaacaaaagatctctattatctttagtcccggttggtgttaccaatcgggactaaagattataggcccgattggtaacaccaaccggaataaaagatcagcatgcgcaacatgggcggcggagagtacgaggccaaatcgaggaggaggaggagcagttaatatattctatctcctccctggccttatctcttcctcctccatatctcttctttttagaatttgtgtgtgtatttgatttgtgtgtgatgtgaatgtgatgtatctgtgatgaattttgtaaaatttatgatgtatctgtgatgtatcgatttggggagttgaggatttgaggatttggggataatttatttgggattttgggatggggatggggtgaaatcaatatattaaaaacaatgaagaaaagaaaataataatggagcaaccggatctagctagcctagctctatctttatatttagtcctggttggtattaccaaccgggactaaaaagactctatctcaccaaccatgactaaaaatggatttttactcccggttttttcacccgggactaaagatagtgatctttagacccgaattggtagtccggtttgaaaaccgggactacagtgaggttacgaaccaactcaccgggagtaaaacccctttctccaccagtgttgacatataatgctatttaacggaacatattgcatttcttttgtatttctctttttcttttcagtgtatgacaattttgtggagaagccgataaagggtcttgagtgtgacaaaaaactccagtgccatagctattttcatcttctttggatttcatgttgttgcaatgctgctgggggtatgacgagcgaggagattcaaactcacccccagttgtttagaaccatacatactacatacatactagtaatttgtccatgctaacgctacggtgtaataatattttgattaataaattatattattaaatttcatgttagtcaaattacatttctagaatcagtctcaaatgttaatttaagacaaagggcaaaaatatcatattgtctgaaaaaaataatttaagaccatcaactatatctaggctaaattctttcccatgagtcgctttttaaactgctaaatggtatgcgttatgcgaaaagtttatataggaaagttgttttcaaaaatcatattaatatattttttaagtttttttataactaatacttaattaatcatgtgttaatctatcgctccgttttccgtgcggaggggaggggttcccaacctctccaaaagaaaacagccctaatcacctcgacacaagtctagggacaatatatgtccatgtgtggcggggtaaaaataaattgaagacacattgcacgattagatccagacattcatttcaaaagcattataagaccaagtgcatagacattgaaatgccaaaaattgacctggcatggccaaactcaaaatgaaagctaaaccctgtaaacattcaaattctgtttctcacacaacatcccacattccacttgctttgattggagtgaatatggttaagaatatgttcatctcggatccaaaatataccttgcttaagaaataagttgacatgcattgcaattttaaacaaatattaaatttgttagcttgacctttagaattataataaatcagtacctattcaggatattctactgattgtagtgaggtacacaaaagaatgccaaattactgcaaataaaaggagcatccacattggtctcgacaattctaagtcattgcttacatggtcatgaaagggcagtcacattctaattctgaaacaagaaagcaatacctacataagggtgttacaggccacataagggttataggcctcccaactgcatttgcatgaatctggaataaaacaaatagtggcaatccattttcagttaaatggaacacacggagttgagaaatcaatataaaatcaaatgcagatgttataagtcataaccaattgattttttttaattgtaaaagcaatcaaacaagaaatagagggcaaagttcatcgatcatcaactaataataccttaagtagtcctgcattcttgaagcagtcaaaaattttggttaacaatgaacatgttatctgatcatttcagatgagcgggatgcctaacctgaaatctgccttggtttgtccctacggcaagatgagtgccacgctgcgcccaaccgatagaaattaacattatagagacctgtcaaccacagcgtctcatccaaccataaccaagtccaatatagttaaagcaattggtttcttaggactgaaaactttatcgaatttcagtctctcaggaatttttcagacaaaaattttgagaaaattctttcaggttataaatcctgaacttctatgctgcatgttggactgacgtacattactttttttcttcttgatctaaaagtgaacttaagcaattctaatcccagagatggccctaattaaaatctgcctgtccaacggtgcctgtttttatacatacatgcatgcaacaaaaaaaaattaaaaccgtttattaatctattatcattgatgaataattataattagagcatttgccttattacaagattagaggagcataataggtaaatgtagatcaaccaactccctttttcatggctaacatttgatagaaaatcctccataaaaatccatcaaatgtaatatttataatgcaattacaatgtaagtataattagggttaaataagtcacattaaactacacaaaacaattgctaggtaccaaacaatctgtcaaactcatgatctctgtcatgcaacagaacaatggagctataaaaagattgaaagaactggataataatttggaaagcctgaaaacaggaactacgtgcaatttgggccagcagttcacaaagcaaatgtacaacaatgcttgtttgttcaatcgaaattaaagaagtgaacttctacagtgtatgtatgtatgatgagaaaaatgtggacgactgcgtagcatttcaatctcatacctgctgtgtgggttcctgctgctatggaggctcctgctgatgttgctcgtaattgccataaccatgtatccattgatgtcccgtactcctgtcggggttaacctgtggacaagcaagatgcagctagcatcaacagacaagaattcaactctgtacacagaaaaacccccctacaaatcccaatatgctatcacggcagaaaatccacaagatggcgacctggaggaaggccgcccggtgccctagttctgtggccgcccgtcgagcttgtccgtggccctgactgaggcgaggaaggcgtcacggtgagggatactggtcggcaggggattccggtggtggcgcgacggatagcagacgatggaggctcatcggagaccaaacgacggcggcgcgacggagactggcaacggcgtgacgaaggccagcggtggcggatcgacggcctacggggcggcggcaattagggttggtggcagtgcgctcctgaggggggcacaatacgtcgattgcgcgtgcagggcaaggagatgcgcccgcgcggggtaggcgaggtgagtcgatcaggatcgttcgatcgggataaatgaatacagagcgtaggatttgatgaatgaaatatgaaggatgtaagacccagttgttgaattatagggtagatgcagagatttatgctttgatgcaaattgtagcacgcaccatcttccagcatcacattatctagctctttttaatgatgtaaatcattattgcaagattgccattagaagattacaaaaattccactataattatcatccgagtggcatacatgcaaaattaaaaaaccagtggcatgcatgcaggtaattactatgtatacatagatttgtaaaaatattgtggaaatgatgtgaggggtaatgattggatatgtttacatgttgatttgtttaattaaatagattgtagatgatgttacatacttgcatgaggttgaatatgtaattattgctagtgggtaatgatgtggcatagttgcatgttaagatttagagttagtgggttgtaactttatagaaagtaagtatagattagctaccagtacaagatgtaatatcctcgtgataaaaaagttaaaatatgctttctttgcacgtcttctttcaacattgtacaacggcgcataaaaactatacaaagtctatttaaagtacacatgtacatcacatatcttacacaatatcgagcacacaagacttgctaaccacaaacttttccaaaatcatgtacgtaagatcattccttgtgttgcataactggaatcgcagtctcaacattcataacacaagcaatcctcttcctttcaactcgccccaatggctagcccagtaaggatcctgaaacaaattctcattgttgaccatgagatgtcccagtagatgagtaccacttctcaaccatgctgttcttcccaaaattcgtattggtttgaaactgttgcggatcataggtccaacggaggtgtttcctgttacatggcatggcctgtcaacctcaactttttcatatcataagttacatatcaccactagagaacagatctctttcgtggtaaaaaaacacaaatttctcggatctataatctttagtgattttagttatatcactactaaagatgttttttaataccggttggtaacaccaacggtactatacaatctttagtaccggttggtaataaaagatagtttttaagtcccggttcaacattgtcaaaccgtgtcaagccgcccctcaggatctttagtatcgattggtgtgactaatacttgttccagttgatgttaccaactgctactaaagattatgttgatctgtagtaccgattggtgttaccaaccagtaccaaagctcatttcccttttatatgccttcttcctcctctagctcgaaccattgttgccaagaggaggaagagaagtgctgccaaatttttttggaaagtatttggtgatattacacgaatcgaaaggatctaaaaggttagcaatttcatcctctattgatgtatggttaacatattacatttctagctatgtttctacacatttctctcacaaaaagttgtggaaaaagaggagagaataaacttttagagaaaataagagtactttagaattttagagacattggatgaaaatgttaaaaaaaaagacaacaaaggaaaattatagaaaatgaaggaataagaacagaaaactaagtccatttttttttaaaaaatagttagaaataagaatatattgaaaatatgctcagaattttaaaaaacttctaaaaatagttaaaataagtataatacatgaaaaaaaatacttacaattttataaaacttctagaatttatatataattaaccatagctctgattaagtccatttaaaactcattaaaatcactagaaataagaagaattcattgaaaatgtttttagaattttaaaaaagataatacatgaaaatgtatatttacaattatgatgttttaaattattaaatgcttatttaaccattttcaccttcgtcgacttcgtttacatggccgatgcatctacatgaaataaataaatgtaaaggaagtcgaggaaggtgaaaataatctttagtatcggttggtgacatcaatcagtactaaagtgttgatccttagtaccggttgatctttaatccctaaggatctgactcggtctgacaatgttgaaccgggactaaaaacaatgtttagtgattgtacagtactagtggtgttaccaaccggtactaaataacatatttagtatggttggtaatagatctgagaaatttgtgttttttggtaccacgacaaaagattagttctccagtagtgatagccaatacttgataattgtgacaaaaaaaagcaagaaagcaaaaatagttatcaacaatctcacacagaataaagatattgtttgacaacagcgaatagttgataattgtgaaaacaaaagcaggaaaagaaaactagttattaacaattttagtcatcaaaataattattattcacaagtagtgacggattttaccttgtgcagcaggtcatgtgcaatgtagtcccaaggaagagatactgacatcaagcaacattttagaggcagaagctcatcatcaaagcgtttgttggtagatgcagcctcgtaggcatgctttgctagttttgatgcagtagatgctgcactatggacaagggcccgaaagctatttcctggatctttctttgatctctcatggctctgatctggtagaagacaatcattcccgtgtgagagtttgatggatcaacaacttgcactagagctacagtaacccaaaaagtgaatgtgcatgtctggggtggggcagtaaggatatttggaagtagttctaatgttgtacatttgttatagaatgcaaaatgcaaactataacctagcattgcaccaaaaagtgataacttgtagagaaacaaacatttcaacaacagtataaagatacgacagtagtttaccaattaccatagcaatatatgtgtgtcattattttaactgagtcccaaatccattctattagaactactcattacagataatgcatgattgcatgtcacagcatgataattatggcactgatgatttgggactctcagactaaccataactgacctgctattccagaaacagctacttcaacttctccacgtccttcagggcccctcatataaagtttatcaagtttagtgcggtcatgcccgagtgagaataagctctcaaattttgatctgccagctataacaggatatcagaaaatgtgaaacctacaaggaatgaaatgttaggtacctacaatttttttaaacaggaaatccactagttgagcaaagggttgatgcagttaaaaccagtactatcaaacatatgattctattagatttagctatggaggaagaaatatgttgacaggaatattaatcatgtgacaatagtttctgtgcagataaagttgaaaggaagcaaatacttcagaagaccaactgaacaatagtttccttggaaatacttagatggacgaaagactaaccatcataagcttctcgaacgttttggtagctgacgtagcctgaaaagagagttctctgcaataataatcacagaagccctatgtaggtgagaaactcattaatattgtatgacattatacatcataaagttgtgttgcagaagcagatatcttctaaagcgtaactatgctttgaacaagagtgatgccagtaggcagagagaacctgtcaatagttctaaatttatattaaaataattaggagcatagtgaaagatgtgcacaactgagaaggcacgactgagcaagccctccaaagcatataaaatattattatatctataaaactagaaaaggttgaggtgccaagaaaatactactttactatggcactgataatatggggcctgaaactgttgtccttgtgaccacaataaattaccagttgccaacaaccgaagtttaacaagactcttatgggtttgaacaaatgctcacagttttaaagtagatcggttttaaatgaatgatcacagtcttaaagatatgatggatttggcactcaattactaccggaaacaagaaagtactgcagatcggtaatgtttaacaatgcataactcttttaaaaactgattaaaacttctgatcttatgtgacattatctaaaaaaatgcaagatgtgataacatatatttctaactgcagaactactcacaacaaaaaaagtgatttgaagttctttccatctgaaaatggtactacaaagaaacctgcatcgtatgtgtgtgtgtgtgtgtgtgtgtgagagagagagagagagagagagagagagagagagagaacctttggtggtttttcttgtttgctcccagtgtttaccccagatagcacatttgagctaggatttttcgattcagtgttttcaggaaatgctgccccatcatgtgcattgagaataacacagtagcaatgttcagggtctgataaaacctgctaaaatttgaatgaccacgttaatcattagggttttcctatagagtatatatatgaaaacaatgaaaacaatgcaatattaaagatacatccatatgacaacacttgttagaacgctgaacactatctcttctactagggggaattaaatgggaacttacaactgcatcaaaggtatcatcgaagtcatcaattgagaaacaaatattggggtatgcaggtaccgtttctactgcctgttcaaagaaacaagaatgtatatagaaaaaccatctcttttaacagaaaaggccagaaaaaaaatcaccttccttcgatcaagatgaaaatttacgcggctcggggatgcatacacagtttttgtgacctgttttgataagacaatgagtttgagatggaattacttaacactgagaacatgttaaactttagctagggtagatagcattgcaacaatgaaatacagaagttaagagttaaataaaatggaacaactctttcagagtcaggttcatttcaacccaaggcttggaagaataaagaaaacccagccaaatgatcacacacgaggctttctgcagtccttgagggcaggaggtaccataatcctagcagtcaaatacacaccatctaatggctggaaaggttttgtaccgcccgccacgacggcctattgagagcaggtaccaatctatttctaatggtgggagggtaacatggtaatttcgcatcaactatttctccccatccaacgacattacctccttggctctgcagctcatgcgctgtctccccgtcttccctctcctgccgaccatcgcccacctttgggacagacatggccgccgccgatgtcaggggtgccagatatggccgagggcggcggtagctgggaggcttcctcgatttcatgggcggcctaacaacgagaacgatgagcagacagtgacagcgatgacctttgcgtggcagatgtggcagtggaccggctcgacgaccttctgatgcgctaggaggagagagcagggaacgtgggggcaggtgacggcagggacctccctccaccctggtccactcccatcgccgctggttcagtactgagctgagaccccactgacctctcttcctctttattttttgtttgttgctatgaattttgttgttgggtttgctgaaccaaacgtaaatagctatatgctggaataccagattacagtggaattggcagttttatattgatgaactataaaaacaagatccagagcttggatctgctgtaaataataggatatcgattcatgagaaagtcttgttctttgagttacgcattatttttcctcatccagattcctccctctgttcagatcaaagcagcagactcaaattgggtgccatcatgtgcattccccttgcaaggcatcctccctgatcctctgatcccattcccatgtctgtcgtgagaaacggatatagatacctagcattgctatttttaacttttggccatcatcctcccagcaaatcaatggttagatttgaatggtacccgtcattaccttgtacctggtggcacctcttaaggatggtaaaatcctctaaacacacagaagcctgatccagtattgtctgtgttctggactgtttagctccaaaacaggtgaaacaaaatttaaaggagttgcaatatgcagatttgaaccagcatctttgtctttcaatgtaggaaggaatcaagtggataggaccattgttcgtaagaaacaatactaggtattagttggcaaacaactcgaatagctgttaatcttttaaaggattttctcaagacaatttaatgttaccttcatcagactgtgttcctacagaaaaacctgactagtgaaccaagaaatagccagttcactcactggcctggtttaaaactgtggataaaattatggaatgttctgaaacaatgaatatataagtagtcatgaaacaaagctcaacattaaacatcacgagtaagtggcacagaatgcttacttgtacattaccttataaactggtgataatggtttgcttttctctgcacggttgcaaagatccatgatactgtacagtagatcataagaaacacaattgttgaataataatttgctatatatatcaactaaggaggaacatatgacacaatcagaggtctcagtttgtgtgacaatggatattgttgcactccaaatatttgtgagtaccccccccccccccccccgccccaaacacccacacacacaatgatgccagtataaattaataacgaaagatatctgactagttctgtaagttagaaggtaacctagatccagttcacaactgctagagcggggaagaaacagaaaatagaagcataaaactagtacagacaacatgtggcaacagtgtcacatttgagcaaaggaaggataagaatttaagagaatatacaggcaacttttttactgacagattagaagtttagaaccattaagttgcacattagaaaggatgtgcatcactagatcaccaaataaacttttccttgttaacataaataactgaatgccaatcattcaagataaatactaggtaaattttgctacaagacatcgtgacttcacgattttagctctaggacaccgcacggaatgacttttggggtaatacactctataaatgtggtaatttgccaagggacactgcacccattaaaataataactttcgctggaaggagagagaaaaatagcgcgaaatgtcaagaatacccttggacccacatgtcagctctcccatctctcttctctctatcccccccttccttcccacgcttccctgcgccagtccgccaccactcatcgattcctcgcgctctagcccgccgccaccacctcccgccaaagctgcttgccgcctcctcacgtgcgcccgccggacatccgagcgccgcaggtggctccggatgcgcgccctaccccgccgcctccgaccgccggacagctagcgccgccactggttcagggcgcgcgcgactgccggacatccgagcaccgccgcctcctcgatgctggcaaattaatcgagattcgctatagatgtttttctctcgtggcaagaagatggataatcaaacagacctccaaaattaacagctcataggcggaccatggacacctggaccatgacgagctcccacgtgagctcgaacaccttggcggagatggcgagcgcgcccttctgcccgttctgcgtcgcctcgatgctcacctggcagtccttggtccgcgccatgaagctcaccatgccggcgatctcctctagcttggcgatgatgtcggccaccgacgcgccggacacgaagcgcatcctctcgccgcgctcctggaacagcccggacaggtcgaagctcggcgacgatgcaatgatgtcgaacgcgtttaggatcttgggccgcggcatgcgcggacactggacacagtcgtggcagtacgcctccccgacgtggcgtcccctgccggcgggcgtggtgccgaggtaggcgcacggaacacgttgttggtcaggtcggcgaagcgcgtcgccagctaccaccggtgagccgtcccgtggcgccaccttgtccgcatcgccggcaaacccatctgtggcatcgatggaggagacatcgatggaggagacagagagacaagagagatgggagagctgacatgtgggtccaggggtatttctgacatctcatgcggtttttctctccttcaaacgaaaactattattttaatgggtacggtgtctgctggcaaattaccacgtttatagagtgtattcccccaaaagccatttcgtgcagtgtcctatggctaaaaccgcgaagtcacgatgtcctgtagcaaaatttgcctaaatactaaatacaaaacatgcaggatatcttgagagatttgttgcagaaacattacctgcatattgcaactgtaacagagtatgacgtgtgagcaattaaattcaaatagaatgaacgttcccaattgacatcagctaaatttatattggtgatcttttcaagctgctccacataaaacaaaagaggccaaatagaaaatcaagacagtatgtataaatgtagtataagaaattgttgagctcatgctctagaaagtatgttatgaaccaaacactagcttatgaaagtaaatttaccaaatttaagtctgtcaaattgtggcagacaatcaagtacatgctaaagaaatgcagtataagacttgctggtgcaagtgtaaatgtgcaatgaatgataaatattattggaaagaaacatgaatgaaaaaatatgttatggttgacaatacatgatgatgtagttcatcttgatacagtttcaaacagaataactcaacagtaaattacagagaaattccaaaatagaaagaagtcttgaaattttccttctaccaaaagggacacatgcatttattgatcaagttaaacaaatagtctagcttaatttaccttaggagcccatcttcgcacaaaaaagggaggtggattttccatgttatcactggacctgtacccgttcaatttctgcaccaacatagaatattgagcttcagttagcatacaagaccacaccgtcaagctaaataaggggaatcaatagattgaaatgtaccatattattaacaaagaagacaaggtcatcctcttccctcccctttgaaaccctaccatgcacgaagaaaagatcaagtatttcatgccagaatttatcatccatttccacgtctgatgcatcagcttcagcatcaataactgtccagccgatcaaatctgaatgttttttcaccatactcagcagtttgttcctaaaaaaaagtacaggacagaaagttgagcactggttaaaggatataagttttcgcagaagatgaagatatgcttaaatagaacaaaatcaaatctcttcctatttccaatgcattaccactagggagataacttagctctgaccagcatcattgggtggtatgtgttacagtggggtatgatgttgtcctttttttttcagcggaagtcacaagaatgatcattttggtcatgttttccttagcaatgggatcaagagcgctcttcaagcatagaggacatcagcaagggttaaggttaagcatgcagacggagctgcaaatcaaaggagggtgctttgcttgttgagatagctttagttctagtgaaaatgacaactgaagtgagatgaatgatcgatagtcagcagagacaagacttccgaagctgaaactattgtttattttgtcctgggtcccccatgatctaatcacatcactgctaaacctagaaaataaggagaggctgaaaagaagccattcaacaaagaaattcaatctttacatgagatcatcttaaaatagcaacaagaggaccactgctcaaagaaaagaaaaactcccaatatgaacacaggttaacaaggttgaatggcaatcttggttccatcgtaaagactaaagagcggtgttacgatataaaatggtatcatagatagctctaaggtctcagtaaatgtaatttcactcgaatgcattgagcatcaatgagcaataacttgtgctagatttcaaaacattactttaggtaattgaaatcggaatcgctaaccatcgtttgacagatttatgagccttcaatcattcggttttttagccgtaggatggtttgtgagatccgtgcttgcatctagctgctaattaactaggtccacgttactgttccctggtgttaaactagccgtacgtgttttccaaagttaatttgtttatgatccccacacgtactaattacatcgtacttacactataattacatattaattacataggtaattttagtgtatttacgatgtaagtctgaaaattacatatgtaattttagtgtatttacgatgtaagtttgaaatctacttgagcccatttgagcccacgtgagctttagatttgtccacgtgacccgtttgtttgttttttgtattttgtttgtgtatattaatgtcatccattagatgttgatctgaagggtaagaaatctgtatgataggaggccaaaaaatatgtcacatgatgtataggcagcctcgattgaaatcgatatgtgcaactgccaagctaggaatttcacaacttttgcaacatggaagggctgcccaaagctcacagaagtgaaaaataattaaaaaaaaaagaggagaaaaatcatcctcggcggcggccgggcagccgaggggtgggcgtccagggcacctcccgcggcgtggatgcgaggtatgagccatggcgggtcctccactcctcgggaggatcagttgtggttcccaatttagggattggaggaaggggatataggtgcgtgccgtaccttgaggacgaggccccggagccgctctctacggcgacctcgacatctccggaggaggacggctggtgcggaggaggaccagccatcgagagagcggagaggaagaaggaacgggagagaagggcggcggcgatcggcggtggatggccggatgcggccgccgccggcgactctcggtggcgtttgggtgttgaatgggtttattacgggcaaagccatcgtggcaggttattctgttctactatagatggccatctgggccgcccggcacggcacggcccaagcccggccgtgcctgggccgaggcttgtcgggccggcacggcccgaccgatgcaccgggccgtgccgtgccagcccacgggcggcataaacggcccaggcacggcccaatactagtcgggccgtgccgggccggcccgaaggcacgatgggctattgtgctgactcacagaaagagtttatatttggtccctcaactctgtgggctgtgtttaaatggctggaaataagtctatttttgatccctcaactctgtgggttgtgtttaaatggctggaaaataagtctattttgggccatgccttatacggttatataagtctattttttatccctatattttttttatttgatcgggccgtgccgggccggcccaccgtgccgagggtgcagcccaggcacggcccggctatcgggccgggccggcacgggcacgaccctagtcgggccgggccgtgcttgggccgggccaaaattgcgggcttcgtgccgggccgtgggcctcgggccatatggccatctatatgttctactccctccttccaaaagtctaatacctatttcattctttagttttttcaaaaatctaaatcctatttgtagttattatatgctaaattaaattattgatagaaattaagaaaccattttaatgcttattggtaacatatttattggttttgtcacatggtgaatgaattaattacgtcatgctcttggtaaaaaaataaatagaactcagatttttggaaggagggagtatttcttcaactccaacttcaacttcaaattcctcattttccgttagcacgtttttcaagctattaaatggtacggtctttttaaaaagtttctatgtaaaagttgttttaaaaagcaaataagtccataatttaaatttataatagttaatactttattaatcatgtgctaataagatttctcatttcgcgtgcaaccaaaatttatctccatgtgtggagatcgaatgggggccttagcagacatatacgatatcaccatagacattaattatacatcacctgtattgcaaaaataaatagctgtaaatgcgattatccgtatcaaatctatgatgttaacatcggtgtgtaggttccaccacacaagaaatctaaccaattgagttacgcttacttcgcgtgacaagtggctttcggctaaatgccacttatcaaaaaggatttgataaaataccactatcaattcgggactacatgtctacatgttagaatactatctgggactaaggccctgtttagatgggactaaaacttttaagtccctatcacatcggatgtttgggtactaattataaatattaaatatagactattaataaaacccatccataatcttagactaattcgtgagacaaatctattgagcctaattaatctataattaacttatgtaatgctacagtaaacattctctaattatggattaattaggcttaaaaaatttgtctcgcgaattagctttcatttatttaattagttttataagtagtctatatttaatactttaaattagtgtctaaagaaagagactaaagttaagtcactgatctaaacaccacctaaattgcctctctactcatcttcttccttcttccggcactctgtcaacttctcgtcatgctactcactgacgtcatcatcgtctgggctgccatgtcattcaactccctctatactggctacgtcctcctcgtctagacctgtctggacctatcactgttgttcggccatcgctaaagacaaggacaacaagcagcgacacctcgcctcatacactcctcatctccaatcacaccacactggtaagaatcaaacgagtgaagggacaatttcgtcccagtagtcttaaattaagagtcaaaccgataataaccaaacgagtgaagggacaatttcttcctagtagtcttaaattgagagtggtaatttatcaaatctctttttaggattggtatttgaggaatctcttggttgaattggaatggaaaaaaggttttattagcttgtttgaattatttttattttaaatctcgcttaaataaattggtaaactggaatttttgcaatgcctaaattttggtggatggttttggtttggatccaagattttaccaattatattcacggtctattgtttgtcctagctaaaatattaagttattaacagcaccgaaatttttggtaactaaccccaaatgcatgtatcatactactccctccttaccaaattgatcatcacgtaatagaatctaaaattttccaaattaatcatcatataactgtatggacacggatttcactggaatacaattaatgcagcatgggagaatatgcgcatgctaaggtgtaattggcatggagttttattgttttaatttgatgtaaattatctatgattttagtgcataaacttaaatgatgatcaatttaataggagtaaatattatccattctgttgtctcgccatttatcgttggttgccccccaaaagttgaggatcaccgatcctactgtgctgtgcataactagcgagcggacgctccaacaacacccacgttaacactcaccacaggatgtctcgccgccgtctgcagctgctgcttctcgccgccgtcgtgctcgtccacgccgccgccgacggttgccgagtgttccagatcgaggaggccaccgtcgacgacatccagctcggcttcaacaacggcagcctcacctccaggcagctcgtgttcttctacctcgaccgcatcgcccgcctcaacccgctcctccacgccgtcatcgaggtcaaccccgacgcgctcgcgcaggcggcgcgcggcgtcgccgtcgtcgtcgtcgtcgggcagctgctgcggcgggctccacggcgtccccgtgctcctcaaggacagcatcgcgacgcgcgaccggctcaacacgacggccgggtcgctggcgctgctgggctccgtcgtcaggcgggacgccggcgtggtgcggcggctccggcgagccggcgcggtggtgctcggcaaggccaacctcgacgagtgggccaacttccgcaccatccaaggcaccggtggctggagcgctcgcggtggccaaagccgggtaaggctaagctacctcctctcactcgctaacttcgccattggtttctccatcacaaaagtcaatgctgaatatcgatctctttagttcaaaaaattagcttgtatattccatgccaagttcttggagaattcttttaggaaaataaccatcaatgcaattctgcaaattcttttgtagcttgtcgaaacataatccacactaaaatttagtgtgaattctgtaaggtcgtcactgggtttatcacttatcacctttgtatttttcagacaggaaagcatatttttgtgttgcaaaattattcaaaactcaagcaattatatatggcatatactgtacattagtaaatatttggcatgtatatgtagaatccatatgttctatcagctgctccatgcggttcaagcacaggatcagccattgcagctgcagcgaacatggcggccgtgacactagggaccgaaaccgatggatccatactctgcccatcgtcgttgaattcagtggttgggatcaaaccaacggttggattgacaagcagggctggtgttgttcctatctcccctaggcaggacactatcgggtaagctaaggcctcgattgtttcctcgttcggcagttacaaatttcttatttctgtatacccatttaccaaacagttaaatagtgtatttttttaggaaaaaaacattttatttagtaatgtttccaaagaaatcgaataaatttaatttttaagttcataattattgataatcaattaatcgtgtgcctgtcttagctcgttttacgtgtaaataaaaaataacagctacttattagaaccgagactaatacatgcattacttatttagcccgtaccgatggttgatgtttttttactgtcactatccagttgttttcttgtgattgcacgagatccaaagtacactttattttattttcttaatgtgccaattggacaattggcttagtaaactcgatactgacaagtcaatgaaggatgtttatacataacagatacttcgagtaaattacttaacaaatgccatcagaaaatatcatgtacagcaaaatgttattcgaaatgttgaaaaatacggaaaatacaactagctatgtcaatatgtttcccatcctgaggtccacatcaatctagtgagaaaatatagaaaatgacggtttacccgttatttcttccccaacatgggcatggactaaatggcacacgacataaatcaaatgaagtccaaacatttcataaaaattcagagatggacttcaaatatttacttcgaaacaattttatatgtattatattgaattagtttctatggtcatttttattaatttgcttgatattgtgatttttcctacttgttttatttttcaaaatacaaaaaaaaatctgggaagctgatctaaataagtcgtcagatttttggatgctatacttatactgtaaaggcctgctaaggttaaaaaaattaagaaaagaaaaaaaaagaagggcatgattaatatgaaacttttataatcttccgatggaaaatgtgatggcaatagaaattggatgattcgttgttaacacaaaaattttttcgcatgaatccttatttcccctagttatgtaggcagtgtcattttttctataatataatatagagtaaagtccatcaccggtccctaaacttaccgctgtgtcatcccggtccctaaactcgcaaatcgaccgttcaggtcctcaaacttgtttgactgtgtcatttcggtccctaaacttgcagatcactcgtttaggtcctccaacttgttcagttgtgtcaccctggtccctgaacttgtatttgaatatcatctgggtcaaataggacggtctaaagactttatatttaaaaataattcataactttttcctgtgaactctaataaagacaaactttatatcaaacatgtagccctcgacgcgatctacaactttgtagttgaatttttttattttaagtcattttttgtcccaaaatgtaattttaaaattaaaatttcaaaatctataaacatgcaacaatattttgggaccctaaacagttttaattcaaa

SEQ ID NO: 7104 - DNA, 15665 bp, Oryza sativa
ctttttcctgtgaactctaataaagacaaactttatatcaaacatgtagccctcgacgcgatctacaactttgtagttgaatttttttattttaagtcattttttgtcccaaaatgtaattttaaaattaaaatttcaaaatctataaacatgcaacaatattttgggaccctaaacagttttaattcaaaaacttttcaattacaaagttgtaggtcgcatcgagggctacaattttgatataaagtttgtcttcattagagttcacatgaaaaagtcatgaattattttttgatataaagtttttagaccgtcctgtttagggccagggtgacacaactgaacaagttggaggacctaaacaagtgatctgcaagtttagggatcgggatgacacagtcgaataagtttgaggatctgaacggtcgatttgcgagtttagggaccggaataacacagcggtacaagtttagggaccggtgatgaactttactctataatataatataatggatgtttgtgatggcattgtcctattttgctgtccgtagactgtagttctttgattgacactagttgtcaaatttataaccatgacttaactttcataataacatacctttataatcaaggttttttctctttgttattatgttattactcttttttttcaaattgtttatggtctacatggctcgctaagtctccaactggttatgtagttcaggccctgtttagattccaacttttttcttcaaacttttaacttttccgtcacatcgaactttcctacacacacaaacttccaacttttccgtcacattgttgcaatttcttcaaacttctaattttgtcatggaactaaacacagcctcagtttgccaattgccaaataatatcatccattttaggaatggctagagacctttatttacaacctaacttgcatagttgatgctaaacttcatcacaacaatgtccttgtatgaagaatcatgatagtatggaagatgaggatgttttcaattcagaaaattcaaagatgcgggtctcatcttttcgcttatgcttataagctaaaaattgaatttcgaccttaaatttggagttgattttggggtttttcatcgaagtttatttttcagcttttgttcttagatcactaataacacgtatataaaagttttatttacaaaatatttttcgtttgcaaatataccgtttcgcttattcctccaataagcgaaaacgatgggtccggcaaacaaatttaattagaaaatatttttaatgtcattaaatatatagtccggggaatactgaatctactgttctaaaatatgtcaatcggacataacgaatggatgaaaatgatcatactgtaaagtgatgaaattccttggatgaatcccgtcaattcaaatgcaggccaatttgtcggacagtaacagatgccgtccacgtgctggatgcgattgttggctacgacagccgtgacgcaaaagccacacgggcagcatcaaagtacatcccaccgggtggatataggcagtttttgaagcctgatggattaaaaggcaagagaataggcatcccaaatggatttttcaacttcccaaatgggacagtgcaacagattgtttaccagcaacttctcgacacagtgaggtatgcaattacaggaattttcacaaaattatatacgttggcagaatagaagaaaaattgacatttcaaattgcattttacagaaataaaaatcacgcatttattattaattcccatcaaattatatatatgttgcaagtttatactatgaacatgcaatcattttacaaggtgcttccttttgtttcctgtaaatcaaaacgtatgcatgacttgccctcatcaatatgaaatatgatttaaaatgccaaaatttaggcatgatttacctgcatgcaaaacatagtacatagctaagtttttattttctgtttccgcttacattacatacttggcacgaatttatttaccatagtttataaagttcctttagagaaatcactgaaaaaaagttggtacataagctaaattattgactacgttcccaattactcttccatattccaagttattctcatgtaaacatataaacaattataacttgcacaataattcggatatgtgcctccctgatttcaatatgaggaaattttggcatatatttagttacagttggaatgtcccctttcagctgtttttatattaattaaatttacgaagttgtgattaaagcatctggaaaccacaattttccactagccggttgctgtgtattccatcaaacttatatatctgcaatcaaataatatttagttactgcaaatgtcagaaacaaatgtgtgctttatttggaagtaaattgaaatgtgtattttttttattgcatgcaaagaaggtgtaatttttgtgaaatttactgtaatgaatatatattggactttatggaacatccgtattctatattatcgcacgtataggccaacagatatggtgtggcatgatgtgcattatcaaccagtttaggtcatatgccttccaatttataaatatatatatggcgatagagaaaagtcagtttcctagatatttgacttttacatcattctttgaaggaaacaaggagcggttgtgattgagaacctagacatagcaaacttggctgttatacaagatgtccttaacaatggggaacagattgtgttagcagcagagttcaagtcaagccttaacacttatctgtcagacttatcctactccccagttcgttcacttgcagatataattgctttcaacaacgcacatccgattgaggtcagctgtgtagctcctaattaaccttctggtgttgattctctcacagttccacattgcacatatcttgctagaatttttttttgttttctgcaaatctgaagaaaatgtacatatttactttactaccttatatattatataacgagacttcggaaaaaaaatgatatctcaggatacacttaatcaacttgttcaacctttagtaacgtatataaaatcatgtatacatttttctagaggcattttctaggggcatacctaaaccatgcatagaattttcaacagaattatcacatccaatttcatagtattttcagatgacacatgattagaaaattctcttttggattgacactatcaattatcaatgaggtctaagatgaaaaatacaaaaataaaaaatcaaatatcccgaatacataaaactgataattagcaccactactcttgtataccaaactctttgtgcatcaaggtatattcatgttgttgcagattatgaagttaatatcaccatagtatattgcacatcttattttgttgaagattatgaatctttgtatgtaatgtaatcagcttaaaattaaaaaaacagtcagaacagctagctaaatgatattgccaaaaatgtgtataacaggagaggctaaagaattttgggcagctcatcttcctggtagctgagaatactactggcatcggtgcactcgagggagctgtgatccgtcaactaaacgagctttcagctgacggactggagaagctgatgcaggatgagcagcttgatgcaattatcactcccaatgacctagtttccactgttctcgccattggcggcatgccggcaatcaccgtaccagctggatacggtaagatgggagtccccttcggaatttgctttggtggattgaagggctatgagccgaggctaattgagatggcttatgcatttgagcaagctaccaaggtcagaaaggcccctaagttcttgcacggaacattttagcaacatggcagacatgtttttaactagtaaaaagtaattcattgggctgatcgtttatcgcaactactattgttgagcttgggaatgcaatttaaaacactgttgcagtgaaaacttagtggattgtgaaaaaaatattggagggagaggtatccctccaaacattgtctccggactcaggttgaaaccacacacccattgccactgtactatcaagtgattatgatctttatatggaaagccaaatctttatatgcataaaccttgattttcatgacaccttttgttttccatagccacatatatggcctgggagaggtgattcctagaataaaatgatcttgtaaattttctatgaaggataactcgcagagttccacatgtaactccatttgtccccttttgaatccagaagctgacaaaaattaattttgacttgaagagtttggaactgagcatatgcttgctcacagagaggaaacctgaagcagacttctagaggtttagagcatatcctatgtacaaatttgtttctgtaggaccaaaaagcaagaaccaagccaaccagaggagattgaatggttgtagtacccaaaaaccaaaacttttagtggaattgaaaattacgaattcgatgatgactggagtaaatgcgccggtctgaccacacaatgatctctagtctgactgacgtagtagctctggtctgatcgcttaatacgccgttgtcgcctgtcgccgccgtaggtctgactgcgatattcccgccggtttgaccgccggtgtctagtcggttagaccgccgaacctgagcaaacacaaatcgaagatctatcgatgtagattcaaaccctaacttttctataaacttggctctctcaaaatcaatatcgggagaccacgacctccctctctatatatacctatatatacttgaggtaggcagcctaaagccacgaaccaaactagtaaaaaagtcccactgctggggaatccgtttttagttatggttcgcaaccctatttgatcccgggtatgcaaccgggatgcccaatccgggatcccggttatttcaatatttagtcccagtgatgtaaccaatagggacaaaagtttttttttcttttttttcattgttttttgctgtttgcatattgattttgagccaaactcactaacatcacaaattaataaatcgaatgaacatcacaaatcaaattgacatcacaaatttacagatcgaatgtacatcacaaattgacacaaaaaaaaatcaaaggctcacggctaaggaacaagtttatgcttagtatgaactgtagctaaacaaatgcgcaaatacaaactttggtaccattatggtttgagtaagcagcaagctctaaatccgagacctctcaattcaccatctcacgcaaatccagcgtaattcaccacaagtgattcagcccctgctcaaaacttggcggcgattcgggaccaagcccgctgccgcccgcccaccgccacctaccgcctcctatctcctcccctcccgccagatccagcggaggagagggcgccgctgcctgctgaatcccgtcccgccgtctcctcgtgcgctgccgtcacccaccacctcctcgtgcgccgctcgccggcttccttgctcactccgcctgctcgccagcttcctcgctctgctgcccgctcgcgcggtgagatagatggatggatgtggccgaggggaaatgctttcagatggatggatggatggatggatacagcaagagggaagagaaagagagagagaggagagagagaaatgctttcagatggatggatggatggatggatggatacagcaagagggaagagaaagagagagaggagagaggaggaaagggaggaggaaaagatgaggacagggtttacgaggaggaggagaggataagtgcgagggattatatacgacgcgtcgatctttagttccggttgctaacagacaggggcctgacactttttgaattgggactaaaattgatctttgctcctggttggtgttaccaaccgggactaaagatcataaagtgtcgttgggcttttaaaccggggtaaagaacttctttagtcccggttcctatttaaaccgggactaatgtgattttttcaatcccaacaaagatcacttctccagtagtgctaatcccctaggaaacctttccgtacaagaaacaaactttttacaaacaccaattataccaaatttagactccctccaaatttgactccgcgcccatacacacacaatatttccatcgtatgtcatatgaaatcttcaccaaccacatgcaatccgtgcacctcaccctttacgtcattccttcaatgcaattgtccatcctctccaatagtagcacaagttctacagtagtctcctatcaaggattgaaatttcggtccccctctccacagcaatcaactatctcagccaaaatttttggaattttccaaaattttgtgaatttggccaaaatatattcaaatttagtcaaaatttattaaaattttaaatagtttcgtgcaaaaaagtaccaaaaatcccaaaattcacaaaaagttacgtggttttcaatagtgtgaaacctgcttctaccttgtcgaaacagtattggccctactcaagtcctctgctgctctggcaaacctagtagttctgggtgtgtttagttcacgctaaaattagaagtttggttgaaattgaaacaatgtgatggaaaagatggaagtttgtgtgtgtaggaaagttttgatgtgatggaaaagttgaaagtttgaagaaaaagtttggaattaaactcggccagagtacagtggaggaaatttgaaaactagacatcgcaaagtgtgccgtgctccctgccagacatcctccctccttccccgcacctcctcaacagctatcgcactgccaccaggtggaggaccgttcatcagagatgcaatcgatgatggtgagtggaagaagatgaaggaatagaagatttcgaatccagtcgcaatcgttcgcttcgctcccgttacaaccgagggggaatgttagaagtatagatatgtcggttagagataagagtcagatacaaattatagagataagatataatcctagagataagatagagtcctagagatagaatcctagagataaatatactcttagttgtattgtactccaagtctctatcccctatgtactccgacatataccccatgagaggatcgatgtaatacaacataatataacaatcagatgtttccacagctctggtgtgtgctacatctatgacggtgtaactcagttgacacttggctagggtgaagtgctagattttgtcttggtctattattgtctattgggcctggttgctttggatgttttgttgatcatgtcactatcttcatcgatggcatgtctttatccactgcagtttcacgacgccattgcgtattttggtgacaactccatggtgccttacatctgcccacgacattatttgcctttctttcatcatcatatcttcatcatcaacaccctattcagtccgctagatcaactattattaccttatgcatggttgcactaaccatgactactttatgacattggcttcatgtatcttgactaggacatctaggacataatggactatcattattgagcatgcacgatgtgccaaaaataaaatcatggttggcattaactaaaattaaaattgctgtccacttcttcacccacgtgagtggtgtgtggaagtatcaattcaatactaatctcttgaaaatttatttgctcattatttctcctcaccattagcatcctgctaaagcaagctgacatcatcttccgatgctgcagtgggtccctaccttcatggtgtgcccaaaagcacaaaagaagcatatacacgaaccacaataagaagaggaacaacaacaataagaagaagcaccagcacaagaagggtgaaggtcgatgaagtcatgggcaaggtcaacaattcacaaaggcatgccccagcaatgagtccagcgtcaatacatcgtggccaacaatatatagttttttatatttgagtaaagtacaccgtcggtacttaaacttgaggcgtggtgtcacttaggtccacgatcttgtaaatccaatatttgggtccgtaaatgcaccattcaggtcgaaaagctcgcctgactaggtttgagtgcaaatatggcagtacagcgtggccgtatttttgcatttacccccttcgtgagcccgtctcccccggtcaccgctggtggcggcatcggcaagggtaagacataggcattgtgcaaggccattgggagagacacatgtgccaaggcagaggtggctgttgaagtgtagcatcttgcacacgatgagcagcgggaagaggacgtcgtgctgggtagccgaagatgcggtgtaggtcagcgctggtggtggggcgtcactgacaagctggtcgggaggcaataagggatggaggcgggtagtgaggatctcgagtagggtggacttgctggctttgccggggcccatgatgagcaacacactgctctagacattaaacggatgaaagagattgcgccgaagaggttccggttggacttcgcggtgagccgagagcaaacgtacattgctggggagaagatgtatgaatagacgcgaattgcttggctccattcttgtagagtctggttgtcgttcttgtcggctcaaagacagggggtcgatggggtcatgaagggggtaaacgcacagatgcaaccacgccggactgccacgtcggtggtcaaacctagtcaaacaagatttggacttggatggtatagtaaaatatgattatggacccaaatgttggatttacaagatcgtggacctaagtgacaccacacctcaactttaaggaccggtggtgtactttactatttatagtttcttttcacataagcttatctacttcgtcaattgtaatcaccatacacaccataaaaaatgatccatccatgttgcttgcatagttttttcataaaaaaagagggagttgttttatcctaaaaatgtagatattatttaatgatataaagtactacaaatatctagaaacttaatgaaaagaatgccaattgtcttgatctaatgttgtgatgcactataaaaattgttgacgtcaatttttatctagaaatgcatatgtgttgcgactgatagtttaaactaatgattagtgtccgagttgttaattttatatcaaaataaatattatttctatagaatataatatatatagtttgtaaattaacttgttaatgttttttaaagtgaatagagttctatttttatgagtatgactataaatctaggaccagagattctatataaaatctgtttgcaagtattacgtcatgaaatgccaaaacaactggaaggactataatgtggtgctcctagtttccactgtgctgtatcttttcaaagattgttttatttggagtacttaagaaaatttgtttcattatgtgtgaggtaaacaggcttgatactatcaaagcttagatgaagacatactatgataaatatgaaaaaaaacttgttaacacaaatgacacagaaccttatagtgctacttaagcatctcataaaagggttcaccagttagtagaaaaaagaaacttaaagatgaattttaacaatagagttcaacaataataaatggttattaaagttaaggttcaaagttggtgcatcgatgatactattattatctaaataattaaattgatgatgttttactgtgatggaagcacaatgtagaaaataccctatattgtcactcatagccagggattttcttgtagtaccacttagtatagtgccatctaaatttgcattttagctctgctcgtaaaattcttgtgcatactcggagctcatttacacatgtattgttagagagtttggtttacgcaaaagattatttgtgtaaaccttgaaaatgtataataatgtctccttttgaattattgcaacctttggtgaataactttgggtaggtgatgaaatacaatcgtttggttaaattagacatgttaatatcatgtattctactctttactagtactgcaataaggttgtgtagccttctgaataaactttccaaagagccaaaatttatcgaaaatgaactccggagcaacaagttatgaccttttttttttttggtgctatcaaggaaagtcagaatttttgggcccttagcccagaagtttctaacagaactatctgttcagcctatgaaactgctaggaagtcctgagcctcaggccagaaagttccgggctgctgtttcttgagtaacggcttgtttttgggcccgagtttttaaacccctccattctctcctatgtttgctgctaggtttgggcaacaatatacttattcaaagccaaataacacctatgtgacatcttggactaactaggataaggcctgtgtggcccatgagagctatgtgcgcatgtttagtaccaccgtgctaatttagcgaggatggaaccaacttataaggcatcttccctccaaccatatcactctatggatagcatcgggggtttgtttcatgatccgttttatgtatatttgccacttatataggtagatcacgatatataaatacatcaagttagatcgatctcgattaaatttcatatttggtgatcggttgttattttatatattaagttagatcgatctcgattaaatttcctttttggtgatcggttgttattttatatatttaaattgatttgttaatataatttgtattggagtactagccaatatgttatctatgtttgctctaaacaatgatctatcagctatttccataatactgtcttaaagtgattgatataaacaaaagggatgatattacaactgataggacatattaagggttttgttttacttgtccatcagaaaaccgcagccgatttggtctaactgtatcggttgggtcctgacgatacgtcattggctctatcggccgataaactacctttcatctaattacggtttatgtttttcgttgctggttgcaggatcaaaccagctagcacgctcttgacactcgaggcacgccttggacctgcattggagtgaagcaaatctcccaggtcgccgtgttttctgtcaacaatggcggcttgacttgtcaggccgaggtaatagccgaccgaatttgttgatggcgtcaacaggaccatctggctgtacatgacatatccaagatctacgggttagtttgatgggatatatggaaatttgtcaggattgtgatatccggatacattgtaacatactggatcaaggaggagcacatgtaatttgtggcttgggaatgtagcatgtaggctatggctgaacctttttaacaaatatcgtacctcggtgtcatgtttggtattctatgaatatcgtatgtttatgttcattttaacaaatatcgtatatatgttcattttatgcatttggttcccgatgtatatataggagccgattttacaacttattgtcaacaatcctattcctcgtctaacaataaggcaccgatgtatgtagatcataattaagataaggcaactagcaacagatcatgaactgtaaaatacaaactaatcaaccatgatagcttctgaatcaggatacatcctcaccaattcctcacggatgtcagctggacaagtggtggcgatgtcaagatggagagcagtaccgctcagttgatctatggcagcgtggatcactggcgattgcatgatggaggagtggctgtggtggagcggtggacgagcaacatcaaggtggaggagcagcgggatatgcccctgggatctatggcgatagcgtggtggatgatagatggcagttgcctggacaagcagtgtcggggcgagtggtgcctcctagtctatctgtatgtggcttgcctgatcccttctccccacactaaaatttcttcatgcacaaaattttgattgtacacatttgaaccgaactatgtctcattcttgaagatggtccttatgacgcccatttttcctcactttccttgttattttggcgttatgagccaactctgcgttgttcttatgcgtagagacaatgtttatgtgaactcctctctctttcctccatgtcatcaaatcagtttacgtggcaaccgagagggcttgctaaaaagaccattgtacatgaccttataagttagagaacttgatatgaagaagtgacagttggatgcaacaatgtcacacacaactccgtggcctctagcgttttcatcatcaatagcataccatggatcaccataccggcttggtatgatggtcaaagtctcaaagagtgccatttggcatgtgctgcggtgaaataccctatgcttttgagcaagctagaaaagttcaaaggatgagtcacttgaagccctactatattgccaatttgccattgcatatacatgagttcaagcaataacttgacaacattagttagctaggaaagtttcatgctgatcaaatttcctatttcactgaacgtggaacttgaattgtatgccatcaaattcaaaatttgtaatccagatcatcaagtcgtacaatggcatacgccacatgggagctcatcgaacaaacttcagttccaaaggagttatcatgatttgcctagtggtacggggagctgaaggaagttgggtgaaggctttagaaggcgctctgcatccagtctggtcggaaggtggcctccccttcctctccttcctagcaccacctgcaaactttgtgggcaaaggaagcctttgctacaacgtcagcgagagataaaggtcggcggatcacgcgcgcaaaggagcaaggcaaccccgcgtctacgtaagatggggactgatgtgccccagcacccatcacatgaacactcaagacaatcatttgacttagccgctgataagagccaatccattacaccatttcaaggaccgattacacgtagacgtgcaaagaaactacaacaagagataaactcgctactagctgaaacatatttcaatattgacgagaattatatactacctaaatcaagtactttgctattgcttaggtttacacatgcacaacacatgatgggcatcgacaacgagctagaagatcaaagtgacgatgggttacgtgaagacgacgactgtttatgtcatgctgattttggagtgcactgtctccaaacatttgctccaacttccaaggaatgtgcgacccaaccagtcaactttctccatgcttaatatatatggttggaaagataatcaagtttagtttcacctccaacaaacggctcatcatttcgacttcccaataaggagtaatagacaaatcattgatgactgctaggaagccaaacagacgcgcgagtcttctcgggaattcactttttgtgacctttgagctagcctatgtccagtaaactcccaagacctttcattcctatataggagggttgttcctggtataaatattccctatgttttatcatttggaggacttttgacaatgaaaatatgaaccccttttgttcagctgtgtgctaacaaattcagggagaaatctctacccctctgcttttgtgattttcttgtgagagtacagaagcggcgttcgacgccccccaattggtgctcctggtcccttcgaggtttttccttgattgattccaggttgtgttggttggtaaacttagagtgtggttaggcgaaccctcgattcaggttaccgtaatagagacggtggttggcttcgagtacgatcgtcaggttgcactgttatcttggctgcttgcagctagttatcttggtctcttttaggctagttatctattcgtgatcctacgccgtgaagatcgggacgtcacccctaccggggtcgcatcagggacgaccgtattggggattgggacggatgggtgtgggatacatgacgccggtgggtttgtgtgttagtgtgacatatgtgtgagtctcacttagcagcgcaaggtaacagggaggtgtacatgtatctctgaaagacatgccacactattaattatcatgaacactggcacatgaatataaaatgaatactagtataggaatttaaaataacattagattcatgacttatatcggatctaacatatcatgcccagatattaaactaaaattatattagatactttcttggtatggattaatgtgaaagtgaaatataattgaatctggttaagatgagaatatagggatagaaaaattaaacaataaatggttatgaactaatgattgattgcgatgtaggagagtaggagtaggtaagacttgtaagaggtatatatatatatatatacacacacacagaatttaaatttttaagattagtgatgtaagtggggtggataagtggttttttttcctgatagtcacaattttagttactttttctttcaaattttatactatgaactgaaaaataaactatgaaatggatttttacgtgagtagtgagattgctcacttgtatccctatttaccgcaattgactttgaacacaaaagtttaatcatatgtcttactttcacgtttaaaatatctttaataataaaatatgtcacaacaaaataaaggcataaatatttatgactataattgaacgagcatactgatggagagatcaagaatccaggtagaagagcatcatgtgcgctttcttttcataaaaagacattgtgcgacaattaataatggcatcactcatctgtcgtcactcgtcacgcatgtgctcaatccgaattaacaaagacataaaacaaagttattaggtgaaaccacctgcgctgcgctatggctcagctccggctgccactggccgcggccaccatggctctcgccgccgccgccgccgccgccttctgctgctgctgctccgccgccactggcttcgagttcaacgaggccaccgtcgacgccatccagctcggcttcagcaacggcagcctcacctccacgacgctcgtccgcttctacctcgaccgcatcgcccgcctcaacccgctgctgcacgccgtcatcgaggtcaaccccgacgcgctcgcccaggcggcgcgcgccgacgctgagcgcgccaccggtcgccgctgcgggccgatgcacggcgtgcccgtcctgctcaaggacaacatggcgacgcgcgaccggctcaacacgacggccgggtcgctggcgctgctcggctccatcgtgcgccgcgacgccggcgtggcggcccgcctccgcgccgccggcgccgtcatcctcggcaaggccagcctctccgagtggtccaacttccgccctgtcaaatccggctggagcgcccgcggcggccagacggtggtaaccaccactgccaccacacatgctctgcttctcttctctgtttggtcgtgtatgctcacaaggtgtttgtgaaattgcccatggagaatccctacgtgctctcggctgacccgtgcgggtcgagcagcggtccggcggtggcggcggcggcgaacatggcggcggtgacgctgggaacggagaccgacgggtcgatactttgcccggcgtcgctgaattcggtggtcggaattaagccgacggttgggctcaccagccgggctggtgtcatccccatctcccccagacaagac

SEQ ID NO: 7105 - DNA, 59274 bp, Oryza sativa
tccaggattgcatcccaataacggttggagggcacttcggacaattccccttctacaaccgtcataactacctctatataaggagctcactctcttcacttcacacacatctcaagcaatagctctctcatttctctcaagtttaatttagtagtatctagctggtggaatagaaatagaataggaatcaggagtccggaagccttcggaagagttcaggtatggctctagtagctttcctttcctcttttctaagctttgtacttttattagaatatttttctatatacatttatggtattgaaaggctttccaagtatatgagtacctactttataatatgttcatgttatgctgaatatacggctagcttatctgggagatggtttggtgcgggtataatgtttgcatatgcaattgctctataccatgacgatgatattatagtagtatctggtaatttaggtgtggtgtctagattacgagatatcattatttggggttatatattgcggatgagaggtgggccgctgatggtgacaactcaatacgggtattccttcgcgcctatatataatcctaagttaattccctggggagggtattcctccgtatttagccccgattgtatggtcatgacgggctgtcgtaaggaactcggcaatcaggggtggcttctcaaaataccaggagggcatcatatagagggtattagctagtatatcagttaactataatgtatgtatactatgtatattataagtatatgaatagattctctttctcttttctttcctcctagcttagattatttattatgagaatgaattgttaatgcttgtgtgtcactttacccttgaattatcttaactcttgcttagaatatgattatcacaagtaatatataaactattagtcaatctctctctacatgatctttccacgggataaaataaatacgatacccttggaatactctcgggtgaaatgctacaatggtatatccgtgcgcttgcggataaactctgcaaccataatataccagaagtatttctgcgccattgctggaaattatatttctagtaatatcgttaagaaataccaacaaagtcctaggtagagtcctgtcttataccccagttgagcgccagtgaagatggagccgtaggcccgctagtccgctactgtttatttgtgtttgtcaggccttaagtgcctttgtaataatgtaaatattatcgatataataaagatgtgtcttttgtatcatgtttgtgtggtgtaccttggcttttcaaggatggggataaatacactaccgttcaggaaaatgtatttttccaggcgcgacaacatgccctttgtctccactcttgatgaaccctgagttcctctcgacactcaaggctgttgttggcccgatctttcggtgagttgtgataactacgatttgggagaaacgttgacgatccgactacaaccgtacgagacgtgtgttgcgccttagcgatcgatacacctctccgtgggttgttgatcttgccggtgcagatcaacccctattcctgcaagcaaatcgaagaaacaagcaagaacaagataaaaagcaatctgatattgcaaataggaatttaatacaaatgataagttggggttccgaagaacaagcagacggacggtctagccgacacgcgcgctgcaaacaagtagcaatggctaaactttaatctaacaaaaccccccagaaaccctgaggggtaactagctatatataggggtgggaggacgacctaggggtgcctagggtcgtgctccaccagcttggggcgcaccccacatgggccccacctgggccggggtcccaaatgaagttacaagcccataggcccattacaggtgtcgcagcatcttgtttcttcagttgctgccgactgagatggaatttggcaatgaggcttgatgcattggaaagaggactccgagagctttccatcaagtactcacgggccgaaaacggaggtcgtatggagcttcggcggccgtttgaagtcagcagtgtagcaggtggccgaattggattttggcacttggaggactcgaacttgatatcttgttgttcatccatgatgtgagcaacggatgtatccgtagtagccatggtcacatcatgctccccttcttcacagaaaaccgtcctcggtttttccatatggtgttcttcatatagtccattcaaaataacctgtttcatccaatcaaaactggagaaactcgaagtagtgtgattagcaataacatgtttctctaaatccgaacaaatgaaaactatatgcaccaaatatattcctctatcattatatttgccaaagatatgaaaaatagcattagttggacatagcaaatcagacttagcaaataatttctccttcaaattatcgagctcacaaaaatcatcaaactgaatatagcccaaagtatttaaagaagatagcaatttacgttcctcaacttcattagcaatgtgaacagcatgcttaaaatcagcacacaaagaaacactaggaatagcatgttcattcactagttgtggcatggatataagtgaagcattatcacacaactcttctttatcacaaggaacagcgagtaaatcaacttgtgacaaatgaattccagaatttggttccactaacggttgctctacttttgcatgaaaagtggacaaatttacttcgttaacaatgcactcaccttgattagtttcagtaccatttactttaccttggatgtcctctttagatgatggaggtgtctcgaacttgagtgtgaacaatggaattggtggctctttcatgtctctctcctccttttcgtgattacgcacttccagcaaatagttagtaattggaggcaaagacatagcgtgtttctttttcatatcctcctctattttactttcagcattgcaagcaagttgtaacaaatgagaaagagatctatacttttcacaagcaagcgtgtcctgaatttctttgttaagtccacgtaaaaacctcaattctgtagcttcttcacattcatctaagccacaacgtaataaacaagcatgcatatcataatagtatgaagtaacacttttggtatcttgttttaaacattgcagtttgttgagcagaatatcagcataatacatgggaacataaacatctctaaaatatcgtttcaggtctttccaagattgtggtattttgttatgcctacaaagatgtttccaatcattagaagcatgtttaactaaaacactagaggcacacataaccttttgtttctcagacaagacatgcctttgaaattcactatcaaccgctagctcccaattaatgtaagcataaggatcatagtttccctcgaaataaggcagtgcagatttgatcttacctagaacatcgtcacttacctcataaaggtcatgttgatcactcctcatgtctcgacgaagatgtcgatggtgagcatagctatccccaattatcgtgcgtatccctgccattgttagtagaaaacaagaaacatatacaaaaatatgcgcgttcctattaactactaggtagtggcagctcaaaaatcacacacactcaagcttttaaccaagctcttacaagatcttaccaatgcaagcggaatggtgacatacaccgactcaaccaagcaccccaatggaggttggatgtatcgatgccttggctaacacttgttgtacggctgcaatcaaatctgtggagctctgggtaggcttaaatatgtagcaaaggaatagcaaatgctcaaatcagagaatgcaaagttgaataattgttcaaagtcaagcaccgtgctggtcctaggctagaacgtactagagacgcgagcctagacacaaacgataccacaagatagcactaggaacaactcatgcacaactctgatatatgagttcagctcaaacataacaatattttctcttttctttctttcttctttcttttttttcctttccttttcttttcttttttttttgggtgcggcttttcttttcttctttttttatgcaccattctgccttttttttctttcttttttttttgattttattttacaaaaacagattaaaggacctcaatgtaagattacagggactcaaacgtaaatacaaaatttacagggactcaaatgtaaaagttaaaacccaaaattagaactatacaaaaatggaatcctctcgtcctgtaggttccgtttttgcaaacggattttcaatccgatactcgaaaaattttcaccaagcagtatgcaagatcacggtatagattgaaaccgtgaccgagaggagacactcggactcggcctggtcgcggacccggggcggtggtgggtgaggaaaggaaggatgcggcactacctaggagtccggttatggtgagagaaaaagggaaactgatttcaatcaatctgatctactatttctttccagattaaactctcgcacttccaaaaacagatttggaaattcttcttcctcctctctacaccggcaacaagcacaggccgatctattcacgggcaaaccagaaactcaagcaaatcctaaatgcaactccaaaactgaccgataaaaaattctgaaaactacaaaaacagaaccgtggcagcgagccgattccgttttcgtaggtcccgacaacaacagagacacggtggcagcgacgactgtggtacaaaacgtgaccagaactcgaaactctaaacgaactagacgctaagaccagcaacacgacgtgacgatgcaacacaaaattcaacaaagcaaaaactgaaaagaacaatgcaatggcacaatatggctaggtaagtaatacgaatttttttgtatggctattttctggttataggaagataaaaactcaccgagcaacgaaagctctgataccacctgatgaaccctgagttcctctcgacactcaaggctgttgttggcccgatctttcggtgagttgtgataactacgatttgggataaacgttgacgatccgattacaaccgtacgagacgttgtgttgcgccttagcgatcgatacacctctccgtgggttgttgatcttgccggtgcagatcaaccctattcctgcaagcaaatcgaagaaacaagcaagaacaagataaaaagcaatctgatattgcaaataggaatttaatacaaatgataagttggggttccgaagaacaagcagacggacggtctagccgacacgcgcgctgcaaacaagtagcaatggctaaactttaatctaacaaaaccccccagaaaccctgaggggtaactagctatatataggggtgggaggacgacctaggggtgcctagggtcgtgctccaccagcttggggcgcaccccacatgggccccacctgggccggggtcccaaatgaagttacaagcccataggcccattacaggtgtcgcagcaccttgtttctttagttgctgccgactgagatggaatttggcaatgaggcttgatgcattggaaagaggactccgagagctttccatcaagtactcacgggccgaaaacggaggtcgtatggagcttcggcggccgtttgaagtcagcagtgtagcaggtggccgaattggattttggcacttggaggactcgaacttgatatcttgttgttcatccatgatgtgagcaacggatgtatccgtagtagccatggtgacatcaactcttcaccaccaccaactcatttctccatcaaactctccactcgatctcctctccgtctctaccgcttctcttttttctcctctgcaccattgtcatcttgtctcctggtgctcgacgaggcgtcgtctaatagctggaaaaacaaaaatgctttggttacttacccaacggtgtcctgtcgaggggtgatcgggatgacgccggcccggctggtgagacccaccgtcggcttaatcccgaccaccgaattccacgacgccgggcagattatcgacccatctgtctccgtccccagcgtcaccgccgccatgttcgccgccgcggccaccgccgaaccgctgctcgaccagcacggggtagccgtgaccacgtacgggttcttcctcatggacaattcgacaaacactttgtttacgcgatgaaatgctggggagatgacatgcacagagttttggggttgccactaccaccacttaccagcgtctcgccgccgcgtgcgctccagccgttcgtcaagggacggaagctggaccactcggcggggttggacttgccgaggatgacggcgccggcggcgcggaggcgggccgccacgccggcgtcgcagcggacgacggagccgagcagcgccagcgacccggccgtcgtgttgagccggtcgcgcgtcgcgatgttgtccttgaggaggacggggacgccgtgcagcggcccgaagccacggcggccggaggctcgctcggcgtcggcgcgcgccgcctgggcgagcgcgtcggggttgacctcgatgacggcgtgcagcagcgggttgaggcgggcgacgcggtcgaggtagaagcggacgagcgctgtggaggtgaggctgccgttgctgaagccgagctggatggcgtcgaaggtggcttcctcgatctggaacgctcggcaggcggtggcggcggcggcgagcgccatgatagcggcggcgagttgcagcggcaggtgagacataatgcacgtgcttttagtgtcagtatgtttttatttgcgtttgttaatcgagacacgaacggcatgagtaagagtaagcaccgaacagggaatttataggtatagcagtggaggagtatatgatacgacacatatgccatgacgccactattactaattttcgcacaaatgtgctctttagttaaccaaatcccacgaatgttcgtaggcaaaatttgctacggaacgctaaaaaatacaattaactaagagataccgtaaagacataaattaactatggaacactgtaaaatagtggtaattagctaatagacaccgaacacactattttattatttttataaaaacagagagagaaagagctgcgttttgcttttgctgaagtcgcaccgatgccgctgggatctgccccatggcagtgagctgccacgccatgaccggactaaacaaatgggtgagagaaagagataagaaagagaagaagaagaaaagagaaaaaaaatagaaaccatgaaaaaggaggaagaaatggaaaaaaatgaaaaaggcgatgatggagtgatggatgtcgcgcacgccgccaccgcatggtcaaacggcgtcgtcgcccggccccaacagccacacatgggcaaagccatcgccctgtcgcgcctgcgcgaacccatcgcatccacccgcgccacagttctcggctgcacctgcgcccgccgcgttgccatgcctggcgccccggccgcgctcaccctccagccgcttgcagcgttggccattcgcgacgtcggccgcccaccatggccatctacccgctccaccactcgcagcgtgggcatccatagcgcccactgtgccgcctcacccctggtgccggctggaccatgcctaagtattaattacttctctaatacttgcgcatgaacttccttctctatctggagttctaatactatagcacttagtacgagtactaaacaatgaacctgtaaagatgtaaatctatctttcttagatgaaataattaaataatattagaaaggatcccgaatacttacttaatagaagacctggactcttacagaattactcctaggaaactacactcgtcgaggtagaaatcggaaagagcaccaaacttccgagcacttctccagagctttccctgactctctacctatctctaatatacaaaagatacaatagatcctcttgtaattcagcttaaagttgtgtgttctaaaaatgagatgagctactccttttatttgctccatatgatggttataggtatgcgaaatttccaaaatgccgtccaaccatctttgtaaagttatcagtagcatacacgtggaagaccaggatcaaaggcgccagtggtggttcggccgaaccctgggccccacctcctagcctctcctttagctaggagattgagtggtgggtcctgatggcagttacgacagttatgacccattccatgatggtttcacttgacttgtgggtccttcaatccgtgtacttgtgtctaattggccggatgtatgttttcttatatgactggtgtgttttctccttaaaatacctgcatactcatatttcaccaacactagtggaaataattagtaataatccctactactaagttggatatcatattttatattattatatgtagacattgacggtcagatattatgatttaaggatcgttaacagtaccttttttaattaaccggtacctataatatattgtaggtgttattttttaaaaaaagttaccaataatatcagtgatgatttttctttataatcgacacctataattgctcaaaagtgccatttgtatattttttaacctgcataggtggaaaaaggtttatgagtgtcgattttatcatttcctgcatctatggtaccatcctttttgtgtgtttatatggtagtgccttaggcccattggatagaggtccaatacaagcggtagaggagaccttgccttcatctctcccgtctatcttggctgtcgcgcagattaaacgcgtcgtcgtccatgccgggttggtagcacagcggaaggataagttgtacttaagaaatagttcgagcaagtaaaatatatcttttttttctttctagctactttggaatggtcaaaacatccttttctggcaggacaattggcttaatggagccaatccgagtctccgagagttaagagtaggagaacggtaacagtttaatttagacgaggtgttttataatgatctcttgcagtgataaaatctatccaaactgtttatatttggcaaaatttactggaaggcattgtgattttgtgattttagctgctgaacatgataaaagttaatctatctatttttagtagaataggagaaagaagttgtgcgaaatatcaaaactgcccttagccccttcctccatgtttccattctctgatcggccccgaggcgagctgtcggtggctggaatttttacaatttggtctttttaaaaaacttatttcacaaatagatcccaaaagaacttacctaaaaatgatcctttttgggtgccagagtcgctggcgccgttgtcgtcctccagccaccgtagctggtcggtgccgaggtggcagggggagcgcactaatgtggctggcgccgcccatccccccagcccgcccaccatttttcctctcctctcctctctagtgtagatgtgcaacattttttattttgtattattttttttggtattttcttcacaagaaccaaccatgtgacttgtagatttcgaacattcttgggcctttttttacatcttttatatcctataaacacaaaaagttggggtttgtattttttttgttacatttgggtgccatttcttaaaacaggcgtaactttctcatacggactcggaatcaggcaaataatatatccacggtcatttacaaattagaacctccaaatttcgcttgcaagattgtgttttcgaggctagaagcttttcggtagagctttagaaaattctataagtcacatattttgtccatttgagtttatttttttatggttggttcttgtgctcttaagtgtgaaaaaatataaaaaaactaaaataaaagtaaaaaagttgcatctatgtagagagaacaagattgtagaattagagggggggggggggcgccagcatgcaaaacccttgggagacaaggttgctgtaaggtgacaaggatttgatgtatcaatgttccacttttatcatggtaatttagtaacgttgactagttaatttattgactgctggaaaatattgttcaagtaaattatggctatcatttcatgtagttatattttgaattagattaaatatttagtaacgttgactagttaatctattgagcgcattatgttaatctaatgtgttcacataaaaattctattggccacatattttattcgttcgagtttaaaataaaaaaaaaggtcgcaactccacggagagaaacaggattggaggggggcgctagccatgctggctccctcctcctaccacgtcggttcacgtgtgccacagtggcgggggactgtaccaatcatcctggcgctgtcccgttcgaccacggcgacagccactctggcgccatcaaaagaaccattttttagataaatttttttaagggtctatttgtgaaataagttttttagtaggatcagattgtaaaaaattcagctgtccgaagcgcaccaattcaagctctccaacctgcacttcgtcaacgagcacgtggcacgaaagggaaaagggagtcctgttgttagtgtgcggcagtgtggcctccatcctcgggatgtcagatgagggcttgcgtgtggcatggcgccacctgacgtacgcgctcgattttctttagaagtaatactccctccatctacttttgatatagttatatttcatcttggcacacagaataatgataagtaattctacttatcatccatttaaatatgatactagtcatttctcgtaaacaagcgatttattaatatttataattcttaagatccatatagccaatcaggtgtgtaagaatggagagtcattaattaaatccgagaaagtcattaagatgataggttgttgaaagtagatggagggagtatgatttaatgaaaaatcataaaattatatgtcggtcaagtgaaatcgtaagtttagcaccctatcgaacaaccatggttcatcgacagggacctctcgaacaacggctgtttggtaggggctttgtattaagacctatcgaacatgggatgttcgacatgccccttgcatgcatgcactttttattactccctctgtctatttttgatagtcatatttcatattgacacacagatcaaggataagtaattctacttattatccatttaaacatgctactagtcatttcttgtaaagaagtgattcattaatatttacatttctcaatgcccatgtagccaatcatgtgtggaagaatggagagtcacacattaaattcgagaaaatcattaagatgataggttgttggattgaaatatacctatcaaaaataaaactttcagatttaaaaatataactatcaaaagtagacggagggagtattattttcctgagcccatgatcctgtcgaacaacggtggatcgacaggtcctattgaaccaccattatttgacaagcgttaaacttacgatttcatctgaacgacctatatttttgtgattttcattcaaatcgtattatttctaagaaaagttcctctctgcaccgtccacctctcaacagactagcaagatcgatgaacagcttgtcgaactcctcacctccacagcgccggcagcgcccacaccggcatcctgcaaactcttcttatgaataatgggttaatatatttttttttctaaaaaatattatttaacaatttaaaaagtgtacgagcggaaagccagggagatgaacacaaccctcacataaatcgcctgttcgggcacaagcacaatgtccacatccacctcgcctacatgcctccactgaccactgaccactgcttccttcaacctcaacggccagcagtgagattgtctctccggtgaccactcaacatccatcaaagtccaagaggactccgcgaagacaccgatctgccacaacaattactgacattgaccaaggttgagaggatgattttgctgtgcgtgaagctggcgggtgatggtgcatgatctgaagacaaggaaatgtagagatttggggaatcagggaggaaagaaaaggaaggatctgaccagtgggactagctagctaggggcgttcttggccttttatattttctctctctcatattcaaacaaaaataatattttaatgggtgcggtgtttagtaacaaataaccatattttgatccaaagattgacttttgtcatgtgcaagaactaaaaccacgaagttacgatgattacggaaaattttgcctttatattttctactccttccgtttcacaatgtaaatcattctagcgttttccacattcatattaatattaatgaatctagacatatatatatatatatatatatatatctagattcattaacattaatataaatgtgagaaaatgctaaaataacttacattgtgaaacggaggaagtactcaatatttcgcttacgcatgtgcttgtaagacaaattttaaattttaaactttaatttgtaagacaaattttggtgttgatgttgtagtttttcaccattaatgttggtgttgatgctatttaaggacatatttaaggacatcaaacttcgaattactaaggacatatatataaaagttttacttataaattattttttacttgctacttcctccgtttcacaatgtaagtcattctagcactttccacattctagaatgacttatattatgagacggaggtagtaataatcagttgggatatgcatatgcataagtgaacagaagtgaccggtagtacttaaatcataccaatttatactaccaattcaacttgtttggtttgaatatttcttctagttagttgcagtcttgcagatcttatagatcaatgactgggccgactggcggccctttaatgttgttgttggacttctgatcagctacgacagtgcaatctgttaactccggtccaatgtgccttttggcgaccaaaacttggaaacaatcgcctccctgccgctttcattagcgggaaaaatggaggatcttggacaccctgatagctttggataatacggaaaggaaagaacaatcgggttttcaaccgggagcttccaacttggcctgaagttgtatctcaaagctacggaaaaagccaagctatagtgaccaggtaaactataagtcgcttttctggtcgtctcgtaggttgtacttgtttgagtcctctattttgataacgtgagatgtaagattgttgttttattatttgttgtccgctctatgtaactgacagggtgtcactttgtctgtttacttccacaattctctatatgtctaaattcattagtatctaaatgaatgtgggcaatgctaaaaagtcttacattgtgaaacggagaaagtataatatagacaaaggatacaatgggttgagaacaatggaaggaccaaataagtatcatgtataggttatttgcacttataacatgcctcaatgccccctcacatgtgcacacgacattctaattagcttataacagagtatgattagttataatgtgttattttggccttgattcacatgcaccggacaaatttgtgcactgaatcaagcgttttataagttcgtgtactaaattgtatcaacctattccctgcaaaaaaaaaaatcaaagtatcaagttcgtgtatcaccaatacaatttactcatataaaaatgttattgggatgtctgaaaaaatggttttaaatactacctcagttttcatttacttgtcactttgaccacgttttaggtttgcaaatacttgacacaacaagcttaccaaggtagtgattcctattttgtccttgctgagcctaagataatactcccacttaactaggggcattttggtcattttaaacttgattgcattagtatgtggcgtggccaaaagtgattcataaataaaagtggaggaagtagtgtataacatctaagttaagaggctgtgtgcatgctgtaggtgagatccacccatacacttcgccctttttcctcatgataagaggcactagggctgccggtagcacaggtgaatggtgaaacgaaagttttatagtggatatgtagatggggacatagatatgtagatggatgccggtctttgtttgtgggttagatcacttatatgcaccacactagtatgctacagaaagcagcgtcccaaccaaaccttgacgctatcagcgttagcgtccatcctttttcaaaataggatatcctatttaccagatatttaatttttgaattataaattattataatacattgaacatataatactctggactaccaaatttttggcatccctgaattggacaacaaaactagatggctatttagttccatcaatttatttgggcaaggatcaaaaagctccgtgaattatataacacaaattttatatacactacatcttgaagccaggcatcattcgaactttggtagcttgctcataagcataggccatttcaatcagccttggctcatagcccttcaatccaccgaagcaagtaccaaatggcactccttgactgtcgtacccagccggcacggtgatcgctggcatgccactgacggcgaagaagactctcccgttgtcattgggcgtgacaatcgcatccaactggtgcatcctcatcaacttctccagcccatcagcagacagcttattgagatgttggattgaagctttctccaccggtccaatgccgttggtcttttcggcttcaataaaatagggttgtccaaaatctttaagcctctcctgtaacaaagcgtcatacaacactaagttcttgcgtaccttttttttttggcaattaaatcgtaattaaacaagagtgtgctcaaatttaattttctgcattgggttgcaaaatttgcactttcaagaacaaattcatatctaatcttataatttttcaagccaagagaatttgtgatgcaagattaattaattaattcaagtagctcccatacatacctccaccggatgtgccttgttgaatgctatgacatctgcaagggaacgaactggggaatacaacaagtcggacaaataagcattcaagcttaacttgaactctgctatcattgcgatatgctcgttggaaaaaagaacattctgtacttcagtcagattttttgcgatgtcgatgttctcaatcaccatggctccatgtttcctttcattaagaagaaatgacgttttttagaacattaagaagatatgacttaataaacgatgaatgctagtataattcattttgagctattttagccaacattttaatggttctgcgctacacaatatggcacactttttattattgtataccactcaatttgcaagactatatccagataaataaacaaaataatttgttctatgttttccacatgcatattttcctactatatccagataaataaacaaaagaatttgttgtatatgcgatagtttttatcatattattgaatcgatcatttgctgattacagtgcttaatatgattgactgagtcttactttcttttctcatttttatgccagattgccagaaacaaacaatattgactataacattttattatactttcaaacatcatagaaagaatattattttactgcaacaatttctttcttcataaatgatgcttctaatacgaatatcaccaaaatcttttatagactgaatgcacatatgctagcatatgtattatcttttagaagtgctttgtgtttgtgtacctcattaattgaatatgtttttggtatgccctcagctgtttcttctcaaatatttcttgagtgaagaagccgttgggaataccaatcctcttgcctttgaatccatccatccttaagaattgtccatatccaccattaggaatgtacttggatgctgctccagtggcttcagcgtcaagtgcatcatacccaacaatggcatccaacacatggacagcatccgacactgtccgacatattggcctatattttgtcagattaaaaatgttaatagtatataattactgcaaaatgtccactcattcatacatagtcttccatatataacacctatagtatgtcacagtcctagttgtttttctgtgtagttaccatgaagtaaattttaatgcagtaacttttgttaccaaataataaaaagttaccaatagttaaaactaaattagcccgaaaatgtttaagtatctctattttaaatatatctggacaaatactgatatacagatgccgtaacgactcaatgcacacgtttttttccttgcttagaatgtcatatccattgaacgtgcgtgcgtatataaaatcagtaaaaaatgatgacaaatctagaattaaaatgtaatggactagatacacaaccgtatcactaagctacatagtttatggaaaacaaacatgtgttagttatttctcttttgaactgaaatagaacccccacttttcatgagctctacgagatttgtaaccagcaaaacatcatagttagtgaggttatgaggctaggtgacgagattttaacctttagtcgatcatttggtactccagaagctaaggtcctgggaacatttgaaaactgtgattgaatctgtttggtttagtaagagtgaagtcaaaattgagtttgttgatgcttttgggcacttgaatctgtgttaatgcttaaattgtactccctccgttttcttaatatgtgatgccattaatttttagcataacatttgatcattcgtcttattaaaaaaatacataaatatttttaatacatgacaccgttaattttttacataatgtttgatcattcattttattaaaaaaattatatcaatgttatttattttgttttgcatgttttaacattaaaaacattaactatgacctatactttagcatatttatattaattttttgaataaaacgacaatatatactttgtgctgttagtggagtagagttgtttggaaaatatctttagctaaaccgggagattgtttcatacaaaagcaacgcctttggcacttggcatcaaaagaataaaaagctaacaaataaccttgtgttagcacttttttaaccagaaaaattgtgttcatttttaaactgaaaatgaaacttgtgattacccaacactgtcctgtcgaggggagatggggacgacgccggcgcggctggtgagcccaaccgtcggcttaatcccgaccaccgaattcagcgacgctgggcacagtatagacccgtcggtctccgtccccagcgtcaccgccgccatgttcgccgccgccgccaccgccgaaccgctgctcgatccgcacggggtgaacgagcgcacgtacggattcttcatggacaatttcacaaacaccttgtgagcttatacgatcaaatagagaagagaaagaagcagaaattgttggtgcggtggttggtgttaccagtgtctggccgccgcgggcgctccagccgttcggggcggggcggtaagcggaccactcggtgaggctggccttaccgaggataacggcgccggcggcgcggaggcgagccgccacgccggcgtcgcgggggacgacggagccgagcagcgcgaacgacccggccgtcgtgttgagccggtcgcgtgtcgcgatgttgtccttgagcaggacggggacgccgtggagcggcccgcagcggcgaccggtggcgcgctcgtcgtcggcgcgcgccgcctgggcgagcgcgtcggggttgacctcgatgacggcgtggaggagcgggttgaggcgggtgatctggtcgaggtagaagcggacgagcgccgtggaggtgaggctgccgttgctgaagccgagctggatggcgtcgacggtggcctcgtggaactcgaagccggtggcggcggcgacggcggcgagagccatgatggcgagtagcagccgccgctgagccatgagtaaagtaagcagtgagcagtgtctcagcagactcgtgtttattttgcgttggttaattcagacacgaacgccatgagcccatgagtaagcacactaagtagtggaaaacagtgggtttcttatagcagcggagcagtgggacgcctgacgagtgacgacgcccccatttctccattattaattgtcgcataaatgttctcttctctttgctcgaagaaaaccaagtagcttttcgatattcggtattttttatagatgaaaaattttaaaatgcaagtgcagtataatcactactacagaaatggtcaaaaacatattttcgcaaatggccagtggcttgcctccccaagatgtttttaaaaagccaatactttttcaagcgggcagcgcaatcacgcgtgtagaggccgccgcagtcgtatgtgccgtgcgcaagcggttaagttgtgccacccgcctacaataaaaaaaatcatcaaaaagagaaaaaaaaaatccaaaaattgaaaccctacctccggtttacttccactgagggccattgtcgtcgctgctctcatgctcgaccgccatcgtcacctctgccaagctcagcgactacggttccgttgctacagaagccgatagcggcagatccacgctcccaggatgttgaggtcgttgtcgccgctcccattcctggcggtggtggatccatgctcctgaggccgcggctgttgccgtcgtcgctccttcccgagcgatgagggattcacgctccagaggtcaccgtggtcgtctgtactgctcccgtgcccaacagcggcgggtccgcgctctagtggccaccaccggatgatctacgcactaggaatgggaagtgattgttgacggtcattatcgaccagtttcgaccgtcaatattaccaaaatagaggagaactagtgatgtttgcaatgcatatatatgttagaataataatattccactagtattaggttcactaaccttttgcagagaataaccataaagtggaggagaatcgacatcaactcaaacgataaatcaatcggacgatgtcgagaaccagacttatgtataaatgggccaagaactcagaattgacatgacaaactgggctaaaaatcacaagtctgcggagaagaacaacagaggagtccgccagccaaaccatgggctggttgggccggccccaggttcagccgaacctccctcgtcgccgttggatgcagggcttcttctggatggtgtggattagctcccaatgacggttggagggtatttccgaccattccaaccgtcataaccgtcattgggaggctatataaacccctcaccttctcacttcactcacacaccttaagcaaagctctctcatattctctcaagtttagtttagttctctcatattctctctcataggaatagagtataaatcaggagtccggaagtcttcggaagagttcgggtatggctctagtagctttcctttcctcttttgtaagctttgtacttttattagaatactcttctttatacatttatgatattgaaatactttccgagtatataaatgcctactttatattatgttcatattatactgactatactgctagcttatctgggagatgctttggtgcgggtataatgtttgcatatgcaattactctatgtcatgacgatgatattagagtagtatctggtagtttagacgtagtgtctagattacgggatatcattatttggggttatatgctgcggatgagaggtgggccgctgatggtgacagctcactacgggtattcctccgcgcgtgtatataatcctaagttaattccatagggagggtattcctctgtatttagccctggttgtatggtcatgacgggctgttataaggaactcggcagtcaggggtggcttctcgaagtaccaggagggcatcggatatatggtattagctagtatatcagttaactagaatgtatgtatatatactatgtatattagaagtataggaatagattatctttctcttttctttctacttagcttagataatatattatgagaatgagtagctgatgcttgtgtgtcactctacccttggattatcttaacccctgcttagaatatgattatcacaagtaatatataaattattagtcaagttctctctacatgatcttcccacgggataaaataaatacgatacccttggaatactctagggtgaaatgctacaatggtatatccatgcgcttgcgtatgaactctgtaaccataatataccaggagtatttctgcgccattgctaggaattatatttctattaatgtcgttaagaaataccaacagtgatggaaggaagaggtcgttggttgatcaacccctcccattgtcaccgccgatgccggatccttcctagctagggccacggccaacggatctgttgcctttcgtcaccgccaccagatttgcctcagccgacgaactccaacctccgccggtgccaccgccgcatcacagacctgcatcgactatgccgagggtagagtgagaatgagagaatggagatgctgagggtagaggaggagaggttgaaaataagaagctgaggaagatagagataaaatagtgagatagaggagagaggttgggtgatatatagagagaagaagagaaggttgtgttgatcaggtcggtccgtgcgcctgtacgcagtaggttaagatgtctacctgtgagaataggtttgtttttttagactgacctcttaatacgcctgcctgtgagaattgattttcgcaagtgggttaatacgggagacccgaaaatttttacatatgggttttcttttggcccatttgtaaaattaaaaggggttgtctgcatacatcatttttaagaccgtcagctcatccgcctccgcctccgcttccgccgacgatgcggacgccgatctcgcggcgccgaaggaggaacacggcagtggtggacacggcgacgacggagcggaagaggaacacggtggcgctggagcggaagagaaacacagcagtggcgcggaagaggaacacggtggcggcggatcgggatttctagggctacagtctgttctcactgcacgcgaagttacgttttagcccttccacctcagttcttcacgtggcactgcaccagggatagaattggtactgcccggtaccaaactctaccagccgttggattggccagatccaacggctaggattttggtaccgagcaatactggtaccgaccgctgtaccgtaacaacgctccatttttaaagtagtgaattatagtatagttacataactagtttataattaacatgaaaataccttgcacgaccagttggttagctccataggcttcctcacaatctgcacgaaacttgatgtgaccgaatccgaaagtttgtggaaaagaaccacacaaaataataaagcaaatccgatctgcacacttttttctctctcgatctgcacgaatctattggtagatttgtcttgaaaagcacttttatatatactttaatagcttttagaaatagttgtgataaaacatttgcattgaagaccttgtcattgtacaacacaagtaaaaaagaatggaggtagaattacaatagattatatacctataagattggtattttaaataactaactttaacctaatctctttttctctcacttatgtattaatttgtgtctctataggagcacgtgcaagggtgattgttgcatgatagtcaatgttttccttttcaccaatttcgtatttataattactgatagaccttaagcttcggcaggacttgagctccctggttctcagaccaccaaattaagcttcgtagaatcgtagcggcttccttgtcatccaccccgggtaatggtcaaacctcctatccttttctaggaggacagttggcttgatggagccaatccaagaattaggaaaaggagaacagtagcctacagcaaaaacacaatggaccaatgacattcctggtgcacttggactggtatgctgggtggctatatactctaatacttatcaatttggagatggctacaatcaatcggtctcactattactaaaagacacatacaagctggcactatagatgtcggaatagctaaaatcgacacctatagtacttttctcaccttcaaaaggatgaaagaaaaactgacacctttaagcgaacgtgttggttttaaagaaaaaccgacaccactaatatagatgtcgatttttaaaataaccggcactattataggtgtcggtttattagaaaaacgacaaatataggtgccgatttttaaaataccgactccataagatcaacccgagccgacgggatgcgaggggatatttttgacccagtggggcccacacccctatggagaggataaggccacctccagcctctcgatccttccctctctctctctctctcgttcacccaacagctgtgggatgggcagtggtggcccgatgggaggtgcggcggtgacccgtcctccctagtagcgatgggaggggcggcagtgcctcccctctgccagatctaaccgggaggggagtcaatgacggcccgatggcgccctatcctctgctagatccggtggtggcacgtcttccttggcagtggcgagaggggaggaggaggtggtggcgcctccccctccgctagatccggctgggaggggagtcaacgacggtccaatggcgccctcccctccaccagatccggtgggagaggaggcggcgacctgacgggacgtgcggtagcggcccgacgggaagtgcgcggtggtggtggcgccctctcacccggcagcaggaacataaaggattgatgtgttatttatgttgatgttgtgtttttgatgtttgtatgttcttgatgtttatgtgtgtgttcatgttgtatcttgatgttcttgtctatgaattaaatgtggtatataatatggtcaagccgatgcaatgagtaactccccatcaccccaagccgatattgttgttgttcttcagtctccccccccccccccggcgcgagctggcgtctttgaacaattaattcatcaactgttccattgatcaaatttcacaatgtatccaccaaaactccagattcatcaagcaaagcacgacgaactgcttcatcaactatatcttgaagtgtttcaatcatcggattgggaagacaatgcttttgaaaatcagccactgaatcagcccttgttgcgttatgacgaaacatcgaagacaatgcttttgaaaatcaggcactgattgatccatctattacctttgttccaccatcaaattctccattgcgaccaggatattggcgttgacttattcagacatgtaggtgtaaaactcgtgtcccaccaggcatgccaaaagagtgttgacaagaaatccgtgctcggccgatagtgccaggtctatgttgatacaaactaagtcgacaaacacaacggcatgggagatctgcttagctctagtgcatgtccaaaggccgatgagatgcaagcgtgctagtcagtttgatcgtgcaactgacaagatatgtaaacagttgatcaaatagccgatcggctgaccagctgatggagcaattccatccgatgccgatactagccgatagcgatagggttttgagctatcggctatatgtttgatgtagattccgacactttatgcaaataaagacaatcggctgatgatgataaataacaataatataatcaagtacaaaccaatcggctaataatgataccatagaacaagtattgatccgaaggttaaagcatacatcagttggaagtccgatgtcataaaatccacaagattagataaacattgaaaccttttttgcgatcggctaaatccaacttgtatgtaatccttataagccgatggaacgtccagataactcatcggctgaaaccctgataaaacccttattggcaatcaaaagcaggccagagattatgtttctaagcacgacttagtaggtcaaatgtactgatgcagcactaagtatgaaaagaaacataatatctagacaatcaagcccttgactaattttcagggtggtagataccttagctaatataatctggtaaagcgatttagccgataccggcataaacactaaagcgcatctcaaccgatataagtaaatcgaactaccaagctagattaaggccccgtttgtttcagcttaggattattataatctggattattaggagtaagctgaaacaaacatatagcttattatgatagattattataatctataagccagattactataatctagtaatccactttaaaggtgcttttttagattattgggtggctaacacctaacaactagctaataatccaaagaaacaaatggctaacaacttattctatatcggcttagtataatccagcttatagtactctgactcaataatgtagagtacaataattttaagctgaaacaaatagggcctaactaagatatatgatagataggtgcttacattgacgagatcagattgtcgaagccctagccccgccgatgcaaacaaccatgacaagtataaactcgtcgaaaaaagttgaaaaataaaaatggtggtgatgcgccgaatttgtattgatcgagagatagtttacgatgaccccgggtgtacatatttatacccatgggtagatacaagtccttattggacaagaaagaaatcttcctaaagataaaaaggaaaacataaagtccttatcggacactaaacacactttcctaaagataaaaaggaaactatcggactattcttaattaatagataacttgccatatctcatcctccttaactcggttattctggataaacttccttgaatagatctgtttcctgaactgaatcctccaagaatccggctgctggtgacttgataactcccatcggccgattctagaactctgtagacgatattgattttaggaagatgacaacttctgggcttaccaaatttcgccattaacatcttggcagtggttatttgaacatggaggtggcatagcagttttacaatgtaggggaaaaatagtcctgcagtaacaagagatatcagttttagtagcgagacgaaaaaaaactacagtaacactgatgggggacaagttgtaacatactagatttttcatggtaaaaattttgcgaaaaatctttaaagtcactgttcttcgttgtttcgaattggagcctcccaatctatgtacttgttaacgccaaaatttggtaagccctggagtcatcatcggccctagagtcagtatcggcttaagagtcctagaatcgaccgatggaaactatcagtcgccagtagttgtattcggttaaggaaattggtcaattaagggaagcttatctagaagagtccgagttcaagaaggatgcggcatagcagattatctattaattaggaagaatatgttagtttccttttatctttaggatagtgtgtttgctgtccaataaggattttatgttttccttatatctttaggtaagtttctttcttgtccaataaggactagtatctacccatgggtataaatatgtacaccaggggtcattgtaaactatctctcgatcaataaaatttcggcacatggccaccttttacctttctactttttcggcgagttcttgcttcgagttagggcatcagcttcgatcttatgataagaggtatgacttgtctcagctgtttgcgttggcatattagggcgtcgctttagatattctaatctatcttttacagcagttggtatatatcttagttaatctagcttagcattttaatttgatcatatcggctgagattcgttttagggtttatgctggtatcgactaaattatcttgctagattagattaagtaaggtatccaccaacctgaaaatcagtcaaaggcttgattgtctacatattatgtttcttttcatactttgcgttgcatcaaccccagtcgtgtttagaaccataatctttagcctgctttttgaatgccaataagggtttcatcggggttttagccggtgagttatctggatgttgcatcggcttacgaggattacatacaagttcaatttagttgatcgcggcgaaggttttattgtttatctaatcgtttggatttattaacatcggaccttcagccgatgtatgctttaaccatcggatcacttattctatcataattattattagctgtttgatttctactggattgtattattatttattcaagtatcagaatatacattggatatatagccaattgttcaaaaccctatcggcatcggctgcaattactctatcgggttgtcagccgatcggctatttgatatttattttatatatcttgtcagttgtaggatcaaactgactggcacgctcgtatctcatcaatttttagacctgcactgtagttaagcagatctcccagaccattgctcttgtcgatttagttcacgctaacacagatctggctctgtcggctgagcgcggatttttcgtcaacaatattccttttgttccctctgagtttccaccttccacataatttcttttagcttcctctccaagccaaatccaagatatcacagagaaaaattcctaaaaccatcagagagctcgtgtttgttttaagttatctcggagtcaccgtgcaaatattctaaaatccccaatctcatcgtttcctgttaaaaatatcctgccaaaattctatagaaaaatctcttcaaaaattcaaatagatcgctgtgtttcttctcgggccgaattcctagcaacccagcccatcatcgtccaccttctccctctgtttgggccgtgctggcccatggctgctgttgggccagcaaaggcagccgccactcgcgccgtcctttgtgtacgcgtattcaaacttcatgtcccgtacgtatataaactttgtatatgtatacgtgatgtattttctatatgtgtatataaaatttgtatcccgtacatatacacactttgtatatgtatatgtgtataaattatgtatacgtgatgtattttctagtttttttaatatgtacatatataaaattaatttgtatacgtcatatataaactttggatacgtatatcgtatataaactttgcatacatgtatatttttttataaagaatatatttttattgtagtagtatagtagtagtaactgtagtatattactagtagtactaggctgcgccgcgcgtggggctggacgcgcgcccagccgcccattagcgcctcgctcctggctgctctcctccgcacgccgccacgcgcacgaaggaacttgatcagacggtgcagtctttgttgcaccaatcttgaaatcgagcaagcaccactgccaccaacaatctccatcttcactgcccaaccatttaagcaagcatggtacttgtttgcccaagaagaaatcaaagtctccagatcacccctatctccaatttcttcaagccacgctgccgtggtcgtgtgctgatccgctgccgctagccaccagcctcttcctgagccggtgaggccatctcctcatttttttttcccctcttctccatgcttgtactgagctcctcgcatgctcctgcccgccaccatggccgccaccatggtcggcatggccagcgccacatctctatcaactaaccataaaaattgaatctcctcgtccgggaatacgttttgactcgctcacccgtctgcgttcgcttccatgcctgaggtcaacatagctctagatctggaactcgcgttccggctagctctgttgtcttccagcccagcgtccacgtccgatcctgcggggggtgtcaggctgtggaacacatcattctaccatctctgtcgctgtttcctcactggagttccggcgtccttccctcctcctctgttgctcacgtgagagctaggggaagaagacgaacagtgccggttggcactgtttcctattgaacccaaccaacttcatcaaaacccacttaaatagtacctaaccacaattaaaccagtccaaactattatatattagagttttcgttcggtttacctccgattcaagcctaaaaaaccaaatcgatttcagttttcacctatgttatctatagcgttaatcccaaagtgcaaccactacttcacagaccatgaatcataacgctaggataaatcttttgccatccaaatcaagttaactcttgattatcgttttcttttgttcaggctccaattcacaatatttattttatcgtatatttgtagtatctattatattattaaaggaatagaaaaaagagcctccacgttcgctctcatgacctaaaaattctcacattaatcggagaaaaagaaaaggcagaatccatatagaaatacaatttagaaatagctgaaattcagaattaaaaaataaggaatattagaagaggagactagagtccatatagaaatataatttagaaatagttgaaattcggaattaaaaaataaggaatattagaagaggagagtagagttcatatagaaatacaattaggaaataaccgaaattcggaattaaaaataaggaatattagaagtagagtatagagtccatatagaaatacaattatgaaataacttacattcggaattaaaaataaggaatattagaagtagagtatagagtccatatagaaatacaattaggaaataatatagatttggaattaaaaataataaatattagaagtagagtatagagtccatatagaaatacaattaagaaaaaaaaatagaaattcagaattaaaaaataaggaatattataagtagagtaaagagtccatataggaatttaaaactaactaaaatttagaataaacataataaaaattaaagtagagtttagagtctgtatgaaaatacaatttacaaataactaaaattcgaagttaataaaaacatgggaagaaaagtttaaggtcaatataagaatacaaatataggaatacaatttagaagtaactgaaattcgaaattaaaaattaaagaatattgaaagatgagtttagagtccacatagaaatacaattagaaataataaaaattcaaaaataaaaataaataatattggaagaagagcatagagtctatatagaaatacaatttatagaaaattcggaattaaaaaaaaagaaatattaaaagacgagtctagagtccatataggaatatatataatttacgaataactaaaatttgatattaaaaataattaataactaacacatatataaaatataatatgaaaatttagaaataaaaataaataatattagaagaagagcatagagtctatatagaaatacaatttacagaaaattcggaattaaaaaaagaaatattaaaagatgagtctatagtccagatacgaatatatataatttacaaataactaaaacttgatattaaaaataattaataattaacacgtatataaaatataataggaatattacacattagtagttttgtaaagttattgcaaaaattaaaattatgttgtcattttaatatatttcaataatataataagaaaacatatatgctattatatgagaaaagtataatgatgctagctgcgcaatctgcgcgggccaccatgctagtttttattataggattatttggtcgtttattcgtatgtgtatgttggatcgtgtcggagatcccaccggacctgcaggaactgaagtggacctagaaggctacgttgaagcttcagaaggccacgttccacaaggcaagacacagttccaatctttgatcatattgaaacctagtagagaaccacttaattattttttgcattgagtatttataaaattattttgcgtatgatttatttttgaataaatttgttagtatagttattacccattattacgttgttattattggccaaacccacgaattgctatatcgtgtcctttgataacctaggtgtaggtttatatacttcacaataacattgtagtggataagaccaccaaatatctataatcatatacttattttacccgtcgtcacatggtggcgtgtcgagtgacataaaattggttatttgatataagtcactcccctggagtgatatggaagattaataccgtgtgaagatggatgttgtggtttgtgaggccgtgcatattattataattattttgtggaatgtgtatatttacacttggagtatgcatgggcctgtgttagctttggtggctttccccggatataaggactaccctcttatgccatggaaaatgttgtaattttgcgcccatccacaggactaagtaatcagacttagactagtacattgtcccactgtatgaaagactgcagggttactctatgagcaggtttggggtggacttgtggaaggggcttccgccaggttgacataatccataacagtacgaacccgtgaaagcaatgatcatctagcattgcttaggcccagcaagtgcccgactactaggacagatcaatatcccgctgggcagtaactagtagtaagtgggactctcgaatagctatgttgtcctcagacttgcgaactattgacatcatgcaggtaaagctgggcagtctctgtagagatgagtcttgaatcattcgtatgtgccgtgcttccggttaagaagctgtgtcattgggtgattcctatttatcatggtatgagtagcttttaaattaaaacatatgaaatatgtagaagatgaggatgaatggtgattaatattgctaccattttaaaatgacgttttacaactatttgcaaatgaaatgttttataaagtagggaaatactatttatgataggcttgttatgaaacctccttgataaactatattccttgtaagcccagtgtgtgtctgtgtgtggcgctacgtgaagcgacacaaacggtgtgtgccacgttgctttggtggagcgactcgcaggagcgccccgtctgtgttttccctttttttcatacggtcccatcgcctaacctcctgattttccgtttttcccatgatcgctccccctgacccggtttcctgattccaagcgtatatcccctttgggactacctgtatatttattgacaaattttctcctaaaaatttgatagatgtaattatagtacaatcgtagtgtaattacactgtaacttatatgtaattacactgtaacttgcatgtaactacagtgtaacttatatgtaagtttcacataattttgaatcgttagatctattacaagatttgtttcggtgaggaagaaaacaaatcatagcacacacatatgtgaaagaatttgttcccacgacatccattttaccgaaataacatgttatggacagatttttgaaagttacatacaagttacactatagttataatgtaattacatgcaagttacagtgtaattacactacgattgtactgtaattacatctgtctaattttttggggaaaatttgtcgacaaatatatagcaaaatcgatcccgtttctattctaacgagtaaaaaaaaaaatcatccggaccctgtttggttcatgtagtaaagaaaaatattccttaagttaaaaagttactaggccatgaccactagtttctccaccagacttgtgacttgagtaaaaaaattactatgtctctgttcagttaattaggttcaccagatttgtttagtaaaaaattgactatcaaccaacttctaaaagtaaaaagtttactacgtgtcatatccatttttatctgctaagaaaatttgtcctctaagtaattaaatcgttttattaatcttttgtatttttttctcccacattcatccggtagtagttcagttaaaagattcctgagcgaaatcaggcgtatatctacatgtagtaaaaattttactccatgcaagttagaggtcgataatacttgtcaaggtcagaaaaaattcactcccttatacttttcacatcactttcggtgtgtttgatagtaacttttttactaactgaaaatatgacattgtgaagggaataatttatttactgaaatattcaggttgaaaatctaattagtaatatatttactccgttctacgagacaatattcagggttaaacttttgcactgagaagaataaaacgatcagtaacttatttacaaaatatattattacatcgaattatatgattgcaaaaagttttaaaaaataatacaaatggaacaagctatagcaccgcctgtcttgttgacggctgccgtggcaatccaaaccgtcaccattctcacattctagaggagacagcaaggcagcatatatacaagtacatacatagcactgtcggcaacacaacgagaacacacgaaccaccatagaattaacatgaaaaataacgcatagcactacgccaagaaaacatgaagctagcatcgggagtttgggatggagcaggtcgccgggattattagtagtgcctgaaaaggattgatttagaaatcaccatctgaaatgcattattagttattcatttagttcagcattggtgacaatattttttcagatcacctgtatgagtgcacttcatcttctgatgcacctgcatgtgtcattgtttgggttaaaatatgctcctacaagatgaaattttgctctacactatgagtaggcaggattagtggattgaacaaatattatgaggctatgagcattgcataggataggcgatgcttacaggttgaaaaaacaaaaaaatcatgaaaactcatagaaaatctagatggggatttcatggtgtatattagggtgaaatgacaaatgttgatcgtatgaatcaggcataatctagttcagtggacaatcaaaattgtagcaatgacacgcaagatcatagttcttctattgttttcagaagcttagaacaaccctgcatgcacgcaccagaatagtcagatgatcacacatatatagcaccaatgaaacgaccagacaacaactcgtgatgtgtattattttaggtacgatgtatctaatctactcactgaatcatgcatgaatatatggatacacttcaatatatagatcaaacaaccataatgcagaaggcatgaatctgttgggaatcaaagcaactcatgtgaacacagtggacacaaatcacacttacacgtgaagagtacaaggaagaagaagaacacaacacacagagtatttgtgacaccacgcacaacttgtgccttttctctttcttttctttactccacacactaaacggttacaatgagcagctatttataagctactaatgcacacatacactggatgagctacttgatccactttcttcgcacacgacgccccacttccttggccgcatctcctcaaggcctggcgatatgctagctgcatgcatctaggagaactaatccaccacgtgcaggcctaactaactaatccatgcaagactcggctaatcacttgcccacaattatgcatggctaactaactaagctacatatatgtgctctcatctcctggctcttaatttattggctcactactcactgccaaccactactcactgagccatgcagcacagcagcacccacgtacatatagctagctctccaggccatgcaacacacacatgcatatagataaacatgctgaaattaacaaacgacaagattaatttctaacagaatcgacgatcagtcacaacatcaaattgatttgatagttgccaagatattgatgatctattggatcagttgagaggtgccaagatattttctaagattgagctgagatcaggatattatcaatagatgattaagaaagaagataggcgaaagacaacatttacaacaaggtatggactgtaccaattcacagttatgccatttggagttaccaatgctccagctgtgtttatgagattgatgaatcacacactgttggattatcttgataagtttgtcattgtctttcttgatgacatccttatccactcaaaaagtaaagaagaacatgtgctgacggtcgttatagacaaatttcgaccatcaatatatccaaaataaaggggaactagctatgcttgcatgcatattttgtttaagaataatctatctccactagtacttgaaattttatttgtttgaagagaaaattacgtaattggaggagaatcgatggaaatcaaccgaacaatcaattgaactccattgagaggtagacttataggttgatgggcttataaatccagtgaaataacaccaaatgggcacaaccaccacaccacaggaccgaggaatctacaggaggcacaccttccaaattgtggtccatttaggccaggctagggttcttcgcatggaaagcggtagaggctgatccgtagctttggtcgtcgcactctaatccgctttagaagaagcagccaagttgtttcttctcccatgctggtcctatttttaactatacattggttacgcaccaaggttatactaaaaagtcgagctcacgggagttggttactgttgcgtgtctacacttgcaggagatggcgaatgagagtcttacctaggtaaattggtggcgatttactcttggtactgatggtccttaatgcttcttggacctcccttcttttaaattggttcgcatgtgttttggctaagcgcatccttgttatagagacgtcgagagtgttcttagcgtagttgtatgactttgatgtaatagaacaagtttaatagaaccttccattatctaaaacaagtaacctgttaccatggccatccaccaaacacctagctgctcgctaacgacatgttattgggagaaatgcgcggtgacccatagacatggcacatatgcattcaaccaaccaatttatgaccacaaagctcctacgccttacagactatttaaagaaatcacgtcccactttcataatagcaagcaactcatcgatctaggttagctagttcttgttgcattgaatcatccctcatcaaatcattaggatatatacttcatgatggccaaggtcattgcacttatgcttgtggttattacaatgtcaaccatgttagcctcacccgtggaatgcgccaacaagattgctggtatcatccctatttcggcatccgcttacaactttacgacaatgattgatacctttaaagtggccatgtgagtgccaacggaggattgcaccgccaatgttgacacatgcataagtaacacatgctcctacatccgaaaggccctcgatggtgttgttgctgttgcactaccagcaaataaggcggaaactttggaggccacgtccaagcaggctacggttgctgcctctactctcaacatggccaaggctacaggagaaacgaaacaagttgccgcggtttccatcgtctacatgattgctgctgatgcggttgacgcagccgtacccgctgcaagcttagggtaatggatgaaacatttaaagcagccgctgctccaatcgcttgagcgagcaacacctcatctgatccatccatcaacgaagatggaacatgctaccacaactaccaccagatgcaccaaatagcatcacgatatattcctcatgtaatgcttttattatttaaactaatgtaattgccgttttttttcatatagtcttactcatgctaatgacttggtcacattggagaaaagcgttgttggtcgagccatatggctcgataagacctactgatatgttcaattgtctcttctattttgtattgcaatttacaaattggatgtttatatatagttgctccgattaaagggctttgcatatgtatattcgtacatacccgcacatatatatacattatgaatgttgttaaatatgaatttaacatttgacaactatacattgtatttgtatgcaacattaacaaaactcacaaacccatcatgcaagtcaaaagaaaaaggttaatcatgagaaaatgtttgtgtgatcctgaaccacacaattttactttatgaggttaccttcatgacaaataatttattgtttttttacgattaacggtttcggacaaatataaatgtttctaacagagcatgtggacttcatatgcatcatttctaccggagctttgctcatctccattgccatgtcattggaacagcaaaatggtcatatgacctcttgttcatgccgttggcacaagaacatgatagctgggacccaacttggcttcagccataggtatcaacagctataacaaaagagaatgctatgcttggacccaaaggaaaaaaaaattgaaaattggaagcaacagattgctctagattgtccctagaattggtatcggtggtggtgcgcgaggaaataactagaagtgtttcctttgggattaagccgtggcagaaatcaagttgtttgtggtgacgatgttgctgattgaaagcaagagcaatagtgatgtactctaggtgaggatggtcattcatccatgagagaataagaatactccttgcataattaattattagaaggtaggtgtgcaagagtctcacactaactcgaccttatactataaaaaactgtaagttaaacatgtaaccatctatatacatttagagcccattctaataatgatttctatgttacttgcgtcacgggacacttgtgatcctaaaactctgcattccaatttgcaaacctaagtactatgttgagaatggattataacaacctgttaccaatagtaaacataggaaaaaaaattcttatattgcgaacttgtacaatcacccaagtcttatattaccagcttctacaagcaactttttagtcaacctgaggactctcattttacagcggatgaataaagaacagaggattgtcctaggttacgaagttgaaaaatgagttccttatgacacctttacagaaaaatatgtccgggtagctgtgtttgggatagaacataataaggcccctagaccggatggtttttcagtgtagttctataaaaacttttggaatatcattaaagaggttttaatgaatatattaaacgagttttatgcggaagtcctcccactgtccagccttaattttacggtaataacacccctttcgaaagttcaagatgcatacataatacaccaatatatagaccaatatttttgttgaatgtcggtcttgaaattttcaccaaggttgcaactaatacagttaattctctgactggtcatgtcgtgagctccacataaactgccgtcatgcgaggatgcaacatccaaggtggtattgttaatctacgcgagacagtacatgaattgcatcacaaaaaattgaattttgtgatattaaaggtggaacaaaacgcaactggcaaggcgatcaaaactgttatttctctaccaataaggaggcaattagacatcttttcttttaatgttgctcagcctacttagtttgttccatcatttatatgccatctagaattactccacctgataatgtttcacatgtgttcacactagttggctgtcaggtatttaaaaagatatgcaaccatatggggtggctaacacgtgtaggttggcttgcttatgcaggaactatatggtttcatgaccaaagatactcggcttcctcttcatcaaatcacgaaaatcaacccttagttagctgcaccaaaactagagcaggcccaagacaagcaagaacagtcagtcagcaccgcttaggcaggaagcagatagtaagctaagaatactcgaagaaggaggtcgctcagccgaagccctagttcaaccagaacagtagggaaagcgatagaggctgctccgtagctttggccgttgcactctaatcagatttagaagaagctgccaagttgtttcttctcccttgatggagctatttttaactatacattggttacgcacctaggttatactaaaaagtcgagctcgcaggagttggttactgcagggagtctacacttgcaggagatggcgaatgagtgtcttacctaggtaaattggtggcaatttactcttggtagtgatggtccttaatgcttcttggacctcctttcttttaaattggtttgcgtgtgttttagctaggcgcatacttgttatagagaggtcgatagtgttcttagcatagttgtatcactttgacgtaattgaacgagtttaataaaagcttcgattatctaaaacaagtagcctattaccatggccatccactggacacctggctgctcggtaacgacatgttattgggagaaatgcacggtgacccacagacatggcacatatgcatgcaaccaaccaatttatgaccacaaagctcccgcgccatacagactatttaaagcaatcacgtcacactttcataatagcaagcaactcgttgatctaggttagctagttcttgttgcattgaatcatccctcatcaaatcattaggatatatacttcatgatggccaaggtcatcgcacttatgcttgtggttattacagtgtcaaccttgttagcctcacccgtggaatgcgccaacaagattgctggtgccgtccctattttagcatccgcttaaaactttacgacaatgattgatatctttaaagtggccatgttagtgccaacggaggattgcaccgccaatgttgacacgtgcataagtaatacatgctcctacatccgaaaggccctcgatggtgttgttgctgttgcactaccagcaaataaggcggaaactttggaggccacgtccaagcaggctacggttgctgcctctactctcaacatggccaaggctacaggagaaaagaaaaaagttgccgcggtttccatcgtctacatgattgctgctgatgcggttgacgcagccgcgcccgctgacaagcttagggtaatggatgaaacatttaaagcagccgctgctccaatcacttgagcaagcaacacctcatctgatccatccatcaacgaagatggaacatgctaccgcaactaccacctgatgcaccaagtagcatcacgatatatccctaatgtaatgcttttattatttaaactaatgtaattgccgggttttttcatgtagtctttctcatgctaatgacttggtcacattggatcagagcattgttggtcgagccatatggctagataagacctactgatatgttcaattgtctcttttgctttgtattgcaatttacaaattggatatttatatatagttgctctaattaaagggctttgcatatgtatattcgtacatacccgcacacaaatatacattatgaatgttgtacaatttgaatttaatatttcacaactatacattgtatttgtatgcaacattaacaaaactcacaaacccatcatgaaagtcaaaagaaaaatgttaatcatgagaaaatgtttgtgtgatcctgaaccacacaattttactttaggaggttaccttcatggcaaataatttatggtttttttacgattaacggtttcggacacatatagctgtttctaccagagcatgtggacttcatatgcgtcatttctactggagctttgctcatctccatttccatgtcattggaacagtaaaacggtcatatggcctcttgttcatgccgttggcacaagaacatgatagctgggacccaactcggctttagccataggtttctatagctataacaaaagacaatgctgcgttgaacccaaaggaaaaaactggaaaattagaagcaacatattgctctagattgtccctagagctgatatcggtggtggttgttggaggctgttaaatgtcgattctataccgccaacatatgcataaagttcaaatactaaaacatccaacatagtgatagttgtttaatctcacatatttcacaagtgttggtgtatatttgtatgcaggtgttaaaccccgaagttgggaagaaatctagactaaagtgaggagaaacatgtatccatacaaggatgggttgtgaactttatcaaaatatcagaaactcagcccaaaactccgagaaatgggcagaggagggtcaggggagtccacaggccgaaggccaggccgggagggcccagcctaggttcggccgaaccccgctggtcacgtcccgtttttcgtgtcttctaatttgcttaattttgaaaattagcattcgcgtttattcgcctaaaatagcttaataaaaatttcataaatggaaaagggtttaatttgactaaataaattaattacgccacccttttattttatcgtttgtaattggagttatttgatttttatttggcttttggaagtggagctcgttctcatgaattctgtcaaatccttaaaaaaaataagtcccaaatccagaaaatgtcaaaattccaaatccttccaagttcatacttttccataaaagcatcccaatcgttatcattttccttgctttctatttttctttttttcgcctattcctttctttttccatttcctccttaagtcctggttgatacatcccttgtgtgttctaatctctcgttcaatctaatctctcccgcgatctctctttctctgtctgcaccagggcccgaccaggaggagccagcccaagcgccgctcacatgtgttctgccccgcacgtgtttctgcttcgtcttcatccatgggcatttctacctctccatcaaaacagcagcgcctctttcaattcctcacggatctcttcctctccttcatcaattttctccactaacactaaaaattgaaccaacttgtcgatctgaatccgtttttgcaattcctgatgacttctgatctcccaaccactcacctcctcctccacacgcgcatctcgcagagacgatgaacagccgcgtcaaatgcaaacgttagccatttaatttctagttgattgcactttccatccaccatgaatttaatcatctgttgatcatcaaccaagaaactaaagcagaccaagcaccaaatcatattacactacattatctccaattgaatcaccatgaccgagacaaacctgtatttccaattcccagtcaattctctcaactctccatcttcgtcctccctcagccacattactgatcttccgggaaactgagctgtctcctcgagttcctcctcccactaattaatctctccctctccctcaccaatctcattatttaacaccaaaaattaaatcaccttcatgagcatgagccatttttgtaaaagccagtgactcctcatctcctggctgcttagctcctattcttccctatatatagctgcagcacccctcctcctttcctctttgtttaaccagcgcagccaccgccccgctttacttccacgccaaccgtgacacaccgtgtgtgtgcacgtagtgccatgtgcagccaaagtcaccacgttggctactgcttcatcttcaagcacgatgtttctgctttgctatatatgaaggtcatgatgcttccctcaattccctgctcgtcccttctgcccctcatctgtttccattcatcaataccaaaaatcaaatcaaattgatgagcttgatctgtttttcgaaatctcagccacggccatgtcttgctgttggcacggagatatatcaaaccgtcaacgcgagaacgagcagctgcatgggaggatcatgttagtgatatgccctagaggcaatcatagagatgattgtatcacatactatgtttacatatttatccgactttgttccttgaaatagataactcattattggttaatgaatatgtgattctttcatgagactctttatgttgtgtgttgctatttctaaaggatcactgatcaaatattatatgtggaacaaatctatactactttctataaagttataacccactaactctaaagcttaacatgcaaccatgccacatcatcacatgccactaacaataattacatattcaacctcatgcaagcatgcaagagcatctacagtctatttaattctacaaattatcatgcaagcatattcaatcaccacctctcacatcatttccacaatagttttacaaatctctctatcatttttataatatttaatatatacttatcaacatgttctacattaaagtacgaatttcatttgtttcatgataaatattgataagccctaagatttgatttttttttctttttactcctagctgaattgtaagaaaaaaataatattgaaaattacttagtaattcacgcagcaaagcgcggggaatcccctagtatgtttagatgatcaacacatgtattaattgatgttcatgtctcatggatcatggtatagagataccaaattaataatgtggacacatgttggtgaacatgttgttggatagacccaacatgagacactgcaagagccatatgtgttgtgtcatcagttatctcatttagtgttggtgttgaatccttagacctgaaattattatagttcccaacatgtgtagtagcttacttagggactgctaaacgctactccgtaattgggtaattataaaagtagttttcgggtatgctatgaaacatgtagtgggatatgaacaatcaagatgggatttcccctcctatggagagatatatctgggcccctcgatgttgtagattatggaagttcatggccatgccaaatttgattgaggagtcaatcagaagttatataatcaatcaacaggttcgagtgaatgattgagctattagaggatggcacatatttagccttgagcttaatcgatatcgtgaggcaaaggggttcatacaagtatacactaaaagttcagcagatatgatcttaatgtatgcccggtgggtcaatacattctgctagaggccgctgttgacgcatggaccgaaaaggagttttcgggttacagccgagtgtacatgaacttataaggtcgcacgcttaatgggccggaataaggggattggatggagatccaatatgagcttaattcggatagggatccgaagaggagtcctacgggccttggaggcccgagtgatggatcctatatattcgtgaggggtgtgaccggcggaggtattgcatcacgtgagaaaccctagttgtcagtcccctcccccagcaaaaccctagccgtgcgcgggtgctagcacatctgcgcgtggcattccgttcctgtacgtgtggataccgatagaggcgccgctggtttgcggtgctgattggcatgggaatacagcgaggagaacgcacgaggaggagaaggtcgagccggtgcgaccgactacttcctctacatcgacgcgcgctacttcccgagaattccttcgacttcttagcgccttcttccactgcatagcgcgtcgagtggtaacgatctatgatctagtacttgcatggttcctggtttacgtgacaaaaaaaattgatttatgctatcgtagtctacgcgtatcccaacagatcaatcctgcaccatcatcttcctgctactaccgtctcctctttgctgctcacatcggaaagttgtgctgcctcttctctgctacggttggtaagcagttgcacaccataaaaaagtctttcatctgctgtgctcatccgttcatcatgtggtgttcgcataggttgggacatcgtgtccccctgctgctccgatctgtgcaaccaggatgttgagttccgacaccacgtcatcgtcgtcgcagctgtcatcagtgaaccaacgctgctccttcgtcatctccttccaaacaaacttctgtcaccattaacgccacttgcaagcaaacaagtcatcactgtccttggaacccaagccgttgctaccatgtcgtcatcttgttgagaccacatctacaagtgagctcttgatgttcatcctccattatttccttccatttttatcacccggtggtagcactatatgttgttgtttcgtccatcacgaaagcagcccctgtcactgtcaaccttcctcctttatatgtatttaacagagcccttatcttcttttcttttcattcgcacatgtccaaatgctgtcgtactgctgctttgcctcggccaccatgcccacagtgtgcatgtgcgtgcaccactgttaatctctctctttagatgacatatgaaccacaccagttggtacacaaaatagttccaatcaacctgaaaacgcgagagaatattcctttctatcttctattaattcaatcttccattcttgctgccacctctctctcttgtgatcataaaggtggccgtcagtcatcaccgatctgtttgcgcaccacgatggtcgctgtcacaatggaacccgagctgaaccacattgtcaccattacgttcctatgaatgtcgctgcggtcggtaagctccaaggccctagcagcaccactgctcttatcctccgcttccattgtcttccctgcctccggcactgtctcttgtcaagttgctattgtccgccggtgaaaccacctcaccgttaacgatccaccgttcctaccacttgtctgctgtggtcatgatggttccattcctaaatcactgcaccgacatccctgttttgtacaccggagtagtccatgccatgtggctgccactactcgtatttcccctactactccatgtctctctgccaccaagaggtcgagctccaccatgccattgccttgccgttgtgcttcaactccacagccttcaccaccgctgctgctatctttcatgagcccgacgtcatcttctagcccgctgtgcttttgattctccctacttcaatccgctgcttcattgttgtcacgttgatgagatccattttgtgtggcaccacgtcacatgcgttctggtcaggctagcctcctaaaacccaaaatcaatcaagttatctatctcaacaaatagatctcagccatcctcgtaattggtccacaactctcctccttgtaaccaattaaccgtaggtcatcctaccgacaggtggaccacgcccgccagttcgtaaaaaataatccttttggttcagaaattccagagaatattttctaaatatttctctttctttattcatggttttccaataattcaatcttccagaggtcacatctctttcatccaaactccgattcggcccgttctttttcctaaattattctaaaattgagctctacttcctgatttacttggttatttcatttgatgttatttttttctgccttttctttttgtttatttgtttgctcctttctgcgatcgtatagacgctgttgctgaggaggttgttgttgcaggtgaaggttccgtctaacgatctcgtgggtaaaggcaagtgtacccttgaacatgttgatcctaacttgaaaaattatcttgttttaaattatatgcatgatttgtttcacaaactatcgtgtggatagttatgacctacttgttaattattccatgccttgaattattgttgattatccttgattatttgtcaccctagactgtatgagaatcaaacatggggtattggctcggggtagtagatttgcttagccatgctcacatttttacaagcaaaatataatattgactaatgatctacttattgcatttatttacataaactgtgtcgttgtgcgctatcttcttggtggcatgtgttgcaccatgtagtaattaactggtggaaaatgttttagacctgggcgatggtggatctgtgtgaacctaggaggtaagccatctgtgtgtgtgcttaccgttgatatgtgtggtcgattgagctgtgtgctccctttttgctgtgtgcttgaggtccttagtttaggcaagtcgccctggtcagttaaggacttcacttcgtgcgccattgatctgagccttaccgtgcaaccacatgtccttatgggaaggacctagcttagtacattgcttagctctggcactggcggcccaggtggctagatgataggtttttggattgtaccatgggacctttcacctgtgtggtgaagggaggaccgcccatgggggaagccggtgttagggcgaggtagaggaaacgctttgttactctttggtgtttagcggcaccgaactgtatcttgtgggtaaagttgtacaacctctgcagagtgtcaatctattcgaatagccgcgtcctcggttatggacatgctcggtgatttcacttgacgggtagatttgtgaaagttttacttttgggaaagagctatgtgcaggataaattaatgaatatagctgtgtgctcctgtgtggacgcaatatcctttttgggttggttggttggttaaaaataccgtgattgcaaatgttgtttaaatgaaatttatatctatttactgtatttaaattcgcaaatgcctttatgtaaatgaaccctagctttcctttgaagccttgtatcatatattgcatattcccgtacacttgcgagtactttatgtactcacccttgttgtctcacaaaatttcagagaaggccagttgttttagaagttatgttgctgaggatgtcgaataggttgtgtgccccagttgactgcctgtggtgtgtcgttggtgcctctcgcttctttttccgctgtttatctctgtttggccctgcgtggcaaagaaattgtaaaatctggtcataagaccaatgtaaaaattatatttgtttcctatttattaatataatcatgatgtagttgtgattttatcttttgttactgtgtgtgctagcgttgatctaggactagcacattatatacaaagggatcctagtttgggtcccgacaggattcgataccctttgaaatactccgtaggggaagtgctacatcagtatatccatgcgcttgcggattttatctgtgaccgtaagaattaccaacagtggtgcacgagtaaataactagaagtgtttcctttgggattaagccgtggcagaaatcaagttgtttgcggtgacgctgttgctgaatgaaagcaagagcaatagtgacgtactctaggtaaggatggtcatgcatccatgagagaataagaatactccttgcataattaattatcagaaggtaggtgtgcaagaatctcaaactaactcgaccctatactataaaaaactgtaagtcaaacatgtaaccatctatatacatttagagcccattctaataacgatttctatgttacttgcgtcacgggacacttgtgatcctgaaactctgcattcctatttgcaaacctaagtactatgttgagcaaggattataacaacctattgccaatagtaaacataggaaaaaaaattcttatattgcgaacttgtacaatcacccaagtcttatattaccagcttctgcaagcaactttttagtcaacctgaggactctcattttacagtggatgaataaagaacagaggattatcctaggttacgaagttgaaaaatgagttccttatgacactttttcagaagaagatgtccgggtagctgtgtttgggatagaacataataaggcccctagaccggatggttttcagcgtagttctatcaaaacttttggaatatcattaaagaggatttgatgaatatattaaacgaattttatgcggaagtcctcccactgtccagcctcaattttacggtaataacgccccttccgaaagttcaagatgcatacataatacaccaatatatataccaatatttctattgaatgtcggtcttgaaattttcaccgaggttgcaactaatacagttaattctctgactggtcatgagctctacacaaactgccgtcatgcgaggatgcaacatccaaggtggtatttttattctacgcaagacagtacatgaattgcatcacaaaaaattgaattttgtgatattaaaggtggaacaaaacgcaactggcaaggcgatcaaaactgttatttctctaacaataaggaggcaattagacaacttttcttttaatgttgctcagcctaattagtttgttccatcatttatatgccatctagaattactccacctgataatgtttcacacgtgttcacactagttggctgtcaggtatttaaaaagatatgcaaccatatggggtggctaacacgtgtaggttggcttgcttacgcaggaactatatggtttcaagaccaaagatacccggcttcctcttcatcaaatcacgaaaatcgatccttagttagctgcaccaaaactagaacaggcccaagacaagcaataacagtaagtcagcaccgcttaggcaggaagcagacagtaagctaagaatactggaagaaggaggtcgctcagccaaagccctagttcaaccagaacagtagggaaagcgatagaggctgctccgtagctttggccgtcgcactctaatccgctttagaagaagcagccaagttgtttcttgtcacgcctagaaattctcgaatagaatttcaagcagaatgtgcaataaatcccctgtccaggaccggccagggtacacaaacgacaaaattgacatacagatgcagcggaaaaataaaagataactggagctaagccttgacttggattacagcgtgaacaccactccataggcatcctcgacggctcggacgaagcctactcctcggagaaaccaccatcggaagcatactcgaactctgagggttgggaggtagagcaagactgagtactacccactgtactcagcaagtcataccggaacggagggtatgatgcaagatataaccaaaggaggctaaaaggggttcatttgcataaagctagcatttataaacagtagttgaaagcagaaaagcagatgtagtaaccaccacctgaagtaattagttccattaagctaaactagggtgggactaatcacggtgaatctggttgaccgcccataaccacgggcacggctattcgaatagttttactttgatcagagatgtacaactgtacccacaagacacagccccacaacatgttcccgagcgcatgcatgccaccacgacataccggaaagaggccgtgataggacccttcgcataaccccctctaaccaagcacaccacacctcaggtttcaaccccactcctcgcaaggcagcgggcaatcccctctcgtgcctaggtgaatccgaaagccgcataggccgtcgcagggcccatccgaactccatcacgcccacccttgcctggatgcgtcagctagaggaaagctacactacaagcccagcctttgcccacgctggcttgtggtaagtacgaggaattcttccagagtatcccacgaaccggtccttaattgccatgggtgcgaccatcaaaactatgcacccacaacctaccatttaatatattttaattaaccaacaccatagcggtgggcactaatccaacatcaatactagaatctgaagtctatgcattaatgtaattcccctattgtgtactagttgaactaagcatggctaagcaatccctaatccaacatctagtcatcttacaacccaagctagcaaaggaacatgataacaaatagtatggctgagacaataggtgatcatcccatagtaacattataaaacgatgcaatatttaaaggaaaacattagagcatttgtaatatgggatcaatatgttcaaatgacaaacatgacttgccttgctctacggctggaggaacttcggcaactatctcgaagtacaccggactgtcgggagagctagaatctatgcgatatacaaggcaaacaatgcaaacaggctataagactactaaaacagagaacaaaaccatttttaatggattctttgcatttttcttgatttactgagacttgaatgggcttaaacggagcacagatgaattttctatgaattttagaagattcactgtgtttttactataaaaagaaaaaccttaattgatttattgcgcaataattaaccctggtgacatcagcacatggagggggcagcgccgacatgcgggccccatatgtcatcggctcggggacatcggtccatggtggaccgagtccatgggaccgggtgaggggagcgccatgtggcgcacacgtggcatcgacgtggtggccacgcgggcggcaacgaatgggcccgatctagccgagggtagatcggacggtggaggcggcacgcgggaagcttaagccggcccggcggccctaacgcgcggcggtgagacacgaggcggcgacgcgagacggcgagcggcggcgacgcggcggtgacgcggctaggcggcggcgcctaagggatgtagctcagaggtctatgtaattcatagaatcatgtaatacgtattagtaggactcgtaggcactactagaaaagacgtttttccaggcggtcaaaacacgttttcacgggcagacaaacattccgcctgcatctaaacgacggtaaaattcctcgatttttaccggtggaccaaagcaccgcctgcagcagtttcgatcttctcaggcgccgtgggtagccccgcctgcaaaaatactcacggcgccaaaaaaaactttcccgccaaccccaccccctccataggtttcaaatcacaaatcacaaattctcacaaatctcatccaagaaacaaagtccaatcacaaacatccatacatcaacataaagcaatggattcaaatccacagcatcaatttgcaagttatcatcaatcaacatgcgatgttaacatcaatcaaacttaagaaaaaaaccgtagtcgtcgtcggcgaactcaacttgcatgcggtggccgccgccaccccctcccccccgggccggatatgggagggagggaggtgtccgccgccgccaccgccctcccctctccttgtaggggccggatctaggagagggaggggagggaagccgcatccacgccgctgccgtcgcccctccccttcctctggtcagatctaagagatgggatggagagagggggagccgccgccgtcgtcaccctatctgagccgccgttgctccccctcctccaccagatctaggagcggggagggagagagggggagctgccgccgccgtcggcctgtccgcgccgacatcgccgtccactccaccgctgccgccgtgtccacgccgccaccgtcgctccccatccggcggggagggagggagggagggagggaggggagggaagggggacgagcccggtgggtaggggtggaggagaagaagtgttgagggagagagagagttgagagggaaatgagtggtggggaggaggtggaggagaagataaggagttaagatatttttttctgggtaggtacgatttttgcaggcggacttttgcaggcggaccacaaaaggttcgcctgcaaaaatcatatttttccaggcgccgcttaagttgtccacctgcgaaaacaggcggagagcgaacttcaccccgatttatatttttgtagacggtcattttgctctaagagtcatgtccgtctgcgaaaaaaagacccccacgttgagaaaaatgctttttctagcagtgagggttgtcatcattgggaatgttggaacctacatatcaaaacctatgatcccctgctggctaaagaaaaacctatgatccccataatgcagctgcatgctgtttcagctctcaattgtgtttcatatgcttttgtgaataagtgcagcacatgcatataaaacagccgtacatcacgagtatgcactacgcagtgcgcaaataaccgcaggaccagaggtactacggcacatgcatgatgtctcaccattattaaaggtttcatggactttttatcaaactaggaaggtggcccgcgcgggcactttcaatacttatattattgaaaggtaagattattgtttgttcaaaaaatttgtctcatagatttagggcaaaataatgttattttataataatttaaggattctatttttcttaaggtattttagaaaaccattcacaaacttttgagtaggagatgaatttagtacttacaacttttgaatcatgttttttttctcgagtaaataagaaactattggtagttaattatcatacagtccatctatatacataccgtgtagtatggctgcaaataaaaaaatgcgagtgcaagatacttaaaattcttttgattaaatcatctcatgaaggcgcatgatataataataaagggagggaagcatatgcatgggaaaaaaagaagaaagagaaaaatgaaaaaagggaggggaggcgtacgaacccgcgcacgtaggtgcgcaactatgctgaggtgggaccctgtaatatttagtttgttctaagatcaatttaatataacggtttataatattggacctaccgatttacgtggcagcttgagagcattttaaggaattttaaatgactaattagaatattaactgcgcaatatatatgtattggacatatggtaatatttgttccagcttcatccatgtttatatacatgtagagagaaattaattttgtggctagcaagccattagatgtctaattaatagcaattaattttaacacctatttacaattgttcagagtaactcttacatattcatcttatgacttcgatgatccattgatcaccaatttactaatcaccatgacttgcatgaaaaaaaatatgtagtaaggtttaggatagctgaaattgatgaattatataatttatgtgatagctaactgagggtataaacaaatgaattgacttctaaaaagttaaaatgttatttaaataagacaccatttagaaacttagaaagcgtgcaaacaaaaatccaaaatatggaatcaggaaaataattaatcgctgcatcacacctttaattttcttttcatgttattaacaaaattaatcatctccatatataatttgatatgtggcaaaacggtagcgctacatcggttgtgatcaccttagatgtctcagacactacgctttgttacacgtgcgaaaggcaaaaggtgtatacgtgtattgtgcagcgggcaaagagaatttcggacgctttatttattagcaaacaatagatccgatgattataataatatgtccaccagttctagtgtaagtgtaattagttaatatagattttaaattgttattttaatgggtacacaacataatggtgtagaccttactttaaaacagtgcattacttgagaataatagaccaatgtaataaaaagtagatccgatgatttatataatgaggccatcagttttagtgcacgtataaattagttaatatagatatcgtttatttgataggtacatgatataattgtgtaaaatttattttaaaatagtgcattatttgaaaataatagtataaagtaaaaagtacaccggtttaagttatatgatggtagattctttgtttgtaaaattatgattaattatttaaaaatatatccattataaatggaaaaaaagaagaaaaaaagaaaaaaaaaggaaaaaaaggggggaggcgtacgtatgtacgtacgtatatactacatctgctaatgtgcgggaataggataggtgggacccatggtatttagtttgttttaagatcaattttatctaatggtgtataatattggacccaccaatttaagtgaaaatcaagggatagatgttttgcttttttcttagaatttctaggattttctctattttattagagcgccacgtggcggtttgagagcgtttataggaagtttcatggacttttagtatataatataatataatataatataatataatagttttaagatcaattttatctaatggtgtataatattggacccaccaatttaagtgaaaatcaagggatagatgttttgcttttttcttagaatttctaggattttctctattttattagagcgccacgtggcggtttgagagcgtttataggaagtttcatggacttttagtatataataatagaagatagatagatagatagaagatagatagatgtctgattctgttttatctatcaacattttttttcaagctggaccagtactatgttacaattcatacttactcttactgatatcaacaagaaattcctgattaaaaatacatctggaattctggattacatcaggaaataaaaaacgaagtaaatgaaaattgcaaactgaagcagatccgtacttcttttgtcccaaaaaaatatcaaacctattattagaggggacacaatctagtctaacaaatctagacagaagcttgtccagatttattgtaccaaatgatgtattctccaattctagattggttttttatgggacggatggattagttttatagtaattcgctaacttctgtttcatatgcatttctgatctcaaacaggtgacccgtgagtgagcacagcacaaactcgtggtatcgcgccgcgccgccggacggccagggccgaccgagcggcaagggcgtatcgctgtgttccttgacgccgtcggcaccgtgggttctgttgcggcctgggggcctcggttgcctcgcgcgcgagcgctcggccggcaggggtgacgcgttcgcggtttgttttggtcagggtcaagcttgcaagttagaagactgtcgctgtgtgggtacgaccccgcgtcgctctcgcgcgggcaggtcggggggcaaaaaccctagccgcccaggcctcctccccctctcccctgcctcgctgccgccggagctcgccggcggcaaagccggcaacgagcagggaaggcagcggcgaggtccttcttcctcttggcagctccctcccggcgcgacgtggacggggcgacgccgatgaggtaccccaccgccgggagaagtggaggcggcggggcggtgtggggtggcggcggatccggcaccccccatggccggatctggcgcagcagcgcggcccggcggtggtgcgcggctgggggcggcgacggtggcccggcggcgtgatgcggctgggggcggcggcggcggcccgatggctgggagcggcacctggcaaggcggcggcggctccggcggcgccccgcccggatccggcgtccccgaggtcggatccgactcccggatggctagggtcgttatggccggcgtcaccgacgatgggaagacggcgcgtgcggaaggacggcgcatgcgcgacgggaggatgccggcgtcgaggtcgatgcgtgcggcgccgtgcagcgggccgacgcggcagtggctggcgccagcgatgcttgccgccggacctcgtggatgaccaccggtgggggctgctgccagatggatggctgcgttgtgggggacccgactgggacgccggcttgcatggcggcggcggggtcgttgcgcgtcgctcgtgtggcggcgctgcaggtgttggccggtggagatgccgccggtctggggtcgagctcggattcagccgcacagcactgccatcacgaccggcgatgacgaggggacgccatgtgggtgccttctcatctccttggagctcctccccttcttgaccgcctggtcgtggggagctcctttgcgagacggtgaaggcggcggcaaggttgccccaggttgttatcgatagtgatgggcggtggcgggcactctctttggaggtgacggcatgggaggaaggctagctggtcgccgaagtgcagtggtggtttggtcgtgctcattccaacgtgtagctgtgggggtcgcgctggtagcaggttaggtcgcttggagtccagccgacggaggggcgtcgttgttgtagaggccacgtgctgacattgcttgggagtcggtgaggtagcggcaagaggggcattggcaggtgctaggcgaaagccggcccaattcttgggcggcaacggcgacgtctttgggcgttgcaaccctcttgagggcgttgttgaggtgcctccctccccctcttcaaggatcctctaggtgaaaacctcatcctttcgggatgggcgatggcggcgtttttaatgtcgtgaccttcttgaaggcatcgttttggaggtggccgtgtgttcctctcggtgtggtggtgtgtaggcacgtggcggggtgtgttttctcttgtccggttcccctgtcccctgctgcttttgcttttggttgtaaatgtctgttttactcctcttaatgcaaaaatacgcttctagcgtattcccgaaaagcacagcacaaacaacagtgctggcagacatgccttctgcctctattattaatttgtcagagaattattggccaaggttgttcgagctcattcaagcgacgatcttatacctggccgagattctcgttctctcagtagtaatatacattttaggaagattttcaggatcaaatgaaacccatggatctgctgttcatagaaggtttgagtacttgcccgctcttcaaaatggaggagctagcactgccaatgcattgatatatactccctctgtttcacaatgtaagacttttagcattgcccacgtttatataaatgctaatgaatttagacatatagtagtagataagaatgttgtagagtttgctcttcttgaacaaattgatatcagtttgtctgtaccaataatgtaccactaagtttatccttcaaccgtatcaatccgtaagaaaggattaagtatgcgtcctgctgatataatgtcttccacttctctctctctcaccctacattgctgacaatttattttggtacaatggcagtcatcagcaatgccaaattattaggccatctatggcttgaagctgggcatccttcgaactttggtagcttgctcaaaagcataagccatttcaatcagcctcggttcatagcccttcaacccaccgaagcagataccaaatggtactccatgaccatcgtacccagccggcacggtgatcgcgggcatgccgccgatggcaaaaaagctagatgcatgagagttgggggtgacaatcgcatctagctggtgcatcctcatcagattctccaatccatcagctgacagctcgttgagacgctggattgccgctttttccactggaccaatgccattggttttttgagctgcaatcaggtcgggctggccaaaatcttgaagtctctcctgcagcaaagattattttttcatggcttcttgtttttcatatgaaaggtattcaatactttttagaaaatacaagtgctggtttaatttttgcactcgaccgtgcactgtgcataaagtaaattcgctattcttgttaatcggtaacctggtattctcttctttgccaataacctaaacctacactattattgtataactttcgaacgttgaaggataaattatttgacattccttgcaactagctagttttataattttgaaggcattagaactcgtgatgaatgattaattaattcaactagctttaatacttacctccacaggatgtgcattattgaatgctaccacatcggcgagggaatgaactggggaatacagcaagtctgacaaataagcgtttaggcttaacttgaactctgcttgcaatgcgatattctcgttggaataaagaacatcctgcgcggcagacaaatttgttgtgatgttgatattctctatcaccagggctccgtgtttcctttattggagaataggagttattaaatgatgacataatttactatatactagatggagtctttcattgcgagttctaatatattattattccacaacatatacgtgaaatattttgttgatctatacttaaaagaatagattttagctatcattttaatggttcaatgcttgattagtttcttttacaaatattttgaacacaataaatcagtctacagtttttgtaactaaaattatttgttcaccactgaatttctatggggagatgaatggattatcttaagacaaggagtttcttttcaatcatggatggataaaataaaccggactggctacttataagataaattttattcatatgaaacaaattaagaattttactgaggaaatgagaaaaaaaaagaaaaggaaactggcctttgtgcatccaaaaggtggttgaggcatgggccaacgtgctcatgcctagtagtcagtgatctattttcattctatatgtaaaacagtatatatggactattccaattatacattcgaacacaacagaaaaataacagtatttacaaaaaaaaattttgttctaatcattattatcttcatacttttttatacgcataatttttcaggagggctttataatttcaaatacctcatagtggaaagatgtttttggtacaccctcagttgtgtcttcccataggctccttcagtgaaaaagccattggggatgccaatcctcttgcctttcaatccatccatccttaagaatcgtccatatccaccactagggatgtatttggatgctgctccagtcgcttcagcatcaagctcatcgaacccaacaatgacatccaacacatgggcagcgtccgacaccgtacgacatattggcctgcattttgtttaaattaacaaaaataaatatgttcaaaacagtatcataaacattcagagataattaatcaaaagaaatggaacatttttttacgaaaacagtggaaatcacatgctcatcataaaattgttacttacccaacagtgtcttgtctgggggagatggggatgacaccagcccggctggtgagcccaaccgtcggcttaattccgaccaccgaattcagcgacgccgggcaaagtatcgacccgtcggtctccgttcccagcgtcaccgccgccatgttcgccgccgccgccaccgccggaccgctgctcgacccgcacgggtcagccgagagcacgtagggattctccatgggcaatttcacaaacaccttgtgagcatacacgaccaaacagagaagagaagcagagcatgtgtggtggcagtggtggttaccaccgtctggccgtcgcgggcgctccatccggatttgacagggcggaagttggaccactcgg

SEQ ID NO: 7106 - DNA, 1516 bp, Oryza sativa
agcgcataaccaagtaaaagaacttacataaggaaaaagataatgagaaaacatgaccattgttttagtcatttctcctctacttccctttttcaaaataaaaaaaataaaaaaactaaccattcttttttagaattaaacataaccattgttaaatcaaaatttacgtatcagcgtatgttcccacaaatttttatttttgttttaggtctaaaataatatgggatcatgctaattgccaagtgtagttaacatgaaagtagtgaactaatacacgaacaatttgtccttttcttttggatataaacacaaatcttcgtttcatttgttattatggaaaaaaaactagaacatatgcagtttatctcctcttagaaccaaaaaagaaagactattcacataccatggttccgatggatgcacatctattggaaaatcaggatgttccattgggatgatctgatcaaatgacacatcgactgaagttaacgaaataataaaatgaatgggttttcaaatgttataaaagtatgcaacatgcatggttttggtgatacaaaaacaactaaaacttatttcacctgatcttcctctcggtcctcctctttctctttggaacaagaactgttatggtgatcggcttcatgattttctttggtctcatttaagttcaaatggcttggcaatttgctctcaagagtgacagactcgttgttgtgtgagggtagcttctccaaggcatggtctatcggcagctaaatgaggtccaaattaatgaagttaatagaaattctatcattggtgaataaatatgcaggtcaaatctataggatccccttcctctctgagaaaaaaaatgtaaataattattttgtagtatatagttataaaattgtacactcagcatcgcaggcatgaaaaatgagcaatagttaacaaggttggacctcgataacgcatattaaattattaaatagagcttacttcacatgatttagagcaggttagatggtacaaaactggaattggtcattccgtcattacacttttgattccctaaaaggattactctcatcaaaatgcagttccaagatgtaggggaaatagtgaaacagaggttgttgattcatggaaatcactaatgaaacaaggaatatattgtgaaaatgaatgtaaactcatcccttgatacattatagtttttcttatcaaatagatgacaaatacgataatgccacatcggcataagcaaaatgattcctctgcattatattcctccaggaagaacattgcgctgtagccttttataaacaaaacacacgatagtaataattaattacctcaccaatgatagcttctttctcgttaatttgattgatgatttccactatattaggcctattttccctatcagtctccatgcatttcagcgctatctcggtgcatgtcttcacttgctggcaatatgcttccagtaggaaaccattccttcctgtctctaacctagttttccaat

SEQ ID NO: 7107 - DNA, 3202 bp, Oryza sativa
acctctttacttgcccgatcatatcttagatctgtaaattatgttatggtctacgttccactcatagcgatgtgcttgagtccaagggacagggggtcgtcttggggccagagagaatgaatagatagggccccacgagttgttaattggccgctggggaattcacatgaaagggaaggacttattctgaaccaaaaaagtgctcactaaaccgaacatgaaagttgttttccatcgttttccatcataaagctgttcacataacttcacttttgacttggattatatatcccatatatccaggtaccatattaagatgtgattggcatccctcggcaagcactggtatgtacttaccgtataataattgctccacaagtactagtatgtactacttaccgtataataatggattgatatgcatgttttttcttccttgtacatagacacccgagcacatgtcttgtgatatcttagcccaataagaattagacatgtgtagcccatgagagttgtatgcgcatgtttagtaccaccgaagggaggaccattacaaatggtatcagagccgaccctcgcggttgcgcgtatgggtcagtgtgagggcacatggcacatggcgcatgtggactttgcgtgaggcacatggcatggcatatgatgccaacactggacgttcgggcatgtgctaacagggggtgtgtttctatacctttgcttatatgcctgtgtagctatgtgggtgatttggaccgacggggacgtcgggtcctttgaggggggtgtgtgtcagacatcccgacccaataaggattaggcctgtgtaacccatgataactgtgtgcgcatgtttagtaccactttctagtttagcaagggtgcgcccttataaggcctcttccctcaaactatatcactccgggttaaccttttagacgaagtatggacaaaagtataagtgggatggtatgtgtaagtgggcccgtccgtcggatgggctggctacgcggttctggagggatgtgtgattgaggtgaagatggaatattagttcatgtggtagcttgaactactccatctaaaccataaaaactaacttctgctacaaaccgtacatagcctacatttatatttatagctaaaagttgaatttcttttatgggacagagagtatatatacgaagatagctatacatccatctaagattatatgggcacttctaagtgtgttaaatagcagaaataaatattgaggtaaatctctttgatgtacttggaagtttatataattatgtactctacttgactggaaaaatcacgcccaatgatgcaactatcaataattacctaatgatgcaactatcaataagtacaaatttgttggatgaattgaaaagtagtacactacttcacaaacgatttttccatgcgactaaaatcgattttcccagataggggatgacccgcctacacccagatgtccaaaaagtcagtatttttacatggggaagagcaactgcatgtgaaaatacagtattttcgcatgcgggcgcttaagctgtcataatgcaaaaagttaaatcgaatgaaaatgaacaatccaaaaccatagtgtaacgccccacttttcgcgagacgttaaaagctaatttattaaaaatcctaattgtgaaaatttcgttctttgagtgtttgagtctaagttgtgccatagatctcaattaaaaatccctcccttgtctgcataccctgttatcaaagatcgtctcctcaaaatttccatcccaatataatcccgaagttcgatcccttctattcggagttccatcctgaaaccccacccgtgatctttgtcgaatgcccgaaccctaacccagtccaatgattcacctccgagacctaaatactcccttgtttccttcaaaccgactctcgaattcgaacttaacctctcaatttcatctctccctctctctctaccttcccttgactctctttcgaataattgatctcaactcccatatttgtaatctccctccacctatcgctctgtcattcgttgaaaccatttccgagtatttgctccgaatcccctggtgcagatccatattgaattcctttttatgaaacccaattcccgagatttcccctctctttgaaaccccatccaagtaattctagaacaatccccgagtatagatctatcccaggataatatccgttccaaataatctcgtctgaacccttctattcagatttctcttctaaatcccttacccacatatctcgtcgagtagtccaactcaaactcccaagttacactctccttctctaaattatttgactcgtctccgaatattgttcccttccttgactccttcctattatcccgagaccaagtatcgacttcgaaattcgaatccagactccagccctaaaaccttccaattaaatctctctgtgaaagtctatttaacctccctcataggttggattccttcttcctttttcctggtccacttcttccttctattccagcccatctctctccctctccctaaagtttggacctatcaatctacctacaccaatccgagagttcgaatttccgtattcggattcctcttgtaaaaccctatccgcatttgtcgtcaatcctcaaaattcaaactcattgattggttcatttcgtccctctctctttcgatcgatctacctatctacctatccatcgacctatctgtctctcgatctaatcatcgatctctctacctgtcaacccatctaactatccgtctaccgatctctctggtgatctatctatctctacgatatccatcgggccgtccgtctacctatctatctttgaaatctatcccaaagaaataccgaattcccgcttggatgcattcccttgactcctccctgttttcctgagaccaagtttcaagttcgaaatccaaattcaatttccaaatctcgtttcctccccggcgccgaatcccgccgcccccactttgaccgtgccggcccgcgctccgcgttcaaattcgaccgcttgatccaccgacctcgccgcccaacgcatcctcgccgttgccgttttcgggtcgcccacgaaaccatcgccccaccgccagccgagcgccagctcgtctgtgatctcccccttgcctataaatcctacccaccgagccccaaa

SEQ ID NO: 7108 - DNA, 8289 bp, Oryza sativa
acaggtgatgttccatgaatgagctttgaatctcttcacttgctgtacaggggattcgtatgtgtacactcttatgaaaccatcatgatatccaaccacaagccattgcttccgcgcaatcaacttggctgcgctagctgcagttttggagtgattgatatgttagcatttgctgttacaccaggggtaaagtctatggctagcagtgagttaagtcaggtcaggaagcatgcctcttggtccaaatgagctttgaagcaggttcactgtttcctgtggacaaatatgtggaccaaccttagtcccagaacatccaacaccattcagtttgctaattataagcatggagaaacttacaatgaatttcactcgcataggcaaacattacaatgttaccactaatttttaagattaagagaaggtggttctttttatattcattatatcatcggtggtagttatccgatttacattgggtggtatacatatggtaaattcggaactaattattctgaaatttgtgttacaactgggttcagttttaagaaaatcaatttatgcagggagacatatttaaaagtagaaattgataagtattaaaatgggaaatgtgtttagtgttaatttgtatctttggaacttcctaatgtacaggtaccaaaaattaacactaaaaatagtatatacagcccactgggagtggtcacttacttgtgtatcacagttcaggatgtcgactgagccaaaaatattgcctgtcaaaatcctgcacacaagaaatttattatggtaaaagctggtaacagctgttttgcatatgctatgaaaggaaaagaaatgtattaggtgttcatcacatacatattctgaagtatctaaccttgattttgtgggctgtaacgactatgattatagtataacctaaccactagatgaagtaaagaattttcagcaggaaagagacaagcataaaacacaatgatcgttaaatcagaatgtactgaagaactaggactccctttttttcatgtaaaaagtctagaaaaaactcataatacctaatcttcactaaaaggagcttgaaagcaagtggacaatttattttagaaaaatgtagattttttacaaagtttattattgtaaagctggccaccaggtcatgactaatgaggcttttgaagggggctattttcttttcacgctttaaaataaaatgggatcatagcaagtaaagtaaaggatgataaatttatcgcttttagaaatgcaagaaaatcttggtttcaattatcaccatgagaacatgtagtttgtctcctcaaacaaaaagagatgacaatttcacgtaccatggctcagtgggatgcgcatctatgggaatgtcaggattttccattggaatgatctgatcaaatgaaacagcaaccaaagtagacaaaattataagatatttgtgaaagggtttaccgatgtaacaaaagtaagcaattggcatgattccaacagaatatagagataaaatttcacctgatgcacctctcggtcctcttctttctctttgaaagaagaaccgttatggtgataagcttcttggtttacttgggtgtcacttaagttcaaatggctggccaacctgctctcaagggtgataaactcgtcgctgtatgaggtttgcttctcgcggtggtcgttgacgaaccggacctctgagccatggcttatcggcaactaaatgatatagccaatgtagtcaattaaagaagatttacatgcagctaaaaagtctttcaaatataaatacatgttcctttttgagtaagtggaaatacatgtattgtaatgtgcagctatgaaactatatacccaacactgcaggtacataaaagagcaataattaatagggttcgaccattataaaacatattaaattattgaatagcctacttcacatgattaaaaacagggttgatgtagaaaacttcaattaattttacttcttttttgtgaaactgcaattaattttacatttttgatcccctaaaaggataattgtcaacaaaatgcaatcccaaaatacagcggaagtgttgtgagacagaaggatgttgattcctagaaatccctaacatacaaggagaacattctgaaaatgacgatcaccctagacacttagatcatctttgtggtattgcttttggtcgcggacgttttttcagtttcttaaatttgttatgtttgtatttggctcctgacgagggggttttctcctccgttactttcttctcttcttagtggaatgacgcgcaattcttttgcttgttcgagaattaaaatagtcattctttaatatataaggaattttacagaataaataaagaacatgtcgccgcttcatttaccaaagtaaaatcattccactttatgcctttatgaagagcttcgcactaggtttattttttaaaaaaaaaacatgccagtaacaatattgattaccttgccaatcatagtttctgtctcattaatcttattgacgatatccaaaatattgggtcttttgtgtctatcaatctccacacatttcagagctatttcagtgcacgtcttcacctgttggcgatatgcttccaatgaggaaccattccatgttgcttgtaacctgactgtccaatttcctagtacctgcgaaattagaatgtaaagctaaactattaatattcaatacaaaaggagtagtttttcagagatgatcactgatcctgataaagacaaacaacatttcttactagatcagtaaattcttgggaagacatttcagcacttctagagcgccctctaggtcctgcaattacgtttagcattacaacacccaagctgaatatgtctagcttgtttgagagtacattcttctctatgtattctggcggcaggtatccgctgcatatggacacatatgtaagcgcatccttattagaaaaggattcaatcaaataagtaattgagcttacactgtcccaattggagtttgtgtgacccttgttttctcttcggtgaagagcttggacaatccaaaatccgcaagttttggcaccatgttcttgtccagcaatatattgcccggtttaagatccaaatggtaaataggtggcttcagtccctcgtggagatattttaaaccctcacatgtccctttaataattttgaaccgtgtaggccagtcaagaccatgaaattcgtctgcaaagatacagaaaagaggtatcaacataataataaacataatctaaatacccaggattatttttttcttagcgtgctaaggaatatactagaactggagaaacatcgtacctgaaagatgattctcaaggcttccaccggttaaatactcgaagcagagcgctctatgtattattgcagcaaaaactattcttcctttgtactctgcgtatttatgttgtgtttcatagcagtaggcaactagccgtacaatatttggatgctcgagcctcataaggttctgaaattcattctcgaattgcttatcgtcaaatcctagagtatcattatgaagcatcttcactgcaatctcttttccatttctaaactctccctgttaaggatctattgtcagtacttaatacagcttgatttagcattactggtgaaaacatttgacaaggatgaaattgtaaagcatgtctttatttgctttgtagtcacagtatactacaattaagtatcatggacaataaaaggcggggcatggttaattgctcatcatagtaatataagtatgtgcaaacatgtagcgcatgcttattctttacaacccatacagtgctttgtcaagttattcgcaataaacaaatgatgccctcaacttaccttataaactgttccatatgcaccttgaccaatttttcgctcctcggagaatccatctgtaatttcttctaacaatcggaatgttatatccgttgggtccatagttgaatctggagcttgatgtcggtgtcctggtttatgctagtaaagaaggccttctgcatgaggacaatacaaagtaagttacgctgttaaagagcaagaagttgctactagctctagcactcaactcaacatcatctggctcttttttcttgccctttcattgttttgccttttgggttcctgatatcatccagattcaatcttgcattttgaagttgcgaagatggacaagtgatgagagagcagaaatttcacctgatttttgtagagaaaaaaattctgattcaccatctaaacaaatcattatcaattcaattttacccccaccgtcgctcaacaagtaaaaactctcagaataattgaaatcgaagggttggtccatcatggcaatggggtcaccactcaccacccataagctcctctcctcatcatcttcttcgctcatctttttctctttctttcttctcaccttccccggctatgtctcctcaagacgcgcctccacatcgggcgacggggctgcgccgccgccccgcgtagcggcgtcgccgcatcgggagcagcgaatcccgcaccaaccaacgaaccgtccgcgccgccaagtgggccaccgccatcctctccccctcgccttctgccgcggcttcgccacctcccggcctcaccgggaagtccggcgatgccatggtgcgcgcgcagcgcactcagcatccgcgaccgcgaggccgagccctagccgtctgcaggcgcgagcgccatggaagaggaaaacgacgttcgggtgtgtttggcgctacgagttgccagctccgactcttcattttccacccgcacacttcctaaactatcagattattaaatagtggtatactttttgtaaaaaaatataaaaattacttttaaaaatcatattaatctatatttttatttttttaatgtgtaaatcacagttttttacgtgcctagagaaaaagtattagcatccactccccaacgacctccaagagggagaaaatggacatttggcctcgttcaacacgtggtttcgctggaatgccatcccgaaacgtgtttcgttaaaatatcaatatagagcgcgtgctcatcgttagtttgccattttggccagtatattttcgaaatcatttttgctcctccaccgggtgatgagacaaaattaaccatcatgtcctccgcgccgtcgttgagaaagaggagctcgtcctcaccggccatctccatgtcctccacaagcagctcaccgtcttcctcctcgtcctcctccatggatggcgtccggagcagtgctgtctgggaaaggccagacgacgagatggccggcgggtcctccaacatcttcccctccctcaacctcgccacctccgtcgatggtgacggcgacgaccgagggaatccccagcctcctccaacaacggctgatgaccgtggaggaggaatccttcaaccgatgacggcgatgaccgtggaggaggaatccccagcctcatccgtcggtggcatcctcgatactgccaccgacgccgctgctccccaagcactagccgccgccccccgtccccgcagcagcagtcgcagccgcctgctccagtggcaacctactgatgacgacgacgggcttcgcctcctcttccggagcaggcctcctcacctcctcatccacctgccattcctcacggcggcgacctcgacagcagctgcggtcgcggctgccttgacgacgaacaccatatgtggctgcgtaggtcgaagtggaggaggaggcggtggcgacggtgctgcgcggcgaggtggtcgaggaagtcgtggtgatggcgcgggtgaagggggaggaggggggaaccatcttccatggctgcaaccgcgaggcccgctcgtcgctcaccgtcggcgagacgctgtccgcgcgcctccctggcgaccgactcacactcctctgtcgcttctctcgtggctccccgacggcctggacacaacggcacactgcctctcccagtagtcgtccacgccgccacctctcctcactgtgtcaaacggtggcggccgagatgcggtggcgaagcaagggcatttccgtcttatcatcgggtggatgagctaaaatcattttggaaatgaataaaatggcaaaaatggcaatattgcggtaagcatgtgcttcatataggcattttatcgaatcacgttttgagaatggcattctagcaaaaccgtgttttgaacgtggctaaatgttcattttctccccaagataggaggattagaagaggaaattccagggtatagcgaggagtggttgtttcaattattctttcaggatttgccctcacctttactgaattttagaatttcaccattgttttcgttaaaataattagattttttaaattttaagattcaggcccttgttttcactaaaacaattaggattttcagatctagagtagtgttataattgtttttaaatagggataagttttttaagaccttgatgagccttattaatattttcttacatgaagagccttattaatattgcataacagttatatcatcaaataatcttatacccttttaaagggcctgatgtcattttcaactataccttttttggtaaaattatcaaaaaaatatctacgtttaatttgttgctaaatttagtcaatacataagaaatcctgccaaaattttggcaatattgtcatcttaccaaaattttggcattaccaaaacttggtaagatttattttggcgacaatctgaccaggccaaaaatattttaatggtggtggtgagtagtgaatctatggcccaccaccaccttctacctaagagcaggtacaatagcaggcttagccagctataaaaatattttaaagagataaaggaaaagagagaagagcagcgggctacatatctgtagctagctgcagcactgactacaagacgtaatgtgtatatgacaggtgggactagatattgatagtatagtaagcaactattgtatgaattggctattacattggctataaataatttggagctagtagtgggctatactattaaacttgctctaataggggagtccttgttagggtgtagcatatgggtctgttcggaacccagggttcccaacccctctccattgtattctgcacgcacccttttcagactgctaaatggtgcgttttttgcaaaaagtttctatacgaaagttgcttaaaaaaatcatatttatccatttttgaaaaaaaagctagtacttaattaatcacgtgctaatggaccactctgttttctgcgcacactccggatggaaccaggtgatgcgaacacacgtctttcaaattgccatataaaaagttatctcagaagtagctaatttgtttggggcttttaaatggaagaataaccaatatggtccctaaagttttactcctgggttattttgggttattttagtccttaatcttttatattgtccaaacaagtcctttaaatttatcacataggctgatatagttcttggtcccaccaaattcaccacatggacatgccatgtcaccctcctatgcaaaatctatatgatttcttcaatttacccttacatatatcataggaaaataaaaaacaaaagaaaaaatttttaaaaaatatggtacatgtaagagcaaaaatatacgtcaaaaaggtgaaaaaaaaggaaaagtattttttcctgtggttatgtctagttcacccttacatttatttttctatgatatacgtaaaggtaaactggacaattcattatagattttgtatgaatgatgacatggtatatccatatgacggttttggtggaccaaggattattctaggccttttgataatgtttaaggatttctttggactatttaaaagattagagactaaactaatcatacaaagaaaactttagggactacaatagctattctccccttttaaaaggtgtataattaatgacttaattaatgagtcccttctcacttcaaattccgttacgatgcacgaagcatttagctagtttgttgacaaggaagctaggggttgttaacccactcacaaaacaaaaatttatcaaaacatcctcctacctacactggtggagaaaccatctttactcggtcgcccaaaatccataatagtcccggttcgaataggaaccgggactaaagatcatttttagtcccggttcaaaaaaagttattggaccgagttagaccccaattcttttttagtcccggttggtataaacaa

SEQ ID NO: 7109 - DNA, 8882 bp, Oryza sativa
tcctcctcccatctcttcctctacctcctctcctctgtatccgccccatcccctcccctaccctattcttaggcggcggcttccggatgaaacacgccctcacacggatgccgggaggcggcggagccggcctcgcacaccggtggtgaggcaatgcgcgaggcacgaggcggggccgcggacgaggtggcaggcgctacctgtggcaagcaacggcgggcggcaccgcgccggatcttctctccttttttttataatttgtgattgagagatgtttaatttcttttttaaaattgtgattcattgcatagatctgagatgtataatcgatctgtgatgcatttgatttgggtgtaattttttttaagatttgtgatgtatttgatttgtgtgtaagtaacttaggatttgtatttgtgatgttaatgatttgggatgttaatttaatttggggatttgggtatatgtatgacactcgatttgagggtttggtgtttgatctggtatatacatcttactcgatatgggagaaaataaaaagaaaatggaccaactgggactgcccctatcctctctttactcccggttattttacccgagactaatgatagcgatctttagtcctggattcgtagtcctggttggaaaaccgggactacagagggttataaactgggagtaaagacggattctccaccagtgtcataaacactttttgctgaatattgtctagaggttgagaggggtcaaatatgagaatcctccacaaccggctgaagaatcacatgtgcaataatgtcccataattcaaggtactcagcaaagacacccaccgtgagaacatacaaaatggtcctttgttggctcttgttttgggtaccatggcaaacaattagggtgcaagatcagcaatgtgctgtctatgaagccatttatcagtccaaaacaaggtgctaccatcatcacccaccttagagaaaaccgcgatagtgaaaaaaaaataacgagcacaccggttgacctgaatagggaaagctttttttttttgcatccattaattccaccgcatccaaagctccaaggttttgaagttctgagaaccagcccggcaaaaactttagtccaagccacaagacaatgaccgcttttcgcgtccttccatcctctccaaaggaaacttcatcatatctcatcgattgccttaatggcccatgatggaatgtccatagccatacaaagataaaccacacaaagatgtgagcacaaattgaaccaaaattctccgattggcccgtgctagaagatccacttttcatcctagatgttgatccactaatttgtcaataataggctgaactttgttgacaaccgaatttggtaaattgtgaaccaggttagacattgggatcaaggcggattcgagaaagagatcgattcaaagaacagagtgtgcttcggctgagatggatcggacagaggacagccgatacagcgaatggacgtgatgcagccgattccgatgacgatggtatcaaaggtgtttctagagtcgtttgaagtgcttcataaggattgctacaatggagataaagctctcggatatgcagttgtatctattaattaggatatttcatgtaattttcttagagatatgtttgggcaaaagtctgccgcaaagacttatagtatcttagagtttgttagaggtaagtattgtgtccggcaaggacatattttgtaatctcgggtataaatagaacccgaacccatgtaatcaaacaacaatcgttcaatacaatctcggcgcatcgccaccttttttactttcatttatttcgacgaatgtgctttcgggttgagctgcatcgattccgatcttcaactagaggtaaaacttgttatggcggcttgtgttctcggggttaatgcttccatctttatgacactttaaccctgtttatgtaattcgtcgagttatcatatacacgacacaatctatgttagttgcactttataacttgtcatcggctagttcttattgttagaaagcaatcggtagagttatgttttgttattaatctagattgtatcttgtatctactatctcttgcaggttttcatcatctcgcctagatctcatacttgtatttatgcttaatgctgtatcggttaggttcgatctattaagtaatatctataattatggatatctagcttgttttatgatcattgagagaggtagcatcggggtttcagccgatcttacctgatttagcattatgtcttatatgcttaattgatatgctaaatctgccatttatattaagatcttgttacaataaagtatattatgcttatgtttgatatattctatctattttaatatcttaatatagagtggtatcggagtattagccggtacatgctagatctatctgatcagctatgctataagtgtttataatatttatgttaatgtatatttcaatctaagtgatttatactgtctcggcatggcgactgatctatcccaatcacttggtttaaatatacatcgacataaggattatatagcgttaatatctacagccgatcgaatagatttagtcttatcttgtttatttataactgccgatcgatttacatatgacatcggctcaagaataaatgatatgtcatcagcgactggccgatcggctatcgtttatggatttaaccgtggtttcttttgtctttccttcttgttgattgcaggatcaaatcaactggcacactcacgaatctaaaagcaagattttcgacctgcactgaagttaagcagatcttccaggccaatgtgtatttttcgtatcaacaaatttgtgcatttatcaatttcctcaaagagaggggcacaccgaggtatttacaggggagatcaagcagctcatgtgagagaaggtcctgagtaaccgtgatgtccatctcactgcactaaatagggaacacactgctcttctgtacattagttttgagccatggtgctttgccaaagagattgagtatgtccagcgttgtgccaatgtcacttgtggagggtcaaaggaaagagccacattatccgcatagagagatatccaatgttgcaaggctcacaaagatagaggctgcagcaaacccccgtcctcgtcctttgacaccatatagtttaggacacccatgacaagaataacaagcatcatggatcaaggatcaccttggtgcaacacatgccggtgtgaaaatacctcaccggggtaccattcaagagaacttgaatcgacaaagatgccaagagcctgctgagaatatcacaacaaataggcctaaaacccaacttgtgcaagaactcaaaatggaaacacatcttaccaagtttattaccatgaaacccgagaatgagagagcaatgatcagaatcgactgggatacactttgcaatatactattggggaagggttgctcctagttatatacatgatgctacgttaaaagtcagtacaactcccaacacgatgcaaaacaccatgcacgagagcctcaagcctaaatctgttctttttctctaaatatccgcattagatagagggggcaccccttgttgtgtaagtgtgttgcatggactatggtcatgtggatcattaattgcataaacatatcactactattacaaggtcacgtgaaaagctagcaccagcaggcatgctgttctcacgtgtgcttggtggcgccctagaggaggttgtgcagtggagttgcaggctacatcaagcagggcatggagatcaaaacaagtaaacagacttgatcaggagaattgatggatccatgcggtagaagagatggcaggagccatcttggttgcgtacggcatggacagatcaaatttacaaagagttttggacttggtgattggtgcaaggctgtgattcgacggagcggttcatggccacaagacaacaagcatggtgtagatatgtggtggtgatcaaggtgatgcagtgataggggtgaaagcagtcggaaacgatcaggaaaaaccctaaaccattaccacaaccatattatttttctgaaacagaatcgataacggtaagatggtaacggaaacaatatcggaaatatcagtaaatcgaaaacggaattattcaatcgaaaacatgtcggtatcgttcggaagtcgataattactgtcggaaacatcgaacaataacatcgcacatttagctagcaatctagaatgattataaatatttgacgataattataaatatatttgtattcgacgataattattccccaatttcataaagataaagcaacacaggcacatagcaagttctcttatacataacaagtccactagaaccataaccacatagccacagtaacactgttggaccggatggaactcatcatggtcatcattttcttcaacaactgtatcatcaccagctacaacatttgctgagccggccggcaagctcccgaacggcgtgctagaggcattactgccgtgaggtggtgggggcggccccaataggaggcgacgtcgtgaggaagcttcgccggctagcgccatcatcgctagggggcgggagggtggggaacggatgggagctgccactgtgttggcgccgtcgcgccgctgcgttggagctgccacactgctgcgccgctgcgttggtgcctccgcgccgccgcgccgatgcgtatgagtacgacggcgctggttggacttgggacaggtcgactgggggattgggcagccaggagcagccaagcagctctaggttagggatttagggtttttgttgggctgagaaaatgggccaaagaaaaataacttgggccagccggccagtgatgtttgtaaaaatggtaattaccgggataataccgtaaccacacaaaacagtcggtaaattaccaaaccttttccgatatcatttccgtattttttttaccgtttccgtttccgacatttaccgtttccgaagcatccgataggtcaaattcggtagcggtagcccggtcagccggtaattactgctaccgttttcaaccctagcagtgagtatacggctcgagacaaggtgtgtgaggtgcgcgtgtatgatggttttgcactataccggtagggtagttagaccgatggattggttaaactgcagagcttggacggttataccgagtacaatggacggtggtttgttgctgaaacttatgaacagatccataagaaggccaagaaggctctatggtttggatagttttcaagtgagaagggcgagtagactgacggcggcaggtaggtatagcaatttcccccacggggccgggtcccctgcgtggacgggggtaggttagattttcaacccgcaggtccattgggtcggggccccggtcatcccacgggtttgccttcgggggcccggtaaaggtgtccattagttattttccatacaatttatgtagaaagcccattaacattggcccaattattactgctatagtataaaaggaaaggtcaaaactctaaatcaactcctcccagtcgccgccaggcaccaacctctcactcaagcgcgagaggcgagagggtagcgacagcgcaacacgcctgccccgcccgagccgcacgccgtcggcctttcccgccgtccccacactgtgcgtcgtcggcctctcccgctgccctcacgctatcgccctatgtcgccgcccctgggcctcgtgtcatcatcctctgtcgctgtctgtacgccgcgcgctgtcgccctctaccaccgcccctgtgttgtcgtcttcttgtcgatcggtcaccaacgctcctctccgttgcgcgggccccggctaggtggcgggttccctgcggggttgggggcgggtcctgtgttgcacctgcatccttcttcagggccggggacgagtgaggaaatcggggctcggggtcggggccgttcttgtccaacccggacctgctccgctccgttgccaaacctagcggcaggtcggtcaggtcacatatggaattatctggcggagacatgatatatctgagactcgacaatgagttgagatatatggagttagaccaaaactgaagaaaagtcccgggcaacatcgggttgaatacattggtggtgtcaacgagactgtttggtagtacaagatatatccaggatctgcgtggtttacatgatggggatatgtggaatatgtgtcgctgaaaaggaagagcaatcactatggtggtaatttcttcaattgattcaaagcaacaatgaattttctcaaattatcaacgactcaaactactacagatgcaggaaagcatggatggatttgttagctcggtccataagattacaaggaagaaagggttattcatcagtctggtgagtttaatttatctattcggtaatgacatgggttatctagccatggattaaataaaatcaaatttacgatagaagatgaaggtgaacatggtcttcgaggagtctatgatgtgacatctaagaaggaattcaattttacttgtcaagacgattgtgatgatgggatagaagatggagcattgttgtagatggagtccagagaaataagttataggaatagcagagtttcttgaagggagtaggtctggtgcaggctcatcgggcagctcatcatgaagttgcggagggaagacaaccgaagtctggagggcaggtggatcggcacgatgactctaactacttctgggtgtcgtatattcgtcaaggtggagtttgttagaataggtatcgaataattgatgttagttaggcttcatcctaattggttcacaatttcatttagcttttgttgtgaaaaaagttttttcttgcacatctctgtggttaatttattgctcgaaatatgcattcatcttaggaaagaaagatacataacttcaagcaattagttagcgacaaattctccaaagcacaatgccatagggctcacaaattgtttgctggctatgtgaaatgggataattgtatgctgattgctacgtgacatactctccctgtttttctttttcagtttggttaattcaaaaataaactaacctacgtaatgtaaaataatatgaagggagtatataacaaacttgataataatttactagtgaaattgtatcagagataactagttataccttcgtcccaaaatatatcaattttttttagaaacacagtacaaacacaggcgctcacaacatgcgcacactcactcctatgaacacactatgagcacctccggaagactgagccggcatatcttgagattgacgaagtcaccaccctatgagcacctccgaaagactgagccggcatatcttgagaaccccctatgagcacctccggaagactgagccagcatatattgagcatatcttgagattgacgaagtcaccaccctatgaacacctccggaagactgagtcggcatatcttgagcaccccctatgagcacctccggaagactgagccggcatatattgagcatatcttgagattgacgaagtagactgagccagcatatattgagcatatcttgagattgacgaagtcaccaccctatgaacacctccggaagactgagtcggcatatcttgagcaccccctatgagcacctccgaaagactgagccggcatatattgagcatatcttgagattgacgaagtcaccaccctatgaacacctctggaagactgagccggcatatcttgagattgacgaagtcaccaccctatgaacacctccggaagagccggcatatcttgagcatatctagagattgacgaagtcaccaccctatgagcacctccggaagactgggccggcatatcttgagattgacgaagtcaccaccctatgaacacctccggaagactgagccggcatatcttgagcatatctagagattgacgaagtcaccaccctatgagcacctccggaagactgggccggcatatcttgagattgacgaagtcaccacagcgcctcgctgtcgacgggtacgtcgcctaccactgaaagaataattagccgtaaatgcgatcacccgtgtcaaatctaggatttgaacccgggtgggctggttccaccacaaggaacctaaccagttgagctatgctcacttcgccaaaatatatcaatttttgactatatatgtgaaacaatttagatgcatagctaaaaattattatattttaggatggaggtagtacaacaatactaaaattttcttaaattttcttgttgggttgacacctgtgcccaaatgaacaatttcaggccaaattccggcgagcgagattggtgaaacttcctacattcgtgggaaccagaaagaggttcaaagtcgacccaaattttatccaaaccatccaaatattcatagattttttattcagaagttttatactacaagtgcacagagactttatcactgatatatgagcctaacaaatcgtgatcacacggtgagttcgaaggtagaggatatcaatcccagtgtacagctgtaggggcaggaggacaacaactggacaagccattcggccgttgggggggatccccctgttgggcccgtgaaggcccagatccaacggccacgagcagccgacaaggggaaccccctcgcttaatccgggccctccacgtgtcacccgccccagtggaaacgctccttcttccccaaagaggaaagaaaaacacacacacacaccgcgaggaggtgaaaaagaacgaacaaaggcgagtagtgtgaaaccgtccccgaattcgagctcccgcttcctcccccactttttatccccacccccgga

SEQ ID NO: 7110 - DNA, 14977 bp, Oryza sativa
aaaatctgtcttgagtttcctgaggtatggtgtttaacatctcaaagtgcaccgtttcagtttctgcatcatgttcatcttatctgaatttcttatcatgttacttaaataacttttcaggtgccacagcagaatggggatgaatgtggtatatatgttctttactttatctactgttttcttcagaacaaagcactgggagaagatttcagccagctggtgtgtcagacatttccacccttaccctgttttccttttgcaccttacaaaagctatgctaatatgttttctctatgaattagtttgatgatccagaagaatgggagaacttccgcaagggtgttcattcattccgagagtatgttctttttctgtgtatatcctgtatgctattattaaattgtggtcttattgttttttcctttttgcttctacaggaacagagaaaatgaaattgcagaataggtgagcatggtggatggcaatatttcaccagctatatgtagttatcaggtatgtaatggctgttatgaaatcattgcctcttctattttgcttttgcctcttgtctttcttatcaagtttttctcttgtatatgtaacagaatacaacagcaaattacctgttcatcttcctggtggcacaacctgaagaagtttgaagactgtcaagaatttgtttgtcatacagttcatgccgtcaagaggaagatggctatttctcagatacaaagcagcatcagtgtcaacctagcgctgtcgagatctttcgttgatccaggctattgataagctgaaagccccttttttggatagggttccatcaacattcagcacctgttagccgtatagagtcacagatgattcattccttaaaaaaaaaagaatatttaaacgatttgatactatacttatgcattgtctagaaatgctgggtgggatttccaccacctttcagaatatttagctgggggttatatgatgtacatcaatatgtttgtatcagatcttaaagatggtgtattcccccttccagataatatattacagtttcgtatttgatgcattgaaatgctgtcagcgtcagtaatctgaaagttcaaagtagcaatatgttgtgatccatcttgacagtaaagcagaactcaaccaaggaggatcgtgtctgatgttgctgccttctcagagtaagcagaacttcagatgtgacacctttgttgctaacatgccacaccccttccgatttttatatctttgattttgtttttcttttccttttgtgctaaaacgatatggaaattgcttgttttgggtgatgtttattctttttgaaaacaaaattgcatgaaacgctcatcatgatacttgggagggaaaggcactcaagatactgagcgaattagggtgtgtttgaggagatggggattagggagatggggaagatacgcaaaacgaggtgagccattagcacatgattaattgagtattaattattttaaactttaaaaatggattaatatgattttttaaagcaactttcttataaaatttttttgcaaaaaacacaccgtttagtagttcgggaagcgtgcgcgcggaaaatgaaacaatctttctccctttctcctgcgcttgaacgcagccttagtggtgatagtaggcaaaaccattaaccctgcaaatactattatgctccctccagttccataatccgatgtgtcgacgtttgatgtcgagattccggtatttgtatagtatggggatcgttggtactaggatatatacgagactgaggtaaaagagacggagacagagatttttatacaggttcgggcccctgaattgtcaggtaataaccctacatcctgttggccgaagccggtcattgctcttattcattataatcacaccagtacaatatttggggtagcctatctaactgttgtcgacatggcggtctgaacgtctaactcgtagtcgacaacagggtagtcttctcctcgagttcgtgcccggcgagatcagaaacaacgctagatccctacggccggcctatgtaggtaccggatagggccgatccaggcatatctctgaagtcgatatccggcggcttgtcttggcgtatgtcggcttgtatgttgtagcttctgtggttccgtgtatgttgattgtggtaggtgtccattgaggtggtcgtctcccctctcctcttaggggggccttgtatttatacccataggtatccccttatccaagtagaactagggaaaccaatatggatacaatccgagtagtccttgtcatttccatatagaactctggttgtctttccttatccggaactcctcatatatccgcaggttgtttccgtataggacatggtatgtggtgggtcctgccgagatttagtcaactactattaggtatgtggtattcataaccctgacacgatgttttggattttttttaatctcttaaactatggctttctattataatatatagaataaataaaaaatatttacttatattataatatttttaaagactattatatatatatatatatatatatatatatcttgttgtattgtttttgaactaaatattttgttcttgttcaagcggaaaaaagcgggaattttttttagtccgtttgggaaaataaagtctatgttaggaaagatttttcattttttagtgaaatatctaggaagtggaagaagcactttagtggcttctgtggatgctttacttctgggatcgaagcgcgcttagctggcatgccaaaccatttagggtgtgtttagttcatgttaaaattaaaagtttaattaaaattgaaaaggtgtgacggaaaagttgaaagtttgtgtgtgtagaaaatttttaatgtgataaaaaaagttagaagtttgaagaaaaagttgataactaaaccaggccttaggttggaactttatgcatatgacattacattagtctcttaatatcggttatgtcagggttatgggtgcttccaaaagaaaaaaaaaatgcatgattaattacttggtgaactactactccatcgcaggaagacaacatgatttggtcggcaaatccactctaaccacacagagtgcagcgagacacgttgttaccgtcgaaatgtagagatccgtatcctattttcctacgcgtttatgaaaagatttgccacatgccacgacacgcgacacgcgcgcttgttacacaggctttctcaactgctacacgcgttacggaccttccgttatactccttcggtttccgtttccgtttccgtttcatatcataaattgttttaatttttcttaaattcaattaaatcttaagaaaaatatagcaaccaaaacaggacaatggcatgtttaagagagttgattttgagaagaagccgtttactctcttcgtcatatttgaattatttttatgattaatatttttattatattagatgataaaatataaatagtactttgtgtgggacttttttttagaaaaaatataaattttttaaataaaataaatggtcaaacgttaaacacgaatatctacgactgagacacatcctattccaataaatctagacaagagactatccaaattcagattatatttcgtttagatttttatactttatgacagaggtggaactattttttaactcccatctggttggtgagtccgcagcttctaagagtcagcagcttctagtagaggagtattttctaatccggacgaaaagctgatcgttttgggagcaaccatacgagaagacaccgcgaaattggttactacgagcgggagacgagcaataaaattgcgttgggggggtgggcaggggcacaaatcaagcactgcagtggcagtgcagctagcctaaagtttgccgattccccatggagtgaacgcaactagaccttgggagtgagggggaggcggccatggcggtggcggaagtcgggggaatgcttgcatctgccgtcctcaaggtggcgacccagaagctgggcgccgccatagcgggccgggtcatgctccagtggaacttcgacaaggatctggaggggatgaaggccacgctggagtctgtggacgcggtgctcagggacgccgagaggcggtcgatccgcgacgcggcggtgcggctgtggctgaggaggctcaaggacgccgcctacgacatctccgacatgctcgacgacctggagaacatcacttccaaatcggatgcggggaaggtgcgcaatctccactgcagcgattctcgcctctttttgttattccttattattattattattattattattattattacggttttgcctattattactccctatgacacctacgtttgaccattcgttttatttaaaaatttttaaataaaacgaatggtcaaacgttggactaaaagtcaacggcgtcatacattaaaatacggagatagtattatttattgccgttgcgtgccgtcagttttgggctgttcagattaataccattttcaaccataccattgccaaaaaaaaaatgttcgcgtttattttgttgccaaatttagtaaatacataagaaatcctgctaaaatttgataagttttattttggctacaatctgaacaggccctttggttatggatttactagtggatgtttccgattttccccatctgaaatacagtaaattttattgacgagtattcctctattactaactcaaatcagtaaattctctgcagttgggatgtgtgatgatccccaatctgactattgctcacaagattaccctagctaataagatgaagacgataagtgatgaactgaaggagatcactaatcaacatcttagcttcagattcacggaagatagcagctataaggagcacagagttactgataaacgggaaacatcgtccaaggtggaagaagcactagttgttgggaggactgcagagaagcggataattatatcttctctgtccaagagaatgactgaagagaccgtaatccttcctatatatggcattggaggcataggcaagacaaccttggcgaaactggttttcaacgcttccaatttcagagactactctaaggtctggatatatgtgtctcagacatttgacttgaacaaaattagcaactctataatttcacaagtatcggaaagtgagagccagttgactgaaagggagatgataaataggcgtcttgatgagctactttccggtaggaagattctaattgttttagatgacctatgggagagggatcaatttcagttagatgatttgaagactatgttaaaggttggcaggggcagcagggtgattgccatcgtaaccacccgagataaggacattgcagagaagatttgcaccactgaaccgtacaaactagaacccctgacagatgacatgtgctggaaaataataaaagaaaagagtgtctttgaagcaagagatgacaaagaacaattggagaatataggaagggaaatagcatctaagtgtggaggtgtggctttagcagccaaatcacttggatatactctgcaacccatgaagtttgatgaatgggtatcagtgagaaacaacgatatctggaaggcatctactttcgaatgtacatctttgccatatcataatgtgcttgcatccttgtgattgagctgcagcaatatgcctccaaacctgaggttatgctttgcatattgtgcaatctttccaaaaggtcacatcatagtaaaagaccaaataattcaccaatggaatgctcttggtttcatagagcaatctgacatattctctactaggcagcttggtgaggcatatgttagacagcttttggggttgtgcttccttcaacaaacaaaggctccttcagtgagtttctacttaccacatgcatctatagctgaacagctttatcatttctttattagcctatagtacacacataaatacatatctgagatttttttatatattttgaacctttctttaatataattttaaaataaatcctgctaaacttatctccagatttgcatcttttggccacacaatgccatcctcattggtgtggcaggacaacactgttgcacctgttaaagcctgtggcatcacaaaacatatgatgtcacaccatgagcaatggcactatagtaactcgctaaaccattgctcaagaagtggcaacatttggttgctaggtgtccaaaaccttttcttttttaatgaaatttagctattggtagttttcaaatttaaataagtaaatgttctaaaaataaaaagaatttggcaagatacaaaagttacatccatttgcagttacagcaagggaatttgtgcagatggtcctttttagagttggccctactataagctgtggaaaagcacgtaaactaaatttaattgctgtggaccttcagcttcaatattatttatttctttagtgaaatcttagatgctaatatgctatcatgctagcccttctcattgaggcatatctgacacatacccctattatgagctacatgccattgggtggattaaactatttcatagaagtatcaatatactaaagtctttaatggagtactagtgtggtgtaatatatgcaacaggtattgctacaatacgtcctcccctcagctcattctactgccatcttcatgggttcatggacactaccactgtgatgctagtggcacctcccacttccgttggctttactatgcccacctcctaggtacccagacaatcttctgagttggctacccaatctactgttaatagcttgcaattttcttgctcactaattataccaaattcatgggagaaggcctctggcaagtacctaagctaaccggttgcctagcctagcctgccttggaacattcaggctgcctattaaaggcctcaccacaactcgtgtctctggccaccctcaatgcctgaacgtcattggtttcctgtatgtgaggaagaagacaagctcttctctctccatttctttctctgtgattcctagatcccacttcaaagttctatgtggagcttcttgtgccagaactttcttgaacttttaatctgtaatcattgcaatatcattggtcttgttgttgctatggtggtaaacttccatgggggtttgtttgctccttgttggtaggttttaatagagtaccgagttttatatgttccaatgatcttggcctagtaaacgaaaatcagctttaaggagtaaaccacaccagtattccagaaaagaagtccacaaggcctcatacaatgatttggtgcccactgcccaatccataccacttaagcctgcaagatgggtaactgcatgaataccatttacccccttttattttttgaaacttaagatggtaggagatctaccggatatattagaagaagagaattgaccctttttataaggaaaacagggcccgaaaaccgtacagttgcacagtttgctaaagggaaactggcaaaaccttacacagaagacacaaaaaaaacatgtgacaaaacgactagacccacagaagtgatcgagagaagagcaaggcctccaaggaggtgaacaacgacagaagccgctgccgacgcccgcccaaaactggactgggttttcacccgaagtggagagagttcacaaggcaacacctccaaggaggaaacgacacccacaggcgtcgatgtcactgatcctggaagaccaggcagggctttcgcctaagactccctcaagaagtgcaggacctctaagaagctagagcaagagtgttgagtgttatcgttgcccagctcatcggctgaacccgatgcagcagctctgactccactttaacacaaaaaacttacaccgaagggggtaaggacatcgctctgcactcggcacaactacaggtttacacagccacatggcacgtgaagcaccagcgaggcccaagcgccctgactgcagacagactggaccaccaacacggacgaacaaaaaactccaccaccaaaagactccacggccggcctgggagcagacgaccaagagaagggaggaggcctggccggcctgaaggggaactgagagctgtcggcagggggagcaaagacatcggtgttatccatgtttctagcgaggatctccgggcttcgcgggacaatccaaacaactgcggcaaccacctccaacttcaccacaccaccagtgcagagagaggagcactggggcgaacagcagagcaactgaaaggaagaaaatatggggagaggggggatgacggtcaccggtcacccctactgcttatgccgagacgacagagagaggaagaaagagtagggaaggaaagagaaaatggtggttgccggcgactggagcggccggagcctccgacgcgaccccccggcaggactcaaatcccgccgaccgacggagacagctggcgccgatgaaggcaggccgacgcgccgccccggacgccgacccgctgcagcggtggagccccgctagcgccggccaccccgcgggccgccaccaccaaaccagcctaaccgcccccgcttcatgcctctcgacgctgccatcgtagatccggcggcggcggggccggatctgccgccgcccagcctgggagaccccgccgccgccgacgaacgccgcccccccccccccaacccgcgcgcgggcacagaggagagacgtcgccgcgagaaggccccgccgccgccatcctagctcgccagccggctttgccggcggcgagctccggcggcggcgaggtgaggagggggagaggaaggcggcggtggcgctagggtttcgccccccgtgtcgcctgcgcgggggcgacgcggggggaaggcttctctgatcgaatccaagcgtatatagaccaacaactggtttacccccttttagaatatcacttgtcagtggtgtaggatataagctttgtcctactaagtactaaccatggaccttaataccttatcacttcgttgataatcaaagagttgtggaaacggctgaactcgttgataatcctcttggcatgggagatttagaagcactgcagtgaccgtgtgtttaatggtgctagccctaatgtcatggtggtttcacaggcaatagtgaatgagggtagcttatggtgtttagccggagcccatgctctacataagtttcttgtgaggtcgcttgccccaggtgattagttggtcttttcttggggctttggtcgtgcgtcctttgtatgcgacggggagggtccttttggtccctcctatttaagtttgtttttttcctttcttaatgaaatgaacgcagttgtcctgtgttttttagggaaaaaaacttatcatcaaggtccgaacattttcttagaagttgcaaaggatggcgagaatttcacaaacgtgtttctaccatcaatataacattaaaaatccatactcattatgtactaaatctttacctattataaaaattcaagatgtttttgtgtggaattttcgtctgtcaccctgagtctcggacggttgcgtttcactccctccgcgttgcgtcagaatcggtgtcacggaggcaatagattaattttcggtaatttctcaagagcgtgcggatggcctggttagaatcgaacgacgaggcacggaattatccagattggttctggcaggttcccgcacaaactatggtaagtaaacctaaatcagtcccatgcatcttaatattaactgtccacttaatatatgtagagtaacgatactaagatgccatttgttccatgaatccattgtgacatggattgtccttccaacgccatatctctactgttataaaaaataaagatttttttgccggtattttcttacgtcatctgtatttgagtgggtttataaattcgcttttggaaatacagattcgtgtataaatttgaatttaagtttatttacttttggaaatacaaaacaagttgtataagagatttctttaaaaaaacttacatgctaatttgagatgaaagtcagactcctaattgcagctcatgattttctaaaaaaaaatatccaagcgaattcccatagtgaatttcatcctagctaaaccatataacaataataagattaaaatagcattcacccgttgcaacgcacaagcattttttctaatctctactattataaaaattgaagatgtttttgctggtactttggtacgttatccgtatttgagtcggtttttaagttcgttcgcttttgtaaataaagatatgtgtttgagtcagcttttaagcttgtttacttttggagatacaaaggagtcgtataagaaatctcttttaaaaaaactccacattgctaacttgagatgaaagttaaactcctacttggagctcaagattttctaaaaaaatatatattctagtgaattctcacactgaattttaccctagataaacaatataacaataataaaattaaaatagtattcacccgttgcaacgcacgggtattttttctagtgaatcaaaatgctgaattagttgagtatataaatctaaggaaaaaaggataggagaggaaaaactgctcattacaaatacccgtggcaacctctcataggtaatggaagttgtgtaactccttgcctgtgtgtcaactaggaattcacacaggcattacaatgccaaaattgataatgcaaaagaaaagaaaaaaaaagcaaaagaacatgaccagcaaagccttcatgttgaagccaatatctaggtcaactcctggaacagtatgaccaacgaaagtatagcaatgttttcttaattttgtggcatataaggtgatatatttatatgttcttttgttgcagactactagggtccataacgaagattctacgttcttaaccatgcacgacctggtgcatgattttgcaagatcaatcttatttgatgcagttctggattctggaaaaaaaatcaatattggggtaagcagttgtcgctatggaatgctcagagattgcagcaaaccactagagttggttacaccttcacctgcaaagataagagcactgcattttctgggttgtggcaaaattgagcttcatggtgttgcattctcatccgcttcatgcttgcgagttttagatttaagtggctgttccatcctgaggttacctgcttctatcggtcaattaaagcaattgaggtaccttaatgctccgggtatgaaaaatcgaatgattcccaagtgtatcaccaagctctcaaaattaaatttcctcagcctttgtaggtctcgtgctatctcagcactaccagagtcaattggtgaaattgaaggtctcatgcatcttgatttatcaggttgttcacgattaaaagagctcccaaagtcatttgggaagctcagaaggttggtgcacctaaatttgtcgaattgctctcgtgttaaagatgtatcagaatacatttgtggccttaccaaccttgaatatttgaacctatcagtgtgccgtaaaattggatttctaccgagaacattgggcagcctcacagaacttaagtatttgaacctatcaggttgttttgggataaaagaattaccgaaatcatttcagcagctaaaaaatttggtgcatctggatctgtcatgctgtaattgtgttaaagatttgtcagaagctttagatggccttgcaaaactgcagtacttgaacttatcatattgtcaccattatggaaaccagtttcgtctgagagggctgccagaagtcattggcaatctcaccagtctccggcatttgcatttatcggggttcctagacaatatatttggcaaccaatctggagtcatggacaagctcctggaaatagggtatttaaatttatcaacattccagggtaatatttttcagcaactaccaccaggtcaaagtcacagtttcattgagtgcatcggtgccctttcaaatctggagcatctaaatttgtctaataatgtcagcctttatagtgtacctgaaagtctgggtaaccttaggaagctacacacattagacctcacaggttgcattggactattgtggctaccagaaagtataagtaaaattcaaagcttgaaatatgtacttatgaaggatttgttgagacttaagtccacactatcttgtttcaacaatggcccaatcttgttgccaaactttgtggtccaagctgttgacaagaaatccagcaatcttggtcagcttcttgatgcaaaccctgctgagttggacataagtagtcttgaaaatgtgaagtccacaaaagaagcaaagggaataaaattgtcaggaaagagaaatattgtcaaactgaaatttgattggaccataggaaccaagcgatacgtggaggacatggaagtgttgagagaactagtgccgccaagcactgtgaagtactttgaactgcgaggttatcacagtacaagctttcctacctggttaatgggcattgcacactgtctccctaatcttgtcaaaattaagatagtggatttgtcgaaatgcagcatactaccacttggtcagttaccaaaccttaaacaactggttctcggtagaatgaagagcataacaaagatcgatgcggacttctgtggtggtgcgagagcatttcctcagctgaagacatttgacatatacagcatggaaaggttgcaagagtggaatacaacatactcttgtggtgaggatggtgtgactgagttcatgttccccaaccttcagtggttaagcataagtgactgccccaatttggttgtgaaaccactcccgcctagagttacgtggtggaaaatagagggcggtgaaagtgtcatatcatcatggggagggagtgtgcacactggtacatcttcatcctcttgttcagtaactaatctggtcgtcaaattctgtacgttgccgttgagtcagtggagtctgcttcaccaccttcctgccctccgtcacttaaccatccactggtgcgctgatctgactagctcaccagagatcattcaagacctccactcactcaaatcactatccctagatggaaacgaacaggcagagcttccagattggctgggtgacctcccttctcttcaagaactaaagataaccatgtatccagcgctgactgagctgcaagagaaaattaggcagctcatgtcactacagtcattgacattgtcttcttgtcagatgctgacatcattaggtgaatggtttgggagtctcacctctctccaagaattgcacatctcacactgccaaaggctgaacagtttcccagagggcatgcagtatctcacctccctcttgtcactgcatctgagttactgtgagagcatttcagcactgcctgaatggttaggaaacctcacatccctcaagacactccagatatgggaatgcagaggcatcaagtctttgccggagagcatcgaacaactcactatgcttgaacatctagaaatttctggctgtcctgaactaaagcaatggtgtgaattagaggatagcaaaacgaagcttgctcacataaaaaataaagtatgcactctatcagttactgttatattcatctttgtactgactattattattttattcatcttagcatagaatatttgtgtttagcatttcttagaggatactttatgtggatatgtctagattttaatatgcatagtgatgttattcttcttttggacacaaacatgcaagtagatatatcaagaggacaaatacatataaaatattcctaataaataatattccatctagtaaaaaaatgttgttttggacatataacatattaacattcaatacttttagtaccagtatcttcaatattttaattggtatgtctaagtcgcatttatatatttctctcatgtagtagttctctataatattataatttggtcaccaaagctgttcatcaattgccttttttctaaaatttatcagtcgattaaagtttcattgcatataacctaaatttgcaatctgaatactgcaacttatacatttgttgcaacttttagtttatgttgtattttatttcctggattaacctagatgcatttgtatgcttttgtatacatttataccattttataatggaatcattgacagcaaattaaagtatgatttttaatcttagttagaacattctttgtttctcagcaagatatatgaaatattgatatatgagtatatgactttttagatgttaatctagtgattaaaaagctattaacagataaggaaaaaccagttgtttggtaaaaagattgcatttatctatatgtatatatagatactagtatcatagaaacttatggtcaaactagtattttgaacatttgtgaccagaaaaatgacttcgttttttttgcagtgtttttggtagtgctgggaggctagaaggtgtcttcactaatctcaagcttgcgttacaaatccaggagcatctcggcgctatatgtgctgccatgtcactgccggcatctcaaaaataaaatacagatgttttttgttttttgatgggggtacttccaagctccatgtcaatgctagtcatttctgccataggagtttcctaggtacaaggttgtcatgtctctcattttcctacagctcattgcattggaaaactcgattaattagccctaatgaccaatgactaatgcaagtgcttaatatatatacatagcatacgatctgtttttatatccaaatctctcgttcttctcgagggagcatatgtaattttatttttatttttttggtttggaaatatacttggctggacctggaccatatgagattctgacaccatatgctacaaacactaatccaaagagcatctctcattggactaattaatcagg
